United States Patent Application Publication US 2013/0096032 A1 - sequence listing, part 38

SEQ ID NO: 1359 - DNA, 100028 bp, Arabidopsis thaliana
gaattcagtttggttgaagataaaaatgttaaagaatttttcgtttatgctgaaaaaagaaattttcccgtttattgggctgacccatttaatatcacatacatatgtcttttttctttatatgtatagataaccaaacaacaaaaggatatattggtatattggtttattaaagcaaacaacttattatggagcttggacttataagaacacatgtgtggttatgagttttgactttgcttatgaagagtttaatatgattgaattacccgttgaggcttgcattgtttgacaaaaatatcgagcgagcctcattaactacggaggcaagttagctgttttagaatactccagcctttcgtctaatgacaatgtggacctgtgggttatggaggatgcagggaatatgcagtggtcaaataagaatctggtcttacctctttcacaaatgaagtttttccatggcgataagttggagatacaatgcatgagtcgatgcagtcagattaggctggtaaagacaaatatcagagcgtttgaaactagacactctgtcatatatgatttggagaagaacaaaataagaagcctcgcaataaagaaattctcacgtctctggtttttggatatagagaggtctttgcattggactatttgggaggatgatcttgagagcattatgtatttagagacctaaattaagtttgaataataccactttgagctcctataattaaaaatattttaaattagtacatttatgattttaatacagagagattttaaatgtctaaatgttctgaatatggatacaattagaatagaggagccgaggcaatgaaactttcacatcaaggaattcttggttaacaaaagaacccctcggcttaaatagttagtagttttgagattttacctctagtaagacccatcaaacatctcaatgtttctcttcttcttctaagcttttttaactagtcttatgcatggagaagcattcttgtagctcagcgactcttaacaacaagattgagaaagataactcgcaactatcttttctccgataaaatggttctcaaagacacgtcgatgcctccctttgatctaccagaatctttcaccgtcttaatccttttccgtacgttatgcatacaattctattttaagcgcatgtcctctataagaagtttcatgtttcaaataaccctcaaaaacctatatagtacctataactagtacaatcagttatttttagaagacgagttcacaaaacagagcttatcataaaaaccaatcaaagaccaccaattactcaatttgctgatcaatgaattgatacttgaattgtttaacgtgataatgattcttacacgcacctacttatctgttcagtgatcagcttcatggttctctttatcaatccatcttaattggcttgttattatctgtgtgcacaacaagtacgtatgtgactatgtgtttttcttttgacgccgtaattctttgaaagttttgtgatatgtgtttatttttcatgtcacgagaggggtaggaagaagatccatatgtactgtgtctatgtgtatatgagagagatgggaaaacaagtagtgtgtatcaaagacagaaaacactgcaaccttttatattgtgtagtagtcacggaaaatgtaagaaagtcagagcagaagtggacactataccgggaatgataaatgatagttatacagctctcagaaatgaaagagactatatataccatttcttttttctcgacatcagtaacagtttcagtaaggcgcctcaagaaagctaggacagagagcctatcaccagctgcaagtctctcttgtacccagatgcacgcattcatctgaaaaatcagagaggactagttacaagaatcatatgcaaacagaacgataacgtatttgagccatgcgtacttcgcttagtctatatcttaatgtttcatattcatatctccttcctaattgtgattacatacaaatctaatgaatgtgaataaagaagataaattcctgcaaatccacaaggcaagtggctcaaatacacaaattgtcaaattcatcctaaaccaacaagaaaataggctcaaacatgcaaagattcataaacccacaaggcaataagctcacacacacaagattcatccatatccacaaggcaagaagctcaatcgcacaaactcgaacaaggttatagaatcaatcgaacacaagttcgtatttctcattcaatcggtctaagtactcaaaatccacaaggcagtgcaacctgaacctcctcaaagatttgtatagcttttacgttgttgagtaatagatcagttggcttatttgtctactattgaccccctgtcctctgtgttcgattccacttattacatactttagcccatttttcaagaaatagttgttttctttacttgtatgtagctggttttatttttgttattgattctatttctttttttctcttttgcatttcaactttttatacgataacaactaaatgctttaaatttttgcaatatataactttttttagcttggtttccttttaaaaagttttaaaacaacatgtaaatttcgaatactatttttatttagttggtttattattaataaaatttaaatcaacatgttagtctctaatatattatgtaacagttattttgcgggtattttattttaagaaatttactaatattttatttaaattatcactcctgtaaaaatattttctagctctgtcactgagtaatccaaaccacaaggaaagagaatcaaacacaacaaattcgaatagattacaaaatcaatcgcacaaaagttcgcatttctcattcaatcgttctacgtaaaccaaattcaaaaggcaagagcatcaaacaccacgaattccaactgattacagaatcaatcgcacataaatacttatttagaatcgaggtttcacatttcatcattcttagtactccagatccacaagtctccaaaggtttaagtcgtcaactcgaaaatgcccaaatttgaacagaatcaaacgcaagttcgtgttaagcttcaaggtttcacattccatcgttctaagtaaacgttattcgaaatctaggcaaatatacataagaattagttttgatctttgtcgatttaaaagcctaaagaacctaaaatcgactgtgtataagggattaagaatattgagatttggttcgggttttcggtttaccctttcgggtatcgggtaatacccgaacacgaactgatacccacatgtacactaatataagacccatcagtgtaaaatcgatatacacgtacccgccccgaaccaattttttcggttcggttccagttcgggtattcgggtacggtttttatgtccaaacctaaatcgaacgaaaacaaaacaattgaaagaaaatccaaaataaaggagttatactataatgtaagcaaaatcgaaataaaaaaattgcactagtaacagatccataccttagtctcaaggagaaacatctcgtaaagcatcaggttcacttcaatgattaagtttgggttcgtcattgttgttgaatgggatgatagagaagacgatgataaagcgcgaactaacttcccactgaaaacaaagacctttctattaatatagactaggtgtttgaagtcactggttgcataattttgtttttaaacaaatttaatttataagaaatatcggtataaagttatgtattttctctttgatttggtataatgcatgatttattaacattcgattttaacaaaaatataaaaatataaattcaaaaatattatattttcttacaattttatatttttaaaaaagcaaatataatcaatttcaagaaatatggtatcttttgacttgtttaaatcttttcgctttgctactattgacataagtttttcttgagtatctcttgtgcacttaacagaaaaaatcattagaaatatcaacaatttattcactgttttcaataaatagactcattctcacatacgtttgattattatgagtttaaaacattcaattttgtttgttcatgaaaaatcacatactcttaacaaaaaaaataattagaatcaaacatttaccatcattgtgtcttaattattgttagtatatgttattgtattaaaatcatattcttagaagaccaaattctccattaccaattagtctacttagcattttttttctaagttgaaaaatataatgtgaatgtttaactaaaattaatatttacttatattaataacactcaattttaatatttacactcaattaatatatatgcataaaatctgtaactgaagtatgaaataaatactaataaaaataattaaatattgactataaattcaataatgtataataaaaaattagaggtaaatctataaaaaaaaaagtgaggtgaaagtaaatatctatttgaaattttgtgagaagtatagagctctctactcaaaagagttactttcttaaaattaaatcacttgatattactagagcagttaaacccataaattaaattaaatctgtgacacaaacatatttatgtaattatatctatgatttgattagataaatttttaatatttatttttgaatttaaaaaacaaaaaaaataatcaaaaattcaaaatgaaacaatagtaaattgagatgccaagtggaccaataggaaggtagtgaaactttacttttatatatacatgattttttcattttttctctctgtttattattcatttaacataaaaagacaatattaccctccatataactcacaatatttccacagtttttcacattatatttttctctacaatgtttatcctcgaattaggaaaactgaagaagagcagcttcgttttcagaaccttcccaggtatgttgttgcttttcagaaattatctagatatgggttcttctttcgattcttttttaatcatgagataatttttgatatatggtagttgttgaatcataagagaacttttgactagattcgtttttttcttcaaaatttgagtgttgttgattgcttttgtatgaaacttgtcaaaaaaaaaaacttgtcaaaaagattttgagtataggcagtaaaagattttagattcaaggttttcaactttgagatgattagttttcgacggatagaagagaaatccgatgaatgaatgaatctgcctttaggtaacatatgattcaacctattcataaattacttattcaaagcaagagatatctgaaaacagagaaagattcattacaaggaaagagtttcaaactttacacagagtagttgacttgatcaatttgttctttgtcctgttcggatgaagacgctttgaaaagttcttctatccccttaagctctttggcgacatcgatcattgtaagcacgtcttgtcctggccagaatctgatacatctcaaagcaagcccaaaaaacgtttccacttgcacagcagatgcttcactctcaccgttccatatgtttgaatctatgacatacatgaactgatccgctaattcttcaccacaaccaggaaatgggaatccaaactccccaatgatagcagataaccaggttaggccaagctctccgcctagaagaaacagcattgtaactccaaagctatagacatcaaacttttcggaaactaaacctgttccattatactccggatcaacggataccccataaactactttatcatcatacacagatgattctccctcagggatcgatattctcaaacagaaagaagagagcttcgcagtcccatcttcgtccaagaatatgttttgaggtcttacatccctgttgattatgactcgaggaaaagctgtgtgaagataagctaccgcatttgcaatatccttcccgatctttaaccttgcactccaaggtaacggagtaccgtccatgtcctcgagttttagaggtcctttctctgctaactcacaaaccagaaccggtttataaaactccacacagcaacccaacagcttcaaaacgttcttgtgactgctcatcatcgacaaaaccgctatatcgcggtaaacattttcaggagaagaaaaaaggacataatctccttcccatttcttgatgagtactctccgttcttctatagtacccttgtaccatataaatctatcttttgctatgatatgatctgcgtcgaagttgtttgttgctttaagaatttgatcagacgaaaacattcggattggattgtatttaccatctgaacacgcgattagctcctcgtgcaacaagctcccgttcttgtctgaatgtttccttgtctcactctccgttttgaaaaaacccttcatatctttaatcaggaaaactaataggagattttctaacttcttggtgctaatagaatcagggacgctataaagctgtatatctcaacgtgacaacaacctctgttttgctaaagaagaagcagcctgcaacttgcaacaaatggttaattattgggcttaaggaaaaaataattattgaaactatactttagagtataggcaatatatgattcaacctatgggtttacttactctatcggtacctgtttttgtctaccgttggtagaatgatattgcaaaattgatttggttcattagattgtattctacttttattttcctctttcatctatagtaattttgtcaatctgccttaacttttttgcttattcattggcttactcaactttcttcttctccttttaactatgcacttcggtcactgattgattcttgtgtgtatttttcatttcagttttaacttactggcacaagttaggaatgaactacaactttattcgtccagacttacttgttgggatcattcttataggtttttttcttatcattctgttaaaattattgaatctcttggagctgtgttctttttatattctctgcttgtttactgcattggggttgaaaaccatattttgtttgtattgcggtgatactcagtatatgctaagaaatgtggttatactcagcatattcgctgttaaggccttggtaatgcaagctttattttctgatttttgatgatttggctgtgaacttttgtgattgattttttagttcctgtttcagtgtacctttctttttgcttaaataggaatgatgagaagcctatgaggtagggagtttattttcttcagagcaagaaagcttcaaattcctattggtttatcagtcaagtgttacatttttcttttctctcttggctctttgttcttaccacttttctttgacataatgggagctcagaacagcgaatgactttttgttgccacaagttggaaaatctctgttgtcaattacctctttgtctgtttgcaaatgagagtaattgcagaagttagtcatgatcccgttcttactaattgtcttagctgctagagaactcggaaccttttatcgtttcacatatatgagattgttcaggagcatgcataagactcacaagtcacaacctaggacttgacatattaaaatcttttgatgtaacagagactctgatgcatttgatttgagaatacgtcttcctgccctgtgttgtacactgtacaaagctattaagcgaaatggacaagttacatacgtgcactgaactgctggaataggaagggctcctgctgttgcggtatgttgcagaaacctgttactgtctcttctctttttctccctttttatttttgtagcacatctttcattgtgagtctttcatgagcgtagatgtattggtttccagtatcaaaacaacattttttagttcggtttataagactgttgcaaacagtagttgtgttaatatttgtacttctttggttgactaatgaaggaatgaacaagtgttgacttttggctgactaacattgagaagagtagttttagtttcagttgacatacatgttctgggtgcaaggctataaaacttatggaagttcatgaattacttattctacttctgatctatgttctctctacatggttaccttgatatctatatattatgtgaggatgcttggggatttgcttcttctcctatgcaccgatgattatgatagttagatttctagaccactggatcacgttttgtagtaatatatactgaaaatatagcactcaaatgattaaagcttgggttagttcatcaaatagtcttaggatttagctattataattgtgatatctttagatggctgctggaaaataaatcttgaatacctaattttttctggttagcaaagtgttatactttcttattctcttggggctatctactctaatcacttttaaatgagagctctgcacactttagtgtaagcaataattgatttatgaagagcggcgaggggtgcaaatcactgctatcaattaacgtatttttttgttggcaaactagaaattttttgaaagttaagtcaccatcccattctcacaaattgtcttttactgctaaatacttggaaccatcaccatcccttttcacatatgagactgttcacgagtacatgcattgagaaatttcaccatgaatacactcactcacaaacgtagggcttcacatattgtaatctttgatgtaacagaggctttgatgcatttgatttgagaatgcgtcttcctgacgtggttagtacactgtccaaagctgctaagcaaaatggagaagttacattcgtgcacactgcactgcactactggaatgggaaagggttgttttttggtatatgggcatgaaagcttattgattgtaactctgacactgaaagtaaagtgttaacattggatggtaacaggtgaatattagataaaatgtttgatgtcttgctactaaacacataacaactgtaaaaccaaaggcccttagcccattattataatttctattcagcccatcaaataaaagagttctcggagagtgtttgttgatcaatagccttttattttaggttgaaaaaagtttacactaaattaaaagatattctgcacatgactcgtgctacaaaagatgtacacgtggaatagatgttacttccataatattccgaaaaaaagaagaattgagtatccataggttatcaaatgaagaaattaagaagatacataatcatttggatcaatattgtctttaatcttttcttctaactcaaacaacgacgataaacaacaaacgtctctacccttctcgcctatcgaagtctccggcaagaatcgtacggacgtcgacgaattctcatcggaggacgagtacaacgagaccggccacgaagatgaaagagaatcctccacgacgacgtcggaattaggttctccagcaacatctttagaaggccctactgctaagtttaagaccaaatcgacaaaggcggcgaagatgtatctatggcttgccttgacgttgactttcaagaaccaaaagagaagtttctccaggcttatccagtcatgatgaagcacgtgtacttcaaccatcttttccattgagttcttgaaatcagtgtaaggatcgtttgactccaaggacaagagcattaaaccgtcctcttcttcttcatgatcgtctctcttggtagcttcttcgagtatagagttcgatgttcctctccgttcaaagatgagtctcttcgatgattttagtcctttaatcacattctctatagactctatctctggtggattttctatagcatggcttgtagaggagaaggaagagtaggaggaggaggagggggaggaggagaagcttctcggtggtggctcgggttcgtagacatctttaggtttgttaacgatgaaggaagctttggaagatattgttttaaggttttgttgatgagaggaaggccatggccacgaagaggaagaagatgatgaatttgaagaaaatgatgaagatgatgtgttcttgtttagaaatgggagtttcattttccttaccattttcctttttgattgctgaaaaaataagacaagacaagaatgtaaatttctcttttcttttggggttggattcaaaattataggagatttatggaattaatggtgagagagggaaggaagattttaaggcttttgaaaaggagaggagaggagaggctgcacgaaaggatgggtggggaaaagaaaagaaactttattttatttattttgatttttgaattaaaactttttttggttagtgtatttaattattggcaccaaatttattgttgtttggttggggatcattcaatttttgtaagtacaattttgatatttgaatatccaaaatctatatatatttgaaatcttaaaatattacattaaatttatttattgttaatacatggatgagtccttaaagtatataaaatcacttcaaaacttaactatttttttcatgcatttgatagttttccgttagtagtacacaaattcgtcactgtttgcaaatcaaatacacgatcgtatacatgcatattatggtaaatttaagtaactttatctgaaattgataaaactgtaatatgaaatttaaaatgtttccttgtttgataatatcagaaaaaacaaaaatcaactttagaaaatggatggaaataatttcgtatatctgaatatggaacgtaactgaactagtgtctgccaaagttaatcaacatcaatgtttgattaatgttcctattaaagattgacaggcaactgttaatatagatagatacaacaacatgacataaacgatcttcaaaataaatgaattcagcaatatctttttttttttggaaaataatgaattcaacaatatcgccaaagtagttaattgaaacttgatacctatacctaccgaaaatagctatcatgatcataatattataatttatccctaatactaccactaagccatcatccaaattccaaacctttgattggtagtctttttattaaattatataaaagatagaccttttaataaatgttcagtgttagtgtaacgtaatgttttagacctaaatatagtacgaagatctaattattgtaaattgaaatgagaacaacgaatttaaaacatatattaatatataggtatgtacgtgtacgtatcctacactttaaaatataacacgaactaattaatataaagagaataataaactcaacgaacagtcgaaggaaccaactaactatcaaaagatatgacgtcgatgctaaacagttttataatttccgtggtagtcgcttcagctgaaacatttcccgaattcttataataattctttctcatctctttaccaaatctgatactgctttaatgtctaggaccttcaaagttaaagcatcgtggccatcgacttggccggtacggcttgaatacgaatatatctaaaagaaatttggattgatctacatcaaaaagaaattaggattcatctacatcaacaaaaaaaattaggttacaaattttgatctgagcccaacccaaatagtttaacgttggtatttattttcgagatttgaagtgtgtgaaaaatgaataacggaaagaaaaaaatggggaaactagagatttgaacaaatgaccatttaggtccaaaattgatcaaaactagttgactataacctgttataattaattatcacttatctgattaaaaataagtgaaaatacaactgcaataaaatgcgagagaggaatccaacaacaaaaataagagagagacaaaagtctaaatgcttacatatctatcttcacgtatttcctcatggacaaatctgtgtcagacttgtgtcacccacaaacctaatgttaattttttaatatactttcacttttattcactgttttagcagttacatgcatataactactaaatttcagcagaagagtcatatgctgatagtgatagaaacagtcaacagtttcagctataccgatcatgttgcagttttcgtcaaaaaaagatttttatcaagatttgtgtccagtagtgatccagtcatgtgtatcgaaagacaatgggattaatgaccaagtcgtacaatctattggtttgtatttgtatcacatagcagttagacgatgaaatttatttgcaaataactattttcgttaaatcaggactctcgctagagtctagactgtgtacgtgtgtaagtgtgtaaccatcctttgtttttggtctttgtcgacgccatacttgcatatgatccacccacgaaaatacgtaacctatccatatctaataaaatggaagaaattaaggattaattattacaatgaaagattcaaaaccatagcttccgagttccgatcttacttttcatgatgggcacattaacgcatgcatgttatgagaggcttaagaatacatataaacctaccatcatcaaatctatatatattatttatagagtataagctcttgatatttttttactactagctactattagtgatggaatcactggaactaatctcttataagagatgcttctgtcttgcttctgtaaaagaaaattttgttttatttgataaaggaacaactaataaatagattaaattaataaaatgaaccgtagctatatcagcatgagtcacacgcatggaaaagaaagaaagaagatttcaagaattgaccacataacataagatgatgatctcttgggtccgcatcaatcattctagacgtaactcgcgttctaaccaagaacaaccgtcgagtgcatgtttacttattatctcatcacaaattatcgagtatatatatcaatgatctattcagtagttttcacgatacaattggatgtagcgaagcgagtgtaccgcaaccacctccaccatgaaccacttgaaattagagaaagtgtggatggattccaaggacaagtgcatgaatccttgttcctcatctcttcaagaatagagtttgattctcctttacgttcaaagatgagtctttctgatgattttatccctttgatcacattctctatggactcggtctccggcacctcttctatggtgtcgatggtggatgagatggaggatgatgatgtaggaatcatgatgccaggaagcgaattttcctcctcctcctcttccttttcattctcccttttttccttctccttctcttccttatcctcctcctcctcttcatcttcggcgtcataagggttgattgtgctgatggtgattctgaaagattgagttctagggttttggtgacaagaaggccatccccatgatgatgaatttgaatttgaataacatgaagatgaaaaactcttgtttaaaaatgggactttcataatttttccacctttgttgtttgctatcgttttattttttgggtggattcaaaatgagaaatatacttaggggagtataaatacaaaatgagaaacttagtatttattgttgaacctaaaagtataactttgattaaaagtaaacaagggtttagaaaacatcattgaccgtattacatgctgatccataattttacttataagtttggtcgtacatatttatctatcaaccataacaacaatttgtcccattcgtctgcggtccgtctaattctggtaaacataataataaccgtacctatcacaatttatattctttttaatgttcctttaaagctactcgacactcaaatgttaaaatatggatgtaacaatatatcttccacttttaatttcacggtgtcaccatatttattagttgacaacttcacttaagaaaactggcttgtgattatgcgtatatatcctaaacataatgcaaagtttgaaacgcaagttttcacatagcactacatttcgtggaatctaattttccaatatcaatttaagcatatttctatatgttgctaatgtacatgtaaatatgtaatgtttctattatagtaaattaaaatgtacttgctttcgactatatgtatataattatttcacccacttataagttgttgtttggatccaaagttcttaattaggacaccaccacatttatttattgtttattttgtcatcatgcaaccgaatgtcaaatatatctatactaaacgcattttataatctctaactatatcatataagtatattgtgaaagaaaaattattttcttcttctccattctaaaaacgaaattttacaataaaaaggaaaaaaagaaaaaaaaactacagagataacatttatcaccataagatccaggctggatcaatccaaccatgagtgttaatgtttgggcttgaaatctgatgaaacataaattaattgagcttctgagcaatgtgtaaatgtgttataggtttaattacgttcaaccacttttttcatttatttaataagttgattttccaagaccactcgtaatcaactttcatggagtccgtttatggttaagaccactcgtaatcaacttacaagcaagttaaacagtgtcctaaaagtagaagtctacatgtcgaagaatgattgtttctatgtcaagaacgacgacgcggaacatcaagaagtacatgcaaatcgacgtgcatcatcatcaataagaagtgtgctaattgtagaaaaaagtaacacttagttttcaaaggttctattaatcaccgtaagcattggctttagatgaatcacagaaacaaaaataagggttacgaagctgttcatggcttctttttccattagttcggattacaaagattcatgattttttatgatactttcttgttttaaccttggtgtattacataacaaataaccaattaaatatagcagatttcatttatatataaaaaaagggctgacacaaaatgttaaattcaaaagattgaacacatggagtgaggaagagaagctgtttttgatatttgcacacaatgataaaacttcagatgatcaatcggacaacatcatcatcatcaccataccatccacacagaccattttttgatgaattaaaaaaaaaaaagcgttgagaacgacaatggaggacccccagatacatactttggtattagaaggggcaatgattttctagcaaaccagaagaagattccagaagtaactagaagcaagtaccttccggaggttgaacaagcttacggttatgcgacgtagacatttccttcttcaactgtaccagtatatcctccattgtgtactctctttgccagtttgcaagtagcccaaatttcttaggatccacctatacacatacgcataaaaaaattacagagcatccaaagaaacaaaacagagaaaggaagggcggtggtgagtttatacgtaccactcctgtttcgtggttgacacaagccatgttgacacgtgaatggaatcggacagttggaggtttctccgggtaatctttgtcacaaaagagcttcaactgatagattctaccttcatgaacagtctgtgacataaaatttatctctgttactacaagcaaaagcaacaatggcataatctgctcaaataaagcttaagagattgtatgtcgataagatcaatgcctagaaaacaatgtggttttgatgttctgtattccaagcaatgagatgcaaataatattaatctatgcttctcaaaacaattgttaacatatatgaagacgaaggagaatgttagcagataaagaaaaagatataactacgttgtgaggaccgatgatggtgccagtccaagaacgcatatagatgtcatctccatcatccattccatagctcacagttccatccccaatacctttctccccacgttcaagctcctccaacaaccgaaaattcctcggaactatattgcaataacaagcgtaacaaaaacaattcatatcagtaaatgaaaacaagcaatcactttttttaatcaaagcagagaacagaacatatcatattaatcattatccacaaagactaaaataagataacactcaacaaagttaacaatgagctatagagaagatgaaaacattcctagctaaggtcttagaaacaataagaaactcaggaatagcattttaaacccatctcaggaattgagacatcagcaaatcattctcagcgatttgttaaaattgattgattcagatcaagctatatgcgaacaatttagacaaagctacaattttttatactagatcgatagaacctatgagaaatctcaacacctattgatcaaaacgaataaaaccaaaagaagaattcaccaaaaccctagagaaaaaaaaacaaacgagggattattccaaaaccctagaatcaaaatcaaaaaacgagaacaaacccgaaagaatcgaaattttataccaacaacgctagatcctcctgagccaagagtcataattgatgaagttgtggtttcgatatccgattgattttgagatctgacgagcagagaagagagacgagaagaagtaaagggagaatcgaatagagagaatctggtgaatagacagaaagctaaaatgggagggtcaaatttggcaaatcgggtacttttggggagactggaaaaagttatttttttcaaatttaccgcccaaatttgtttttctatcatataattccttaaattatgataactacagaaacaccccttttattttcgagttttgacaacatctatttgttattattttaactagcaatgcaaaatttctatatacatgaaaattattgaaatattaaaactcgcttgatttgcaactaaattatcgtaaaatgtaaatttctttttcaaaaatcatgttaaaactttaggataaaatgttgtcacgtatatatgtcgtcgcatgtgccttaatatatatgaaaaacagaaattaattatttattagatttttgaaaatttagtacttataaatagaaaaatgtcataaaatacattaaaacaaattttagttgctactttttcactaaatttaggtttaaaaatattttcttaaataatttaatatttgaagtttgtaaaagttcttaaattttattgaatttgatggtgaattgttttgaataaataacgttttaattgatgaagatacaacttttaaccttaattattgaaaatttcatcggattgaatgccgatgaaaccaaagcaataccattattagcatactaccaatttgattcttaagaccctaattcgagacgtgtcgatttttttacttgtgtttaaatttatattttgtaatttttaaaaataaactttctattttttttggcgtttttcatttacattgaaaaactatgtttctctggagtatacaaataaataaatataaacgcaaacgccataactagcgtttgaaacaatcgaattcaactccgatgaaaatccatcctcgttcatgtcattggcttccatagtactaaaacatgaaaatggacaacttaacaaaatgaaccaagagggacggccacaaacagaaatgatctgtctgtcaatttaacatattaaaatagagattataatttaaacaatatgatttatatagaggactttacaaagaaaattaaattcatcatctcaaactcaaaagtccaaattgaataataacttaaaacaaattctctaaaagaagatcaagtcggtgcatttgcacttggggcaacgttgacgttcttgtaagaccataacatacatcatacaacttcgacatcccatcaccaccatctccggcgcctcttcttcatcaacccacgacgatgcaacctcctccttcacttcctccgtcctcgtcaggcacgagttttgtgatgatgatgtgtcgctcgatggtgatcttccttcaaacctcccattagcaaccaccgacgccacggtcctcgccgagggctcaacgctacctcttttaccattcttgtttctcatttcgatacttcggtttcgtcgagagggtttttgtattcttgtatttgtttttctctgtgtttttctaggggatgggttgatggtaatgacttctaaagaaaatgtatgtatgtaatatataaggaagaagaggagctaaaatatgactaggaattaatatttgttgaataaagtaattatgttgtggagagagatatgactttgtttatttcgtaataatttttttaattggaggtgggaaagttagtaaaagtatagtagagacaaatatatgaaacaaaagacaattcagtaaacaatgcattagtgcatttaaaccagtgcagcaaactatttattgctaaatgtaaaggggaagacttaaatcttacaatttaaaagaagaatttatgattttttattggtaatctaaattttaagtaatatgtcatccatttgatttgttaatgtaacgttaaattatatttcaagaaaataacagttttacaaatactacgatttgtgtttgaaagaatttaaacttagggtttaaagaataaagaagaaactgaatttgtcatccatttcacaatagttttaatcttatgacttcacttttttgtttcataaatttgtcgttttgtatatttaatgtatattttaaagaaacttatagtttatttatatggcgtattttatcaattagactttgtttgtttgattcatttattagttaatactactcaatgttttatctattaaattgtttgtcacagtaagactattattcaactgatttcttgaatgaaaatatgtctaaaataactttagtgacaccaatacatatttttctcataaatgtttttactattctctctgtttcattataaattttgttttataattttacacgtattaaaacctattaattttttaattgtataatttattaaattttcaatgttaaatcaataaactacaataatacaaatatagaactacatggtgtgatttatagtcattttagaaatagtgtctagaaagtatggttcattcaagaaaatggtctaataatagtttatagtatgaaaaaacaattttgaatatagttaaagatagaaataatggctagcactaactaaaaatgaatcaaataaaaagaattcatctacaatttacttttcgttattaaaaattaaataataatagtacgtttatacagtgaagcatccgtttcaaagtttccaacgacggtttcatgcgccagctaaaaacttctttttgattgataatcaaatggacattctgaaggtacccacaaaactcaactactttgagttactttccaaattttgaatataaatcaatgtttttggtggtgacaaattttgacaatataaaagaatgaaagatgtagatagatgtatgtaagtagtgcttgctggtagttaaattggatattcaaaggtgaaaaccattaagatgtttctaactaccagattcactagtcattgtaaaaattatcacaaaatgtttagcaataatttagaagaataaaaggatatccattaatgtttttaaaaaaaacatttcctttgattaatctaatgatggtagttaaattacttgactttaatttcctgtctttttattttaaaacaggaaattatttggacgaaaggttatggtacaataaactttattactgtacttttaatgtttcacatatttgcataactttcatttttctaaattgttacgatcaagatagccattgattttcatttgaacaatggaaagtaactggatatgagtatgatttattgattagtactctcaaaatgtttattatgatcaattaaacagacgtttgtaacttgcgttttaaaccgtcatttgaagtagaattttcataattatataaaatctcctatatatattatttgagaagctagagggataacgtttgaattttagaactttgaatagcaaacgaaagagtaacaaattaaaaaaaatgaaacaaacagttactagaatttaatacaagaggccaataactaaaatacagacctcacgaggacataatatagctgttaataacttaggaatctctcgtgtattaaatgtttcacaattaagaggacaatcaaatttaaaatgatttatagactaaaaaatttaacgacagttatgcaacagggtttcaaaactttaatggcaattatacaacagcctaaactgggatgatttgtgaaagtggcctctttaatttttgaatttgcttcacaagattataagaatataaaaaagctaggaatatgttgttttagcagaaaataaaataattatataacaaaatgtcaaatactaccattgaccttccataaaatctaatacctcagcatcagttatatcccatgtgaagctatttaatggaatttaatggtagcttttagttgatactaccatttgtttacttttcttttgttatcttaatcacattcattacgaatctgaagagtgaaggagataacttctggaatctgtttctctaatatttttcaagtaatcgctactaatcgagttaagttatatactaagaagatcgaatttgattccaagtgagatgaagctacgcttgagcataaaaaccaattaagttgtatatcttgtttaatgcaagccctttctccaaaacttattcatttcaagattggttggtttttgtagtcagaaccgtaaaccgtttctatatgcatgagcttgtatcaatcatgtgaaaggtttcttcttccctttgcacaaatgaataaaagcatcaaaaacctatagattgctttcattgattatggaagaggatcgatgtctataattgtcttgttctggtttgaagttttcttgtagcactgtccaaacactctctttggactttttattcctcattatacggaaaattaaatctaaataaattacataacgataagtgacataccgcattatccgtttttcaattaaagctctcgcttgttcaagatcatctcttcttcatcaacttgattcttcattcaataatttgttttagacttttggaacaataatgtttctttgtttttgctatgacatctacattaacaaatagacatgcaacgtcaactattgaactataataaaatcaatatacatctttagaaatcacaatattaataaaaatttgcagcttgtatcttggtgggctagacttttggatgatttttcagatgatttatatatgcaatgtattcgtatagtttcatggttcaattagtcttttttctcgggtcaatattcgcatagattaataatgtttacgtgggttcatcaattactatcaacttgtatgcatgctaaattacaccattgaaattaaaaatgataaatacaccattttaacaatttaaataatttttaattgtacaattttgaagtctgaatctgaattgtaagtactaaattaaacttaaagagtcatataaacatctgacagtttggccgagtggtctaaggcgccagatttaggctctggtccgaaagggcgtgggttcaaatcccacagctgtcaattccttttttttcttttgttccttcgttttatttacttcgccggagagattcgaagctaccaaagaagaagaatcaatggcgagaacgagaattataacgaaccgatttgaatctcgctttttgattcgtttccttgaatctccgactctattcgcctcttgtttcacgagttccagatctcttcaaaccctagcctacgaagaagtccgaacctccggtgatcgggagtctgaatctacagctctcatccttcatggcctcctcggttccggtcgcaactggagatcgttttctcgctcccttgcatcatctctctccgtctcctctgcttctggtacgcttctctctgtgattagtatcttgagcttttcatttgatatatcgattgaaatttcttgtgtgtgtacattcagattggaagatgatattggttgatctgaggaaccatgggagatctgcggaagtggaagggcttaatccgcctcatgatcttgtgaattcagctaaggatttagctgatttggttaaagcaagtggctggaattggcctgatgtggtcattggtcactctttgggaggtaaagtggcgttgcagttcatggagagttgtgctcgtggtgattttggtgaatctgcttctcctcctaaacaggtactggaccaaagttacttcaccttgtgaattcttatcatgtatgcaagtttaagagctcattgttgttgtgagatgcaatatttgtgatcttttaatctgataatgatgatgatgaccatagcaaaggttgtttggtgcagaacagctatgggtactagactctgtccctggggaagtcaaggcagaaaaaagtgatggtgaagtagagaaagttctgaagactttgcagagtttaccttcatcaatcccttctcgcaagtaaagtctcattctttatgtggttcttggtgtttgtctaattatctacactctggactctttgttttagcttaggaattccaaattgattcccgcatatgaaatctcgagtgaacgttagtatagttggtgtataagtataccatctctctgattgagctgttactgcggattctaggacatttttaagatttagataagtgggaataaagagcatgcttatatgatcgcttctagctgattatgttacatatataaatgaggctcatttcagcttgcagagtatagaatccaaccttggtgtcactcaaacattgttttctgattctaggtggcttgttgatcgtatggtcgaacttgggttttcaagatcattatccgagtggattggcagcaatctcaagagatctggagactcagagacatggacctttaaccttgacggagctgtccaaatgttcaactcttacaggtttatttcccttcctaagaaccaatgactatgattatattatgaaccttcctcgagattttgactttttactttcctactgcagagagacttcttactggtctttgctagagaacccgccaaaagagacagagataaattttgtgattgcagaaaagagtgaccgatgggacaacgatacaaccaagcggcttgaaacaatagctaaccagagacagaatgtagccgaagggaaggttgcgactcatcttcttcgtaactctggccattgggtacacacagacaatccaaagggactcctagagattgtgagtcccaacttcttctccccacacgagtagacgatgcgctacgaaaatggcattagtctttgcttacaatttcactcctgttcagtatctatatgcagaaatagcaaatccaatcgcaactattttgacgatgcgcggtttttcccgtttgtgtttcctaattttgcattagcatatcctttcaacaatgtacaaacgtttaggaggatctaataacatcaataaacttatcacattcataactttatacacaagatttgaaagacaatgactgctacgttagtacgaggcacaacaccagtaagaagactagagacgattaaaaatccaagatgctcaaaaactagcacttttgctcacttttatgggccgtaatatgttgggtctgtatatatattgggtctcaattaaattatccataaaatcactactttaaccctaacaaaaattcagactattaaagcaaattctgatccgtctctttcgctagctaaaggtaaaaggcggaacaacaaaagaaaccctagcttccctttgtacctctctctgttccaaaccatggtaagtttgtctaaagcttataattaattttcatggatttagtgattaagaagatatataatctgtaaatccatttctggtattgtgtggtggtctgaagtgagaaaatgtttaataagcaatccttattcttcgaatttcgatctgagatcatatgaattttctgagacattggattttttttgtgtggctctagcgttgagttatcaaattgagaagtttttattagatattgcaaatgcataatgctagtttttgtttggttttgtagtcgaagagaaagaccaaagagccaaaggttgagaatgtgactcttggaccagctgttcgtgaaggagagcaagtctttggagttgttcacgtctttgcttcattcaacgacactttcattgtgagtggcttctttatttttcaagcaaagttagatttttatgtacatttctgaacttcttatatctgcaattgcagcacgtgactgatttgtctggacgggaaacacttgttcgcatcactggtaatcatctctttcaactctcactctctaatcctttggtgatgatccctttgttaacttgtatgcggtagtctctgttgagtgtgaaatgaagttcttgactgcctaaaggttctgcttagtatctgctcttttaagttttttcgaggaatccgttgatatctttatagaaattgctttgttcttgacggcatcaatgttcctgcttatagaactaagttagttaccattgttattagtattatggtcttctctatagggtgtgagctgaagtgtctttagtctttgttcgtttaacttttgaggaattccttttgtttatctgtttggaaattgcattgttcttaaataacaatgggttgctaaaattgctgtttcgatttcctacttctgtaggtggaatgaaggtgaaagccgacagagatgagtcctcaccttatgctgctatgcttgcggcacaagatgttgctcagcgatgcaaggtaaaggcaaagaaattgcattaccaagcagacaacttgataatcttttatgtttctatatttaatcgatttggtgaatatatttatgcaacacaggaacttggaatcactgccatacatgtgaaactccgtgccactggtggtaacaagaccaagacccctggacctggtgctcagtctgctctaagagcccttgcccgttctggcatgaaaattggtcgcattggtaaaacagcagcaatcttcaactgtaattgtttaattgcatctttgattgaataaatctctgacattgttcttgttttcctcagaggatgtgactccaatcccaaccgacagtacccgcagaaagggtggaagaagaggaaggaggctctgagttatttggcctctcgttggatctccttatgtagctttctcaatgtttcattttgttttttcttagtttgaaaagagttttggaattactatgctttgttatagtctcaactctgaacagctttggatctttttctgtatgaccataagatattcaaaaattggtagtcattttatctcacaaaaaaaccttgaatttgtgctgtatgattttgtaaagtcttaggtgccaaatctttgattggagttgataaaatatttttatttggttgtaattttgtaatatcccgggatatttcacaaattgaacatagactacagaattttagaaaacaaactttctctctcttatctcacctttatcttttagagagaaaaagttcgatttccggttgaccggaatgtatctttgttttttttgttttgtaacatatttcgttttccgatttagatcggatctccttttccgttttgtcggaccttcttccggtttatccggatctaataatatccatcttagacttagctaagtttggatctgttttttggttagctcttgtcaatcgcctcatcatcagcaagaaggtgaaatttttgacaaataaatcttagaatcatgtagtgtctttggaccttgggaatgatagaaacgatttgttatagctactctatgtatcagaccctgaccaagatccaacaatctcataggttttgtgcatatgaaaccttcgactaacgagaagtggtcttttaatgagagagatatctaaaatgttatcttaaaagcccactcaaatctcaaggcataaggtagaaatgcaaatttggaaagtgggctgggccttttgtggtaaaggcctgtaacctagcccaatattagcaaaaccctagacgcgtacattgacatatataaacccgcctcctccttgtttagggtttctacgtgagagaagacgaaacacaaaagatgcagatcttcgtgaaaaccttgaccggcaagaccatcactctcgaggtcgagagcagcgacaccatcgacaatgtcaaggccaagatccaagacaaagaaggtatcattcttcctcactcaatctggattcttctctttagctttttgaaattcagatctcttatcatttacttgtttctcctttaaggaatccctccggatcagcagagattgatcttcgccggaaagcagctcgaagatggccgtactttggctgactacaacatccagaaaggtacgaaatcatccgaatccttctgttgatcatttcgatgatctgattgtataaactctaatggattgttatcatttgtaaacagaatctacacttcatcttgtgttgaggcttagaggaggtattattgagccttccttgatgatgcttgctcgtaagtacaatcaggataagatgatttgccgcaagtaagtttcaatttctccctaagattgtagttttgttgattaatagttcaaagtaccaaatgtttattagtgtgttagggttttagttgttttaatgggaattaacttagcttctcaagccttatacaatgcgtgttgaggttataaatgttcccaatatcaaacatttccattctctaaactttgtcagctggtcaaatttctcatctttccagatgattttcttgaatggtacatttttgcaaatggttttgaaaatgtgttgaagcttgtatttttgattgctgaaacatcttgtttgttggatagtttgtcatctatggtccgatctgatgtctcaatgagattattctaatgtaaatttcgcatcttttggtaggtgctatgctcgtcttcacccaagagctgtcaactgcaggaagaagaagtgtggtcacagcaaccaggtttgtttttgttacttgtttctttttggtgtttatcagctgaaatgatatctgaacaaactttttttatttgcagttgaggcctaagaagaagatcaagtagagagactcttatcaagaatcccatctcttgcttgcttttttttgttgtcttccctttgatagggtttgtttttcttgtttcagtgactttctatgttaaaagataatgtcagtaaaaggatttggttttctattattctgaatcgattacggaagattcttgcttaattccaatctatacaagtatcgtgaaataatgaccgtttatgtgattaggagacgtgtttcattaataaaatataagatcaatacattgttagtagtgataaactatgtacaaattgtattgattgtaaaagaaacacaataggttccttttttctacaatatattgtgacagactctctgttttaacgaatgaattaaatttgtcaacgaaaaaattaaagaatgatgtgatcactttgcaccttggttcatcttcagaggcttctgcatgttccatgcattgaggctctctacggtcacaggttgtgagccgttgttaaagacaaacaaatgagctttttctcctactgcttttgtcggatacactctagatgttatcactgtctttccttttgctccaaagctctccacaaccgagtgatcaatctgcaaattcactcaattatgttacctatttgcttctctatacaagagtaatattcagtaaaatgatttaagtttgtgacgtaccaaactccttagagagatctttccgtcaaggagaccgacatccacaaaaccagcaaacgatggtttgtacatcctctccttggcgtcagtcccggtgtcttttttgagactcgaactgttgatttattgtgattaatgttagacactctcaaattgtaattaacaaaaatcatatataaataattgaattagtgagttaggaaaacatacggcttggcgtcagagcacatgagaaccttaggcttgttggatgcggcatctttgaagactctaaagaaaacaggagtgtattcttctaagtcagatgtagccaacgtgatcaaaccaaaaggaccaactccaccattcacattcgaacctttcaagttacataactctagtggtttagttgcgaagctttcgtcaaacttttcggccttctctagatttccaacgttgaatgtcacatccacatccacctgagcaggagtgattccttggacctcaaagcgttggcccatctccattttctggttggtcatttggacattctttcctctcaatgactcaatctcttcaataggccaaaacacgagttgcttaccgctagagtcaagcaagattgttcttgggataagctgaattccggcccaacccttcacggtatcatcttgaacggtgtcggattcattggcccacccccaaagaattcttctgttcgtcttgtcatcaaagaatgtctttgacgcatagtagttaccataatcaaatctcaaaccatcccaaccgtcaggagtgtaaccgtctggcctgtaacgatccttcttggtgtcatacgttccaagagtgtagtactcgtatctggtcaagtccaaactaaccttcaacacatgcttggcgtttggaccgtcgtagctgaagtccaaaccgtttttcttgtcggttacggataccgggaagaaatcgggacattcccacataccggttttctttcttgagtggataggacgtttgcttttgacccattttttgaagtcacggctcttgtacatataagcaattcctctgttctttctctttgagccaacaagcattctccaatacccatcttttttgttgaaccaagccgtggtcgggtcacggaaagcggatccgttctcgccattatcgggttttacgatggggttatcgtctggctttatccatgtcttgaggtatgggtcggaaagatcttgtggaatggcgtagttttgaatctgagtctggttctcggtgataccggtgtagaggataaccggtccttttcccggtacgtgggtagctgaaccggaccatgtaccgttgatgtcgaaccatttggatgggtaaatggctggttcaagggcttcccaattgatcaagtccttagaaaccgagtgagcccacacaatgttaccccaaaccgcacctttgggattgtattggtagaagagatggtaaactcccttgtagagcattggagctgttgcaatttttgaatattgttacatgcaatcatatatataatgtttttgtcattaacttataaaaagggaaaaatatttgtaatggacttaccattcggatctgttggagtcaagaatgccataacgaaggcaaaacaacaaacccaaggaatttatgttagaacaatgtattttggttgatataaacaaccctagtaatagaagttgaataaatatgaacttgaataagatgtcacatatgttgtaccgttgatccaatggcggggaggttgaaagtgataagcggttctgtgaagaggacttactgactccaatgatgtcgattttgattgcaatttcttgaaaactttgtgaaatgcatcgacgccattattgctaatattgattaatacaatcaatagtaatacataaccaaactttggagcactcattggtgcaagagaactctatgatcacaacaatttattttgattttatttttgatgtgtaaatagtttttgagaaagaactctctgatgaaaaagatatagttttcgtaaaagatatagaagaaaagaggagggaaaagtagagtactttgaagataatatggatccgtaaaataatcctaatctcacgctaaaataagaagtacacaatgtggtttgcaatcaatttacttttgttgtctttttaatccatttttaacaattcttttattggttttgtcgaagaaaagaaaaggtgtaaagtcaaatagtttggtcaattgttttaaggtaagtaatagtaatatcgaggaaaatagtagataaaactaattttggttttagatcagagttttgttttgtctattttttttccttcgtttgttgtttcacatttgtctggacttaggggtacgtcaattggagagcaggagaagagagttagtattacactaaactaattaagtccacccatgatctatctatcaaaacactaagcagaaccaatcgaaatacataacagcacaagaaaggtcgtacgtccttaattatatattgtagttttccattaggtactctacatactatataacccacgtcgccaggatggtgatggattcttctaaggaagattgactgatgctaatctatctcttgtcaaccaaaattctgccgcctgaatccgattctttgacaatagagtcgctgctaaagagctatctatagtgtaaaatccaaaccatctatatgaataagagatattacttgacagtactcttcaaggctatctatagaatcatatcgttcaaactgttgtttcttaaagagcatctcgtgtgttttatctttattaatctacattccatatatgttgcaagctgagtgagtatgcatgagtaaaacaaatagttccacttaaaccttttccaaaaaaccaaaaaaaaatccaattatttgaccttaaaatatagggagaggtttatatagtattgcctaaacgtgagcaacgtaaaattaaagacgctaaattcgtaaatgcaaaatcatttctatttggttgataaaccggaaaaattacacttaaccgagtaaaaggtacgtcactgtatcttccccatatttacccacctgacaatatatgatacaagtaaaatcttaaaatcccaaaaaagtgaaaacaatctctcttctttctcaaggataatgagtgagccaaatcgggtacccaaatccatgacccgacccgtcggaggaaccgagtacagctggtgcagagcgattgacggcggcacaggtatcgccgtcatagctctcttactttcccgaacaccaaaactccaaaatctccaaaataccctcgacaaactccagatttaccaccccactctccgttccaacatccgtttcgacgcatccgctaactccttctccttcgtcgttacgtccgccgccgattctcacgtcgaaatccatcccttcgattccgtatctacggctcagatcatccgagacagcgacgatccatgcgctgatccacacagaatcatcctagaacacgagatgaacaaaaacacgtggatcaatccacaccgttggatcaaatccgagtcacgcgtgtttatcgtcagtctctacgatctaaccgacgacggagagcaacggatactcacatttcggctgaacacggcggcggtcgatcgtactgcggcggttacgcttctgagagagtttatgaaagagacggcggctgatggtttcggaaacggtcccgtggtggcggcgacggagacggcggtgggattaggtaaggcgatagaggagctgattccgagtgggaaaggggataaaccgttctgggcgcgtggcatcgacgtgcttggttactcgttaaacgcgtttcggttttcgaatttgaatttcgtggacgcagagaattcgaaccggagatcgcaattggtgaggctcaaattggatagagatcagactctcaaacttgtggctgtaagttactctccacaccattcgattaattaattatgtgctaattactattattacgtgttaaccatagagtattagtatttgttaccatttttgcgtgtatgaatataaaataaatatctcacgaggattacataaaaaataaaataatagttacttttattttattgttatgtacataattttgagtaatccatagtctacaaatactcattgttgcaattacatatgcatacattgaagggctctacatttagtttgtaactcaaaaaggactaagaggatgatggtttgtgctaaaaaagctttagattgtttctgaaaagttggagcaattcaatcactatttgtagggatgcaaggcaagagggttaaagttatgggcggcattagcgtcctcggcgttaatcgctgcgtattcctcgaagaatctaccgccataccaaggagagaaatacgccgtggtgactctttcggattgtcgttccattcttgaacctcctcttacttcaaatgactttggtaagctcgaaaatttgggattactatagcctttgatgatatatatgaggaatagatgttcatagattatcttctcatgattgcaacaaattttttatgagctagtgatgatacggttcaagactgcatttttgtagttcttactagacattttcaaactcgttaaactaacaatggacaaatgcaatttgatttggatgttgtagtattgatcttatgatttgaacttgatatatttcttattttgtttccaggtttctaccatgcagggatccttcatacacacgatttaaccggagaagaaaagctctgggacctagccaaaagatgctacgactcgttcacatcctccaagaactcgaacaagcagttcactgatatgtcagatctcaatttcttaatgtgcaaggccatagagaatcctaatctcacgccttcctcttctctgagaaccgctttcatctccatatttgaagatcctgttatcgacgagtctccagagcctgaattggcttctcttggggtgcaagattacattggatgcgcgtctatccacggggttggaccgtcggttgcggttttcgatgcgcttagggatggaaaattggactgtgcgtttgtgtatccttcgccattgcattcaagagagcagatggatgggctgattcaacatatgaaaactattcttttggaaggatctgcttcttccttttgatttgtgttttgacaatcaaaactctctcttttgtccagaggcatagatggtctctgtaaaaaaattagtcgaaataaattaacttcaaattctcctcatagattattgcaaacatctatcatgaatagaataatataatattctttaagaaaacaattcaaatcaaagaaatatgttagatgaatattgtcatacacaattctattttataataaatttaattcaaccatccaaaatgtttgaaaaaaaagtgagcatttattgtcaaaaataggattttagattggaaacataaggtggaagtgaaactgataaaaattgaggaaaaaaatatagaaagtgaaaattgaaatatttcatttcagtggaatcagcaatatttgcggacaataatttaagaattgagctaaagaaagcttatggaatcagcaaactccaaactatttttagagcacaagacttagccacaaaatccaaacttacttgcctcagtttcaagctatcttcattttaatttgtgttcaaatcatctttttgtaagaaaacaaaaatcatagtgtcaaaaatggcaacggatacaacaacttttcctgaaggcgatgcagaagctgaacttaatcctggccaaaacaagaatttcgaagtagatcctgtttcatcagagattgcttctgaaaaggtaattagttgcttatagaatttaattagattttatatatgacaagatttatgatatctcattattgaatggatgtgttgattttgcatgagtttcaaataaaccaccaaatattaaaagcttttatcacttttccatgtacaagatttatatatttacttttgggtttgaaatgtgaaggtacaaaaaatcgtagaaaagagggaaaacgcaaaggcaaagagagatggggcacgaacgcttaaaaacacgatcatagtatcagcagtgattgtggccgtcgcaggagccgcttttgctataaccaagaaattgaaagagaataaatgatcttatacaagttaatttctcaattttcctttgtaacttttcttacataagaaattaagaaaaaaataactattgacattatataataattattaaaatctctatatttttttatatgtaatttttaaaattaaataatgcaattgaataccattttttgtttttttcaaactatggtttgaataatgcgtttaatgaatgtgttaattgtaccaacatcaaaaataaacgaattctggttttgtgaaaaaaactcaacgatccaaggaacacctaaaaggcccaatgggtacaatacatacaggcccataatcaaacgattggtcccattgtttctcttcatatttgttggcgccatgtgaagcttttcatttcccgcccaaattctctccataaactctctcaaagcctagaaagtcctcagaagttagggctaatcatttgcaactccgacgaacgattcatcttctccaacaaggtaaatcttcttaatcaattctcttcccttcgattgaatttctcaaaatcgatttcctggttttcaaaatttttaatccctttatctttgctattgaatacgaaactgatttaccaattcgcttttgaatctttgaacagtagatagcaatggatacttcaagtccttcagcttttgtgaacggagctttgttgaggagattcattggccaaaaagtcagaactgtgattcaagtgactggttcagagattggatctgtggttggcaaatctactgatgatcttcagatcgttgttagaggatcgtctcctccttctcctcttactacttaccttgaggttattggaattgcagagagtgataacgctattcgagctgaaacttggaccaattttggcaacacttttggtaatttagtgattccattactgtgtcgagtttatcagatttgctattgagttgtgttttgatgttttggttgttatttttggttgcagatacacagaactacaacgagctatgtaagctagcaaatggggagttcaagcacttgttcatctaatgttgtgatgatgattatgatcatggaagcgattccattaaaacattttgtagagatgcttatgctttatatgtatttgatgtctcaccactttctggttctatgattttatttacttagtatatgtaacaacttcttaatctatcacaactaagcttaaattgctgttttgttaattgaggtaccaaaacacaaaacaaaacactattttcttcttggcagctaagattttgctctggatttagaattgtattgttgctttatctataggattttgtgaaagcaaacttttttcttataaatttcttgccagtgtaataaagaatttaacatgaattagctcaaagacatattttaataaccttggttgagaaaaaaggtttctaccactaaggtattggtggtgttgctggttaggcaatgtcttacggaaactgacaagtaattttgagccgagaggagagggaattaaatacaagtctcagtcctgcttcaaggcttttgtgatgattgacttagcagccaaaattccgatgtaagccaacgttgtgactgtaatacctgcaacgaggactgcattgtcgtatgctgagtgctggactgtgtacacatgcacccttaaagtgtcccagttgctttcggtccacactggatcaaccatccccatagaatctgatgagttctgtggtagaattgtccaagctccatcgttatacttcaatcgagttgaataagctggaacatacctgccaaaaccagaacttaatgtgttatgctcagacagcaaattggttaggtcacatacaacatatcaggtcaggggaagaagaaaatgatgatagcttcaattcaaaggtcaacaaactaaagatagactttctcccaagtctaaaaacactccacttctgaagcctatcctaattaataattcctataaaatgcctaccagacttaagattttggttcattttgagacataagagagaacttgagcatgcaaaccaaattgcaatttccaagcacagagtttacctggttgtggagacaacacatgttccttccttgttgctctctgctttgatgcacacttcgtcagttttgctacagactccttttgaacaaactgaggttgtatttcccttttggacagatgttttatctgccagaaagttccataggaatctagaaacatcaccgacgtaaccaaggtaaggtttggaggaaggttctccgaggatgacgccagcatagttgcctggacaagtgtttgtcggtgaaatatagtcttttaccaagttgcaagataagcccggttcacaagctaaaagacaggttagaagctcttcaacgaaagaagcattgacatggatggatcccagagctgaattgcttgtatctttgttgtcacttgctaggatgtaaagtgttcgggccacaacagaagcagcagctactacagacgaggagttgatatttgctgcaatacaacaccagaaaggaatcaaaagtgcaaaatggggtttggagcgaaaagaagagaaagacaggctgtgactcttcttacacaagtcatcgaggtgactatggtagaacttattcacaaagttggtatcaaagtcttcaagtacaacagctgaagtctgagggttctgcaacaatgaatatgatgttatacctttttcactctaggcaatctggttcagaatcacataatagtaagcaagtatacttctcctgtcatattcatgatcaactgaaggtgaagtatatgcaaagagtatagtgcgaatacacatttgaattgtcttcccatctatttacttggaatatatattgtacctttctcatgaaagccatcaaggaggatgggggtattccagggtttgcagtatctgctgaaagaattttgatgttttttgatgcaagtgaatcctgagctatctttaaagcatccagtgtcatgtttgtaactgaagaaacctaaagcagaacaccaaaagtggaggttaagtcgcctatgacagttttcacattatcgaacgaattcgaattatgcaagagtttcaggatatcaggaatttctcacccttgttttatgagcaaagaaggtgtttatccctccacttaaaccttttccaacagatcctatttcaagcacctgttagataatagaagaagcaatctgaattcgatctttagatttagaaaattgtgaacattcaatttcacaaggaacacttaaacttgctttctgcgctactaagaaacaaataagttgcagcaacgatgaaacacaggcaactttttccacagggatttcatgcataaggctagctgtctctatcaactttgtcagaccaaaacaataatgattaccgtttcaatcgaagtattgctaaggcctgcgacagcatctgaatgcagatctaattcgtgtaagaacctcctgctgccaaggtaaccccatgtctctccggtcagaaccaaaaacacaagctgcattcatttacgatttacatgtattaaagcttgcaaacaacaaaaagcgtgaaataacactaaatcacatggtacactggcacctgttttttgagattactaataccatcaactcgagaaagagcatcaactgctcctagaagagctaccagaccctgaaagaaggagaacgtgttgagcaataaatcgggaaaagaagaataagaagagtaaataaatgtattctagatcaacccaaaagcagaaaatagcaagttctcacagatattggtgaatctgcaccaaaacttttgtcacggaaaaatgatgcagtatccatggaggccacagtcagcacaactggtttgcgattgttggaagacgaaacactgattggtggaagcgaggaccaaacactgtccttcataacaaagttgttagaaaacgaaacgtatcctttaaaaggttttcatatgtcattagatcagacagtaataaagacctaaatctttacctatatccgcccaatgggaggcaagttccctcctgcaaacaagcctccgaattgtgtgttccagctttggtagtctaatacaaaaaatagagaattgggtgtcataatctaagtcaaagtgaagatccataaagctggttaacgttccagtgagcaagattgctaaagccatatacctccataaccatattgaattcagcaacatcactggtatatgttccatgcttcatctttttcttggaaaggatctgcgcaaatataataggatgtaaatatgtagtcgataacctgaaaaaagtgaagctatccacataaactatacactttagattgctaccaacacaacagaaacataaagctagcttcttgacagaacctcatctggtaaggacaacaacatactatagaatgacatagttgaccagcagtttaaaggcaactaccacaagacaaatggaaaggctatggttgagtccaattacaggctatggaaagcaacatgcatttgaaatctacagatgcagctgggagttgccttcagctggatgagacaaacattccaggaccaaatttgtattcttatttaaaatgggtaatcaatgcttagaaaaatttctgcagactaattcagtttaaactaggagtattcatttcatatgaccttggagatacatatctcatgcatcattttacagccatattttcatcaagcaatactgctcttaagagtgaccaacagtcataatgcctctctaagccttgagttcatttcctcatatttctaaaaatgtcatcaatttcgcttttctgacaacacaaatagacacatttaaaatttgcaaaagaatgcaagtttgaaggattacctcatgcacagctgatatgccactttctgacaataagtacacaggaaaattataatttctccacatgatgcttgatgcctgcaaataatcattttttagcaatggtcaatggctagagacttatcgcctgcaactactcataagaatcaaaatcattttttctccgtagataacaataagaggaactatcttttaattaaggtagataaatatgcaacagatttttgaacttctttataagtgatcatctaggcagatacatgcattcctccagtaaaattataccataagaaaaggatttatggtatttgtgtgttagcaggtagttaagtttagttccagaagaaaacagcatataactcggaaatgcttgactatggatttggtgataactgattgaaacaatttccaacccactataaaagagttgacaggaagaagtaatttcaaagatccagacagagtttacgctaccgtacagctgaattccatttgtactcaacgttttcatagggtgaaaactgggcttgaggaaaccttttatcaggagaaaaccctacaataaagaagaaagaaacactaacgccatcaacatagataagaagtatcaagtactatttttaagggaattaagaactcaagacaatttaaggaattagccattcaagttgacagaatcataaatatgtggatggacatagtaccttttaacttttgttggaaattagatcctgattcaactagaacaccaccaattttgctagcaaagctcaaatcagttgacaccctggaaaaggcacaaagaggagtggtcctgttatttctactgaatagagtgtctaagcgatgtacaagtctaatgaacaatgccagaagtaagccagactgcagggttctacagtaaagtgtttggaggtatacctactttccgttagtcgaatgaaaataaagcggaaaaagccaatgaattactggttccactaaacacctaatccatgcaccaacaaccaagtgactacatttctagcagatttcaaaaatggtgataagagggtatactcattccaatctgttgtttcactgtcatggaagattactaaaagtgtttgccttaaatactcaagtactaatgaaaacaaactcttagatatacgttattcttaaggatgtaattgcctttccaaaaaggctgatttggcacccaaaagctaaatcttgtttgacgttaaataaaacaccaaaatgagaactacaagcgagtgggaaagcactactccacaaattaagagatcactaacaaaatcgaatagaggtcatgaaagttttgtaaatgaaaaaggagacatgcctggtaaagaaatcttccatttcatcagctgtaaccaaaatagtgtgtggctgaaccaaatctttaacgtcctttaattttatgattggagccaccactttatttattccaggatctgagtatttttataaacataaaacttagaggacctcatcaacagataaaaatcatgtagctgagaggcccaaaagaagcttacttgaacatccaatctctccagacagattgagaagacgtacacaaggaaacccatcaacagcaacatacattagcttctgaaggtcaggtacagattcaatagatgttatctcatctacacaaaacgaaacctcaatttcagattacaatgttctatcaactaatacatttcatcaccaattttatccggggaaaggaaactcaccagcgagagagagatgaagaggaaggattgaaagtagaacaagtgtaaaagctatagaaagaagacgaataagtcccattgccatagcatccgtcagagagttgcgattattagcggaagctacttgcaaatcatcgctgcagatacgatcaagaataatgtgaccgattttataaaagatcaaaaaatgttagaatcggaagaagcagtacctgggaaacgaaaaaaggggaaattggaagagagagcgagagagaggtccgattcgccggagaaatggaaacctagctcggaattacgcggtgggagtctgagtcaaagactgagatttttcgtgttgattcttatgtctttcaaaattcccaagatatagaaaaattgaggtattcacattttgtgcggattttattatattaaaagtaattaagtgaacctatctatatatatatttttgcagccattttgtaaaataaatcctagatttggaacttatttacaatggctgccactggcttttatttatttattttcttttagcaataaattgattaacaaacaaaaaatattccaaatatattccaatcccatatatcacgcagatttctccaaaatttgaactagatttcggaaattatttaaaacaaaaaatatttgacaaaccaaaatacaattgcaatcccttaaaatgagcaaaacgcacataaatacatttcttatcagttcactaaatcttatttctccaaaatttgaattagatttcgacaactatttaaaacaaaaatttgtttgacaaactaaaatataattgcaatcccgtaatttttttttttaaattagcggtgtactacaaatttttttaacgggacgggtttggcagaacgggtttggaaggatgttacttaataacaattgtaaactataaaatataaatattttatagataaatataatttacagacttttatatatactaattttaaaaaataattgtctccgcggtgtaccgcgggttataatctagttgtttatacaaaaagaaaaaatattttcattccacattttctttttttttttgtaagaaatttgtattacattttatggcttcatttttacaaaatcgtagactaattatgattgattagggtattatttgctagattatataggcaagttttggctaaaaattgataaaaaaaaaaacatattgtatatggtaaaactataattttaaagaaattattccatatgtgattttaacaaataacgtagatcatgtataaactgcatgttaattaagaaaaaactagtgttaattttgaaaacaatgtgtaaaaaaaatataaggcgcaaattctcatccaacttgaaagttttttttgcataaaaatcaaatttgtcgtatattaagatcggtaataagccgtaatataagattggtcgcatcataataaaaagtgactacacctccttgatagtctcgcttaggcatcttttaggtcatatcaatacaacatacacatatacatatttttcaacacctgaggtgcgcgaagatagacacttcttcatcctctccgtaattctcaaaattagggttttcttccggcagctctctcaggtactttctcgctctttcttctttcatctcattgcgcctctcttcgtttcctttcgtgaatctttttttttggttggggatccaaaattgggatttgtgtaactcttcttatcttaattaaaaactgaatctttctctcatttttgttccaatgattgctaagttagcttaaacacgcctttgattgacatttctctgagttatagctttgtatgtgtattgggttgttcttggttgtatctatcattgtggtcaatttgtgtgaaataatcaaatagaattgtagttataagctgaggattctcttaacaggttagattggcagcataaaaaatatcacttgcaaattctgaacaatgtctgttgtgggagattctaacatggagctggagttttctaagcaaagatactattttgactttagcccttcttatctttcttgttgccatgaatattttaaccttctttgcatctaaccaaggcctatgatatcatggtttttatccgctctcaggggtcatttcgtttcttatctttttttgtttcacctgttgagcatttcatcgccctcttctctctttgtctatttgtttgtcacctttttagccgcattatggcaaagcgtcaattcgaacttcttattcttcttttctattggcctcttattgtttcttttccaacctttcctcggttttattctctctccccacttgcttcttgcttctgtgtctcctccacagttgtactgcaagcattcttttctagatatttaagatgtcaaggacgaggactgctgcttctgaggctcatgactccatggaatctgaggaaagggtagaccttgatggtgacaatgatcctgaggagattctggaggaggaagttgaatacgaagaagttgaagaggaggagattgaagagatagaagaggagatagaggaggaggttgaagtggaagaagaggaggaggaggaggatgctgttgcaacggaagaggaagaagaaaagaaaaggcatgttgaacttcttgcacttcctccacatggttcagaggtttatcttggagggattcctactgatgctactgaaggggacttaaagggcttctgtggatctataggagaagttactgaggtaatttgacatcttcttacctaaactatggttgtgatttaatttatcttgtgctgagtttggtgtgatatcaacaggttaggataatgagggaaaaggattctggtgatggaaaggggtatgcatttgtaacattcagaagtaaggacttagctgctgaagcaattgatactctaaataacactgacttcagagtaagttctttgacctgattcttagtaaattgtctggctcttatttgtttatttacttgatgtaattcaatagggtaaaaggataaaatgttcgactacccaagcaaagcatcgtctctttcttggtaatgtccctagaaattggatggagtcagacattaagaaagcagcaaatagaattggtccaggcgttcaaattgtcgaactcccaaaggtttgtctcctgcaacttggataagtttcagcctatagtgtctattaagttatttctgtaactttcatctcaagttcatgtgtaatttgtaacttacagaagtattttttctatagaaatttaagacatgcctttctcactcagttgatcggttttctatttggttttgttaaaatcacaggaaccacaaaatatgggccggaatcgtggatttgctttcatcgagtattacaaccatgcatgtgctgaatactcgaaacaaaaaatgtcaaatccgagttttaagcttgatgataatgccccaactgtaagctgggctgaatcaaggagtggaggaggaggagattcttcggcttcccaggtttgcttcattagaacctttcttactaataaataatagaagcagcaacaaagagacatgtgttcaaatgtttttctttcaaaaccatgaaaaagatcttactaatatgctgtgtggaatgattgcaggtcaaggcattgtacatcaagaacttacctagagatataacacaagagcgtctaaaggcattatttgaacatcacgggaaaatactgaaagtggtgatcccaccagcaaaaccaggaaaggaagacagtagatacggatttgtgcattatgcagagaggacaagtgtcatgcgagctttgaaaaacactgaaagatatgagattgatggtatgttccattccgaataatattcttccgtatcctcacatcttttgatgtctaaataccaaattgtatcctcatttgtatataggtcatatgttggattgtactctggcaaagcctcaagctgatcaaaagacgaatacaaatacagttcagaatgtgcagaaatcacaattgcaaccaaactatcctcctcttcttagttatggcatggctcctagtccctttggtgctctcggtggatttggagcttctgcctactcacaagtgagatttctactacttatcaatcaaatcattatcttttgagaaaacgttataacaatttaagcctaaatttgtgggaattgtgcagccattaatgcatgccggaggtcacgcagccggtggaatgtcgatgatgccaatcatgttacccgatgggagaatcggatacgtcttgtaagttcttttctatattcctctatactgatctcatgcgattcctatatataagacacatgtactgatctgacgtgttgaatgttataggcaacagcctggactagcagctatgccgcaaccaccaccaaggcattctccaccgtataggggaggcagcggttcgagcagcagcagcggcagcaaacgaagtagtgacaacggtagaggacgaagccgttacaatccttattagtaatttcataattatgttttctttattgggaaaaacaccccaaccaagacacgaaaaacaaaaagtcaattttaaccattgtgtttttgtctttgtgccatctgttttgagttttgtgtgactcttaagaatttgcgggtagcaatggggttcgtttaactcgtgttctgtatatcattggtttcctgtttgttttttaaaaaataatttgtttattcatgtctttttctgattattttatgtatggtccaggcttactaaagcccaataaaggcccaaacttgttatcgtttcaaattagcacaatcactcacgtcatcatcatattaaagcaaaatttgtatccgccccgcattatccaaaaccctaccggccggctgttcaattctgtatcctctaacgccgtctcgtctcacaattggtgagtttcaatctcttctaattttcgtgtttgcgtttagagcgtttgaaatacgattataacaccggaaaagcaaacgccataacaacgatgagaaatcaaggttttacgaaggaggataggatgaatcagttgcctgaagatttgattctgcggattctgtcttttcttccaacagaacttgtcatagcaacgagtgttttgtctaaacaatggcggtctctatggaagttggtgccaaatctcgagttcgattctgatgattacgaaagtgaacactatacattttcagagattgtttgcaagtctttcctttcactcaaagctccggttctaaagagtttgcatctcagttttagatgaaagtcagttaatcctgtagatatcggactttggataggaattgcgtttgctcgacatttgcgtgaattggtactctatgttgccccgaagcagaccttcacatttccgagtagcttgtgtatttgtaacacacttgagactttgaaactcatacttgggattcatgtagacataccttgtccggttcttttgaaatctcttagaactctgcaccttgattctgtgagctacaaagatgaagaatctatccgtaacttgttatctagttgccctattcttgaaaatttggttgtgtatgaatattggtataatgttgtgaatttcgatattgaggtcccgtctttgaagagacttgagatttgtgacgttcttcacaaaaaagagtttagaagatatacgattaatgttccctgtttgaaatacttgagaatcgaagggttaaataaagattttgagctttgtctgaatgcgccggagctggtggaggcatattttactaaaggttctcttatcatcgctgataagtttcttggttcactaaagtcagccaaacgtctctctttggatatattagctttgaaggtaacttaaccttgctattgaattttttggttatctcattgttatttgcaagatttatataccaataattgtttcatgcacaggttgtgtatcctactggtagtatcttctattaactggtatatctggagatgcatacacgtagagaagagtggtggaatctacttacggtcatgctcgatagctctcctaaactacaagtcctcaagctcattgatgtaagatatatcattttattattcagctatctacttttgatggtctctcttaggggtttaaattagtgaaggtctaagagtaatacacatgaattggtctcatcagcatactcaggatgtaagtaaagataatgtggttagcgagaaatggaacgaaccaaagtatgttcctgaatgtttgttgtctcacctcgagacatttgtgtggataagatacgattgggaaagagaagaagagaaagaagtagctacatacattctaaggaacgcaagatggttgaagaagggaactatctccacaaatcccatcgaatcgaaagaccttgagaagttggaagagagacgtaagatgctcaatgagttggatagtgtggtcagggcttccaattcttgcaaccttgtgttcgaattcgaatgatcttatacaatcttgcttttattgaatggttttacattcggccattggatattgaaaaatttctgaatcttctctatctctattctctatgatgaatgaatgatgatacaatcttctgcttctttcgagcgatgttggttaacattaacattttggtattattttataaataagtaaaccggtcggattcggtttgattttaaacaaaaccgagattttgattttcaattaaaaaaaaaaacctaaagtctttcaattggcgagagattcagtactttcttcgactttgttgagtgtttgaaatgcgattttagcaccggagaagcattgaacctgaatgatttcaccgacaatggaacaggggtaagtttctttgtttcgtttatgtttagagcatttgaaatccgataaaacatatgtttctttgtttcgattctttgagaaatcgaagttttgtgaatgaggataggatgaatctgttacccgaagctttgattttaaagaaactgtcttttcttcgaacaaatcattctatatgcaagctcgaaaccctaattcttaatcttgtcttcttttggtttttgttagtgaaagtttgagaattcgcgttgttatgggtaaagacaggatcagtgagttgcctgatggtttgcttctaaagatattgtcttctcttccaacaaacattgtcgtagccacaagtgttttgtctaaacaatggcggtctctctggaagttggtgccaaatctcgagttcgattctgatgattacgaaagtgaacactatacattttcagagattgtttgcaagtctttcctttcacacaaagctccggttctagagagctttcgtctcaaatttgttaactttaatcctgtagatattggactttgggttggaattgctttttctcgacatctacgtgaattggtgctcgatttttatcctgctgagctcgggaagggggtgaccttcacatttccgagtagcttgtgtacttgtaacacacttgagacgttgaaactcgtactatgtattcttgtagatataccttctccagttcttatgaagtctcttagaactctgcaccttgagtttgtgagatacaaagacgaatcatctgtccgtaatcttttatctggctgtcctggtcttgaggaattgcgtttgtatcgaggtgacgattctgatattaaggttttcactattgaggtcccttctttgcagaggttaacgattcatgataacaatgatggaccagagttttggggatatgtgataaatgctccttttttgaagtacttactaattgaagagttaagatgtcctgagttttgtctgaatgccccggagttggttgaggcaaatatcgctgaagttacatctataaccattgagaagtttcttggatctttcacttcagtctcacgtctgttattgaatttatcacccttgaaggtaatctttcggagttctttgttatcacattgtttgattgtttctatatatatacactaataatttgtctcatggatagattacatatcctactggaagtatgttctatcagctggtatctttagagatgtatacacgtgaagcagagtggtggaatctacttacgctcatgctcgagaattctcctaaactacaagtgctcaagctcactgatgtaagacatttcattattagtcagctagctatattttatggtctaggtaatgctatacattgaatgcccccttgtctctatggtctcagcgaagtcaaaattttcataaagatggtttggttagcggcaaatggaatgagccaaaggatgtccctgaatgtttattgtcacagttagagacatttgtgtggagaagattcgattggggaagagaagaagagaaagaaatagctacatatattctcaagaacggaagacggttgaagaaggcaactttctcgacaaatcccattgaatcggaagagctcaataagttgaaagagagacgtaaggtgctcaacggattggatggtgtggtcagggcttcaaattcatgccagcttgtgttcaaatttgatccatcttatcttggatcagactctccttagctcttagagcctctaaattttaccggtatgagggatttggatcggtttagggttttgacttttgatatttatctatcgttatgatacaatcatgttgtataagtcagagcttcaaattcttgccaccttgtgttcgggtttgaatgatcttagactcattcttatcctataaagcttttacgacatctatatatacatttttgcagccattttagcaaataaatcttagagttggacttacttacaaccaaatgccattagcaaaaaaaatttccaaaataattaattttacattaaatttttaatttaaattgtcaatcacattatcaatcaaatttaatccaaacaaacttcacatcaatcccttaaaattagcataaacttcacattaattatttagacatgaaaatatttatttaaagatttaaatcttctaaatttttgcttttagagttattatatcattatctaaaaggcaaaaaatattaattttttaaatattattatttgtatatttaaacttcataaaacattattaatatttaaatttataaaaagtttaatctatcaaaaataattaacatcattatataatatatagttttaaaaaatctcaaaaacaatttcgtcatattttgtgattcgaaattttaagaataaacatatattaaccaattggcgaaaaatgtgtgggttcaacgtcccgcaacgactaatatattttgacaatgattcataaacttattataaattaaatcaatattaataaaataaatagttttttttgtggacgggtttggaaggacgggtttggcaggacgttacttagtaacaatggtaaactataaaataatttacaaatttttatatatattaattttaaaaaatgaattgtctccacggtgtaccgcgggttaaaatctagtgttagctttatttgtttgagggacaaaaaaaaaatagttttacaatttcagaagtcaaggaaaaatttcctagtaataattttttggttatatgttaatctaattacaatctaaaatagtccgtttgacaacaaccagaacacggtttggtttagtaaaaaaattcaagcattgaccgctatggataaattttattttcttattaaaaaattgctgatgtcagcaacctctaaaactagggttttaattttcgccgatcctttaacaaactaaacttacaagtgttaatcataaagctaggttagccagatacgactggcgaatctctttttatttagcttgcttttgcattgaatttttttgatacgatagcatagggaaggcatatatttgaacgattttgcgaaattcattgttcctatcaacgaaaatggaacaacggtatatttctttgtttcgtttatgttcttataagcatgcttcctgattcacgtatatagtttttgtaacgcaaactccaaaccctaactgatcttttagtattttcttctttggttttggtggaggaaagtgagagaaagcgaggtgttgtgagggaggacttgatcagtgagttgcctgaagatttgcttctacttatattgtcctatcttccaacgaaaaaagtcataaccacgagtgttttgtctaaacgatggcaatctctttggaagatagtacccaaacttaagtttaactctaactatcattttacacatcaattttcagagaatgttggcaggtctttgtttttacacaaagctcctgttttggagagttttcatctcaaagtttgtgatataaatgacgatagacctgcatgtgatgatatagatattggaatatggattggaattgcatttgaacgtcatgtgcgtgagttggtgctcgatctttgcttacaaaagtctgtcagatttccaataagtagcatgtttagtacacttgagaccttgattctcaagtatttggctcttgtggatgttccttctccagtttgtatgaagtccctcagaactttgcaccttgattgtgtgaatttcaagcacaatgaatcttttagtaaccttatatctggctgtcctaatcttgaagatttgttcatgtatcaatattaccctctagatgtagtaatgaatttcattattgtggcaccatccttgaagaggctagtaattatagattacagagaggccgggggctatgtgataaatgctcctactttgaaatacttgaaaataaaagggttgagtcattgtgggttttgtttgattgagaatgcgccagtgttagttgaggcaaaaattagaaatcttttttatatatacaaagagaagattctgggatccctcaagtcagccaaacgtctttccttggacttatcacccttggaggtaactttgcttatcacaattgtgttatttggtttcacaatgtttatgttctaacagaaatatgatctttatgcatagattaagtgtcctattgatagtatcttctatcagctggtacatctagagatctatacatgtaaagaggagtggtggaatctacttaagctcatgcttgatagctcgcctaaattacaagtccttaagcttattggtgtaagacatttcattatcagtcagctatagctacttttggtggtctctcttttggggtttttgttaattcccttttgcctctttggtctcagaaaaatttggattttaaaaaagttggtatggtcggcggtaaatggaatgaaccaaagaatgttcctgaatgtttgttgtctcaacttaagatgtttgtgtggacaagttaccattgggaaagtgaagtagagaaagaagtggctacatacattctaaagaatgcaagacaattgaagaatgtaagtttctctacaagacctattcattccaaagagcacaacaagttggaagagaaatgtaagatgctcaaggagttagatggtgttgttagggcttcaagttcatgtcaccttgtgttcatcgaatgatcttatttactagctagactcttcttgtaacattatatgatctaaaatactagtaagtaatgaaccaaactttctgtttgtttctttaatttgaatacacactattgtttatctcgtctacatccatttaaattgtctgccttaatttaatattacaaaatcaaattaattacaaaaaagggaaagaaagacaaaaatattatttactgtcctagaaaaagcctaccgttcaaattctgcaaccatgaccgccttctcatctcacagttggtgatctattaacaacaatggaacaacggtaagcatctatgcttagagcatttgaaagcagagagcactctaaatgttaataatttattctttgatttttggctgtgaaaagttggagaattaaatctaggtgttattaaggcaggtatgatgaatcagttgcctgaagctttggtaagggatcggtgccctcgaacatccagatatacatgtgtttggtttacaaagagacctctcacaccaacaaaccagacttgagaacaaaagaatgtactttacaaatcaatatgatcttttccccttttgagatttggtgtggtatattagaaggactctagactatatcatccggtatcaaaggctccatcttagtctccatcaatgggagctgaagtttccttaaacctttaccactagccaaataatgtcccccgaatatatgaacgtagcatactgaaccgccagtaccaaaattgtaatcgttcctgaagaataggttgcctaatgtatcagataccacataacatttcacagcattactaactggatcctacgaaaacaagacaaagtagtaagatttatccaacacaaatgagagatcaagacatgaattgtatcaaacttacattagcaacaaagaagcttctattctttgcatcatagagataaacgagaactctccccggaagttgttaacaatttcgagccatgaatcttcagcttccccacaaagtttatggtacacatttatgactctcaaagagtcattttctccatctttgactacataaaatttcaatataaaatctacattattaactcccaaaggatgcaataaggaagaatatccattgatatggagcttgaataagacactttgaagcgcctttgcgatttctttgatggcgtctatggaatcatcagtgggaagattctccgaacgttccaaaaccggatacatcatcccaaaaagcttcacgccggccaccgatttcgtgaaaacagcaagcattgtttcttcttttctggcgatatctgagaatgaaaattttgttacgaaattttgagtaaagagaaaaaaaaaaaatgtcaggtacctgaataatagcagaacacatggtcacacatgccacctaaaataaaggacattcagctacctgatgtatatggattgcattgtgttgtataatcaaaaaacaaattttatattaactttaaatatatttaatacattgattcttataatagttagctttttcaatttcaaaactcaattaagaatgtaaaaaaaattaaaaaatttaagatataaaaatttaaattaaaaccagaaaaatcttattagaaacaattaagtaaaataattttctgtattatcaattaaaaatattaactccttattttcattaaaaattaaatcattacaattaaacctaatacacatatataagtttcataagaaagtaatatgaaaaacaattgagtatataactttttagtctaaattttgcacggtaatttttaaattcaaaatgaaaatttttaataaatataaaatcaaattaaaagttaatattttttattgataatagaaaaaactaactattgattaaaaatatttagtaattaaaaaaattaaattcttaaaaaactaactagtaatattatgaatagttcacatcttaaaaatatttattcttttaatttatttttgaaattggaaaaaataactattataataattaatgcattaaatatatatacaaaatatatttgtattggatataaaagagaagatcgagttatgtgaaactgcagctgtttcctatttagaacgtataataacacccagcagcacgatctcgtgtaatttccatacctaagatctttctagcatctcctaaatctttcatttcaaactcactactcagcaaattcttcagttcctgaatatgcttcttattcactgaagctatgagcatatcatcaacatataacagaagataaacataggtgccatcatcgaacttcttcagataaacacaactatcataagaacttcccacaaaaccaattcctttcataaactcatcaaacctaatgttccactgtctaggcgattgtttcaggccataaagaaatcttttgagcaacgcattctaaacaacatacattctaaacaacgcaagactcttgaagaaggcaactttctcgacaaatcccattgagtccaaagagaagcttgagatgctcaacgagttcacaagagtgaaagcttcaaattcttatcagcttgtttttgaatatgacggtgaatcaataatcacataaatttaatttttagcttataaattctacttgtagtaattaatattttagttacaataaaactctccgggtttaaagaacaaaagtcaactgaaatatgaattaaataaacaaaactaaataaaatcagcaaatataaatatccgatttcgtatatttatcttctcttctccttaaatcacttcgatcaaaacttatctctctctatcgtcttttgttttgatttaaatgcctcaagtcgttgcttcagcatgtaccggtgggtctgaccggaaaatctcatgtgaaactctggccgacgataacgaagactcacctcataactcgaagatccgacccgtatccatctccgccgtcgattttccaccggaatcttactctttatcaaaagaagctcagctcgaatggctaaacgacaacgccttcttcgaacgcaaagaatcacaaaaaggaaactcttctgctccaatttcgaatcccaatacaaaccctaattcgagctctcatcgaatctcactcaaatcaaaagcgtcgatcatcagattaccgaaaccgcagaagacgtgtttcaacgaagcgaagaaacggagaaattgcagaatcgcgaggactttgatgattccgaaacggatcgggtcgagattgaaatcggatcctacgttatcggagccatgttctcccaaggtttcttgtatcggaagggttagatctaaacgtgatcgtagccgacgaatgcagagacaaaaatccggtcgaaccaattcgtttaaggataaaccggttccggttaagaagcctggttttttcgctagcttcagagctattttcagaaccggtggcggttgcaaagacttatctgcgagtggagctcacgcgcctcggagggatgtcgtagtctctccgccgagagtttcggtgagaagatcgacggatattagaggacggcttccgccgggagacgtcgggaaatcctcgccgcagaggaatagtaccggttcgaggagatcaattgacggcggtgaaccggttctgcctggtttaggtgggatgactcggtttacttcagggagaagaccggatttgttggttgaagtttgacgtggcgtgacgtacggcgttttactgtgagtggtggggtccagtcccgagaaaaaacaaggatcgtgattggttagttggctatatggggcccagaagcgtgtgtatatttgaaaagtcgttgtgatgacatggcgagtggtttaacggagttaggaacacggcacagatagaaaaacgcggacgcttttggattgatttcttacgtctcaaccactttcaccgttttattatatagcttttggtgcgttttttcttctttttaagacttttgatatttgaattagtttcgctttttgtcctttttattattttccttgttttgggttgtacataggtattgttatttctttgtgtacatgtgttttttttttgcttagaaaggaatagtagaatgtaaaagatacttgtgatgatcagtcaataatgtgttagacacctgagccaatgttccatattgttgattttgttgtcaccatttaaattttgacaaagactgttttattagtgctagaattctcaaaaactaaagtctaaaacaatgaaagtgaatagttggagccatgaatactttaaattctttctttgacttgaagtggcgagttatgtaaaagtgatcgctatttgctagtgtcatttgtcatattatatgtaatttcatttgtatattgagtagttatttcattttcaagaaacgacaggtcattcatagccatctttggttttattataacataaacgaatgggaacaactagtcatttctttgaattggcattttgttatgaagtctctttattgttgggacctccataatggggcctcgtaaaaaccttatgagaattcagacttgtaagtttttgttcatttcctgaagaagcttgtcatgtgttaatagtacttgtaactaatacatacatgttttggaagactataaaacaatattgtgagtattaggtaaagaatagtataatatatatatactagattttaacccgcagtacaccgcggggctataatttttagaaaaaatcaaaatgtaatatacttaattgattaacattattatataacctattattttgtattttttgaatttaatatgtggtacgacgggcaaattgtttttattagtataggcaataatgttagcttttacgatcttttttgtattaaagttaataattttatataagtacaataaaaaaactaatgctgataaaatattaaaataagatttaaaccgtgttattacttttagttgatgatattataaatatgtattaatatcgatccaaacccgtcccaccatataactttcatgaaatattactttttataagtttaaatattattaatgtttataaagttaaaatatttcaataatatatttcaaaaattaatacttttttgccttttatgtaatgacattttttgtaattcttactaaaacaaaataagtctacaaaatgtaattcaatattttaaatgcagataatgttataaataactatttagtttaatcataatttgtaattgatatgtacttgagtttttggactacctgtatttcacgtcatttaatagcctaaattgggtagttttgtaacattatttgaaacaataatattatcttaatacatgtacattttactaactgaaaatatgagattgattatttttataacacggaaaatatgagatagatttttatattacactgaaaatgaatgattcaaaactaaaaatcatagtgtaatatagtttagcgtaaaaaataattaaaaggattttatttatttattttgtttcttaaattttagtttagactcagaaaacaattgtttaacttccttagaagatgataaacacatatagaagatttgaatctctattcatatatatatttaaaaatcagtaatgtcaatataattaaaggatagattagaagaaattctcttgaatgttaaataattcatttgttatttataaacgaaatattaaatgctgtaaaaaatgaaatattaaataaatatggaaagaaaatcctaccttaaaagattttgtattattgaaatcgattttttttacagcaaattaaaaccaaaaattaataaatacttaagagaaattttaggaatgatttcgtttgaaataatggtggagttaatatagagagattttaggcaatatttttgttaggtaaatatttgatttaaaatttctgcataaattcagtggcattgagtcgtaaataagtccaagtccaagatttatttattaaaatggctgcaaaaatgtatatatagatatagatatatagtattctactcgggagatatttttatctttgctgcaaaaagagaggtccatcaattttgataatatatactaataatgctatacgtcttacttttagtatttatttttgttacgaaaattattgtttgtttggagttggcaggaaagacaatgacaattaatttgtcttaacactgcttctcctttttttcctcgtaacaattatttctaactaacgcggaaacaaacaaatccatctttagatttttttccctccttcaatcttccaagttcaaacaattaatatagtagtacacttgtttcttttttccaatataaaactatcattgtaaaattctctcatactactatatctttattgaatctatttacgtcaaaaaaaatcagagatatattaagatgttgtttttaaagttgattcaaaatgtacatagttataatgtccatttcagctcgaagacaattaatcatttatgtgtagattaattaggattgatgtcttgtaaattttaagttaaaatacgaacgatctattttttttttttttttttttttttttttttttgttaacaacatatatacattttacggatttaaatccggctgatgatataataacgaaaataacaacaacaaaaaaaaccactagacacactttccggcttaccggctatatcatgtttaacacttttggttagaggatattaatgtaaccgttgtattcgatgacattaaaacgtggaaccaaattaattttttcgacatctaattcatttgttcttaacttcttattatactaaatatgatattagttattcacgttgtctcaatgtagaacatatctcacaacaccacatagtaaatttggaaatcgtatatcaagtcgtaaacaacaacacagtactacataagagattattagttttacaaagctaattagggttctaaacaaaccaatagacaatgtaaaactattttaattgggttttttctttttgttaccggtttcttttttatcgacacgctcgtggtcgtggaacatctcaactctccggccgttgaggggttgacacggtcttgaattgttcttgaaagaagtgtccaatggagatctgagtagttctacttgttcctttgacattgacctcacctgcatttaatttattatacacggcaatcataaatcacgatgtcacgttaatttggaccgtttccatacaaaaatgtcaaataaacatgaaagtagtagctagctagatgttatcaatcgtatatattgacttctctattcattcaaacgtgaataacaagtttgacataaagggtttagcttaaaagcaggggttgtggagcccaaaagacactcaaattggtttgaatatcgtccagaaaaattaataatgtattaagtttgaaacttcaatatcgttacgtacactatggtctcaaaatctttaatgtgctagaatcaattttcggtggaatttaaatgtttttattctccaaaacgatcaccaaaatctttgaatgctaacattatcacataactttggtctatactttctgcaattttaaaatccatttctaaattcagctggaaaataaacaataaaaagtggtaaatataatgatctttttttagataccaactttagctgcttttgaaaaattaagtctagattattaattcatgcacgctagattattcccaccaaaattcacttctaataaaatccaaatgaattgttttaaacctcacctaacagtgtaatatatgtatgtacatgtcttaaaagattaccttgccaaggatggtccaagaaacgttctcggagcaaggaggagtagtgagtgaaccaatgtatctgtagtactttcgagtcttacgttcaatgtgtcttgtgtcgattcttcctacttccacttgtgctgtgtggttccctttgagtctctcttcctttagcttcaccaatttctccttcatctaatcatattttcacattatattaataacattgaattatcaaattatcccaatctatagtcacacttctcaaaagtacctgagagaggaaaggctcttcagtgccgattttgaagagacttgccaccacagcaaagcttccatcttttgcttggtgtaccatgtgcagctcagctgcatatctacgtttttgttcaattattatcattaattaacacttttttttactttaaaaaacgattcaaatgatatatataactccactccaaaaccttatagtaacattcaaaaagaaaagaagacagaatccacatgggcttatataacaagccagacaaacaccaaaaaaaacacttacataccaatgggcttgtgagtttgtgactcttatggacataaaaaataatattgggggtttttaaaatgtggagtaacaaattggcataaaatccaaaactcgattatttgagctccaacctagctaatttggtagataatcaaacaaagaatgtctggaattttattttattttataacaataataatttattataaataaatcagtcaataaattaataataataataataataataatataattgggccgggggcttactggactccatggaggtgatgttcagaaggagtgtgccaatgcatttgcagtaaggtatagttcttgttttctattatcacatctcctgctccctccccgaagaacatggcaacattacagacgtggttcactagtgttgcgtttgtgaagtagtattcacggtgtattgaattcaatttgtggttgtaaaatatttgcctcctttgaatatcaattggagattgcaatttaccgaccgcgcatgtggtgaagtgagggtttaagtgtccccattggtttggtccatttttgcctttatatccaaacactactccttctgtctctgctcatttattaccaatttgaatacggttaaaacttataaagttatattcactaagcacaacacatatcgttttagacggttagacccataccaaaaactctcatataatagcacgattaccatcatttacttgatcgttttaaacttaattaaatcccatcctatgtatcaaactttgaactttctgattaatttattgtgttttctctaaataaaactataaacatgtgaatgcatactatgaatatagaaatggagggagagagaaacaaagagtgtaagcattacgagcatctgcaggtgcaatgcagatgagggacatggagaagaagcagagcttaatcatcatcataatcttcatcttgtgttttagttcctgttttgttggaaatctctgctaaaaaaaaagggagaaaaagggtttgcattaagaaaaaaagatgaagaagatatattttccaaatctggaaactaattaatgagttttttctaaattaaacctgtggagggttttatcagattactgcatgactgacacggcgggaatggctctgctatatatagccctctcttcttcattttttttttcttaaaataaaaaataaataaaggaaaacaaaagttaaagaaaaacctaaaaactagtgttatccaattccaagtgattttctgtggtacgatattccctaaataaacaaacttaggggtgggagatcatcataggtctatgttattagtttaatacgttttctaacatcgtattattaacataaagttctttttatcttgtcaacattaaaatattgtaattatgttgtgtatttcttttagtatgtacgtgggtcaatttgtagtaatagtgttgaccaaaaattacataagtcaaggagttcaagtcgttggtcaatatcatttttggaggaaagaatataagctaaattaaggtatagactagagaccacattttgtgtgcttttattggaaaacttccatcaaagatgtggaaacataggaacctctgtatgtctctttacatgcagttaaaacggtcctagctataacgttgattcctttaggtttctatttcatggatccgatccaaagataatagatgaaagttttcgaatgtgtttcttttaatttcttttgtaaagacctatatactaaacacttttttgttaaaacattatacaatattgtcaatttcaaaactttaacgaaacaaataattgtgttatctttttggtgtgtgttaccttttcgtataatccacagatggtgcctgccccataaaaacccgtctcccatttttctttctagcttcccacttcttatcgagagaaatctttcactattcttaatatataaactgtttatttaaaagagcatttcatttagagaaatgaaaaaaaaaaaaaaaagagaggcaattctcagaaaacgtaaaagaaaaagtgaaacatgtgatgtgatgatcaggtaggggcgcagaacataacataacgtctcaagacaaaatgttttcggaatattcatttgtccatattccgactccgcgaacatcacatttgcgcttcctactacgatttctaaatctcttgtcgcaacaaacaaaatgcattatgcgaatctatggatggataattccatttgaaagatatgtattgattggtttgcacgatgttgatcgtctctacatgcatggcctttcgaaagtagtggtgcaagttatgtgatttatgataaaagagatcgtcaaaatctaatcttgaacttttgccccacagcttagtggaagtctttcagctatgtgcacgaaatcgaaccaatgtggttttgtcggtttaattcccacttaattctgtaaattcaagaacgatgatgctctatcgacagtgacttctctggttattcttcaaagaattcgtataatcattaatcttctttcttttttgggatccaacatttgagtaaactgattgaaaaatccttccaaatttgacccttggcaaacaaatggaaatctccatgattactatttctcgaagatggatgaaattagacctcagaatatgggcactgcatattaaagcgacgcttcaagaacccaaaagtgaagaaaaggacgattcacaaatgggcgttttaatggacttgcttttaataagggacaaatacttgtaatgccaaatgacgatttatgataatgttatcatattccacaatgcaaaaattcaagtaatcagaaccagatagctttaggtgaaatatgaatcatcccaatgattttatatttattcaacaaagaaagagagacgttggaatgcaaaacaacatggaaatttccaattcttgcttttggtctgaagagaattcaaaaagaagaaagctcattcctctactggcctttgacccaacacagagatgtcttcatatcgtttctgcgccatgacaagaaaatcattgtgaatacgaatataaccattctctttcagactttcacagatactcacacaaggcagaaaaatcaggatgtcgaaggtagagggggaactatacacattccaatagaagctagaaaaggtgaatcaggcatcaatagattttcgaaaagcattcacctattagctaataacactaacaacaagcagagattacagaagatgattacgacgatgacatgaaaccaaagaagtgtgtgtagaaaaatgtgatcattccatatctcaagatgggcaataaagagaatgaagaaacagttattaccatctagactctctagttcaaatgacagacaaacattaacatcaccaatactaaacatttccgaaacaaaatgcagaacttcgaatcaaaagagtaacaaaaaaatcattcatcgtcaacatatttaggcatcagattgcataaaacatgattcagaatacaagaaaataaacataccccaacattgttgcgttcccagagcttatgaacaccgtaatccacagcctgcaaccacagattttaacatttcatgaaaactccattgtctgttcatgtaaacctcttcacatataagaccccaaaaaaaacaacttatcaccagattcttctcacaaaaactataatctccagctctctattgtagattgattaacctctccaacgaaatttcttcactaagattatcatttgacaacaccaaaatccccaatttcgttccaatcaaaccatacacacaaaaaccagatccggtacaatacgaaccctaataagctataacacaaccaaaaaggctctgatctcttacccgttcaccgaaaaatgcgccggcgatgatgaaagtgacgtagacggaattacggcgcatgataagtttgtaaaagccttcgaaagcgcctttctgatttctccgagcagcgtactccatgattgattggttgttttcaggtatctgatctctctacgtattttagggttagagaaagcgatctacgacaatggcgagagcgaagaagagagacgatgagatttttcgcaactaatcagaaatgattctcttttgactagttcgtatctagaaaggccatttgggcctcaatagttcggcctcgtagcccatttattttaacggacccagtacggccctaaatgttaagcccattttgacacccctaacattagcagaacaatctgagttttggtttgtcccaaatccccaaagaaattcaggcccaaaataatttattcgaataagtagttttgattgggtatttgaatatttttttgaatgtttgtatattttggagaagtatatattcctattataagatttttttattttttttgctaagaaatattataagatgttattcgagaatgagtatatatccctgttcattgaaataagacatcaaatctcttttatctatattcaaaggattttcttgatacaaagaaggaaatcaaattctagcaaagaaaaattaaaggtatgatttttctttaacaaatctacaaattctttggtttgatatgaaggaaagatatgatcatcagaaaacagtgattttgtttaaagctcgttatatatgattggattcatatgagaattcaagtatgtaagcgagtataactcagtcttgtttaaattattttcatattgaaattatgtggagagaaaatcatatgcaaataagttagaaaatcatggatccacataattccaatttgaaagtgatgagctctattcagttatagacttgaagtcttgtaatctcttatgaatctaatcatagcgagctttaggtaatatcacagttttctatgatcatacctttactttaaatcattccaaagtatttgtggatcttccacactcacgtactcattcttgggggattttcatggaggtaatgtcaaatgaattcatagctttcgatttctctttgctttgagtttgattttttttttctgattgtattaggaaaatcttttaaatctagagaaaggagaaaagagatagaagatttcatgttttattctgatgaataagggttttttaaatatgagttcaaagaaagggttttacttggtgacaaagtaaaatttggagtataaacacttctaaaagatggactttataatggacattcatctattattaataacaatgttatgtatagtggggttttttaacgggcaaacatcttttgggtatttgagtaatttacatatctaaaatcatatttcacgagcaagtattttaaaatactttgacttaggtattttggtacccataagcaatttttcacataagaactcaaatatgtgtgtgaactgaaagtaataactaaccaaggtcgtcgtttctagattcctaagtaaataactaatcaagatttcttttcaataagtccgctctgatctctttaatcgcgttgttacatagttacatgtctaactcatggcacagagagagatgccaaataaaagggataaatgttgaattggacttataagaagctaagaacatgattgggcatgtttgggcacatgcaaaaggagcattaggaaaacgggcaaatgtcacattcacaatttgatattctgaagaaagaaaaactgctgattcaaaatcttgaggtttttaacaaaagaatccaaaagagcgaaccatattctaaaatttagagcggacacattgcaaatattgaactttgagaatgaggatattcgcttcccttcagatttatgaactacaaatatgtatatttatacttatatacattactcaaatcttactttccttatatctgaaaaatgcaataaaatttctagtactgattataatttctattcgaattttttctttttaattttagttttgatatctttctaaacttttaaaaattttccttaaaactttttctagatatctatcttttccctggaatattagatattctgatagttgtagagtatagatgatatggacggatcgaatcaaaagtattaaaaaacaaaatcacaaaatccgttctacactaacagaacaactaaaggcaactaaacacactcaatttgcaatgtttcataaagttacgagtaaaatgagttagaatattatcaacaatgtaacaatagtgccttatattattgaggaacaagaaccacatttataagtatgttatcttattatattaaattcaacgtaagatcaagcaacgattatgtaacccaccagaagctgaagcagctcgcctagcttcctctacgagagcagtacgtgcagacgagattccggcagggactagacacgtgtcaaacgttgaacaatcgatccaatccttaagaagctcttcttgtccccatatctccggtatccaaaccctaccagcgatctctctccgatgcttctttaacctctctctcccagtgtccactctatcttcttcttgactctgcttcggtttctcttcaagcaaagctagatctttcttgtcggccgaaacagaagaagctgcttcttggggcaaacttggcggatcttgtttggtttggtcggaaggaggctgagatggaccgatcgggtgggccattggagacgtcgtatcgtcgatgttcatcatgatgacacaatagtaaagcagattcagattcttgcaggaaacaaaaagatgaagagagatgtgtgattttgtttgtgttgagagattcggtgttgataatatgtattttttgttgggttatgtaaggaaatgagaaaatcgggtgggaggttgtcttacacgtcgacgtaagtttttgtttggtgaataactttttttattttcgcttttgttgtattgtatggtaagtgacaactttacgtgtcttttttgcagattgaattgctttggcccttaattttttgagcctatataaataaataaatagtcaatatagaattaaactattgattagataacctaaaattctatcaagtgatcaagtctattgtaattcattttttttatttttttgcaagtgatcaagtctattctaatgatttttgccaggtaaaactctcaattaaaggaatttttttttttgtgtgaccaaactcaactagaggatcctttataagtaactttcaattagaggatcttaattaagaagagatttaagagagaaaacgggcattttgaataatcttgtgtctcctaaaaacatagggcactagtcaaacaaattttgaagaatcattgtttttttttcattcaaaatgaaaatatgtaattaaagagattcaggttttcaactgttaatattttgaaataatgttggggtcgtatgtaattcgtgaatactcattagttatgtgtatatagactataagaaagcattcaaagcggttggattttttgggaggatcatgaggctgatgttgatttaggatttattccaatgaaatatgtttaggtggggatacatcggaattaattgatcctgataatgaaatcgacaaaatagttaataaaaaaaaatgttttttgtttctgtttctaaacgtttaatctcaaatacaacatggcgagagagaaaacaatacaaaatggctacaaaactgtttttttttttttttttggcaaataaaataatattttcataatgattgacatatagaggttgcaaaacttgcaatgtaaaagtactttctcacgtggccgtatacggaattcatttgtctcttcgataactttaattttccttcgatcaaattcgtttcccttttaatcatatatttcatggcctccctttgaatatgttttctttttgcttttataccaccttgcatgaatatgtgatcacgtaattatatatgttgattaatatttgagattgtgcttactctctacactttgattcagcaagaaccaaagagtaatataccaaattgtaatgtactttctacagaaagcatatacgcaccatcaaatgatatatatgtgtgtccatatatgactgtctgatgtagatgtagaattaatttatatgagatggaatattgtgtgtcgtgactcgttttggagtatcgaagaaggatatatttagtgcagacgttaacatttaaccacactttgaagatatggtcctctcgcttcgatattttctaaactaagtccgtagacttaaactcgtgtgatggtgcacaaaatcatataatttaaaaaaaaaaaaaaaaatcaaatattatcgaatgttgaaaagtctgatccttaagatttaagaaattgtcgagatcatgtttttttaaacatgacttgggtccggtctattattggacctgctccgggtcgatcgatccccttcagccaccaaaaacagaaattttagtttcattttttatttttgtagtttcgaaatgttgagaaccaggagatattatgtacccaaatatataattgacacaaattttatattcctacaaattaacgatctaccctacacaacaaacggtgaacggtttaacctaaaataatacatgagaacctccaaaagtcttgcattcatatgttcataaaaattgtaattgtttattgagaaaatgttacatagctgatgtacaaaaccgcgttttcacagcaatcaagaagtcgtcaaagttttgacttcagatttatttattcactaaaagtttgatttcgtctgcttcagttttatatatacacaactggtcgacatgagagggagaagaacaatgaaaatgaagaaaacaacaagacaagcttttcttctcctatgtttgcttcatatatttctatgtctctcttttcatgttcgtgtccaccaaggtcagtctcttcttatttttaagtaacgttttgaatcgttgcacttgacgcttaatcgtcccaaatataaaatggtgtagtttacaaactgattagttcgtattttcttacatgttacatccatttacaaccaacaagttaatcttctaaattttttttttaatgtgtgtgcaactacaaaggtaaacctgagatatgcgtaagaccctccccaccatgtggagattctccaaagggaggaggtgaagatacgccgggacataactataaaaagccttgcaaacccattccaagaccacctcctcctcgagattgctagcagctttgaattttcaacacaagtccttaatgtttttttagtaacaatatcatcgagactaatttatttgcacgatgtgcaataatatcgtttaattataccttttttctttctttctttcgaaatttatgtgtaatttgtggtaaaaataataatttgtgcacccgtatgtttgatttaaataaccaaaaccatttacaatgtctcatcataggatatatttgtcttagatgttgtttttctatccatttatccaaaggcaaaatctggaaacagagtgacagagactaagatttatcatctgtcaagtaacattatttttgtaatatagtaaaataatttctaacaacctattatagaatatcaccatagaggcaatttacatagccgcaccaaacattctttctccttacattcaacaatatcatgtagagtgatcaaagtgggtctagaggcgaggatagcgagagcgccctttcttctttaagaactctgggatctctatggagctgccttcagtgaatgatgatgaaggacgtcttgtggctcccattgatgcatccgcttgtgtcgcctgtattttcatgtagcaataagagagattacaaccgaagacttttaacatttgatgtaagaatcggctatgttgtgtgtgtgtgtcaagggagacaagtgaatacctgaagtggcctcccttctccttcttcttggcgtttgaagccagttgctatcagggtaatacttatctgacaggaagaaaaaaagtttaagcaatttgggtatctcataggttatatgttagaagaaaatccaagaaagaagaatacttacttgaccactataagatggatctaccacagcaccaaatataagattcgctgttggatcaacgaggtcgtaaatcacttctgcagcagcatttacctacaaatcgtttcccgagagtcaaaatagagacacacaacgttatatatgacatgggactgaagttcttttatgaattgtctagggaagaaaccaagtgatttctaggacaggaaatggtctgaaagcgtagagagggaaaaaaaacctcgaacagtgttaagtcacttccaccggttatgttccaaactattccagtggctctctcaatgccaatatctaataaaggggattggattgcgtttaatgcagcatctcttgctcgggtctttcctgctcaaataacagtatagcttgaaagattaagcatgatgatgcagccaaaacatagcaccaaaatagttcaagtttaggattttcctcaatataccaacttgcagtggaccaaacattattcctttgtcatggttaaagagtactaaatctatagtcaaattaatctactcagctacatctgtagtaccaattctcagtaaattgaaaacttagcattttagctaacaaacatatgcataaagcgtcgcctatattggtcacagggttctttaacctgccttctaaaccaatattccccttcgacatacgtaatgatgcagcagatagagcctatcaataaaatagttcaattccaaagaacactctactcttacctgttgcagttcctattcccatcaatgaagaacctgcatttgccattatcgccctcacatcagcaaaatccacattgaccaatccaggaatctgcaatgcaaacacaacgatattgcagtcagacattttctataaacatggatgtcatagcttagagaataaatactttcaaagccataccgtaataatatcagatattccacggacaccttgacgaagtatatcatctgccagattaaatgcttctgtaactggagtagactgagagactgctgctagtaacttgtcgtttggaataacaatgagggtgtcaacattatctctgagggctgcaatcccttcctgagcctggagtgctcttctccgtccctcaaatgagaaaggcgttgtcacaataccaaccgttaatatacccatcgcttttgcaacccctgcaattataggagcaccacctgtgccagttccaccacccattccagcctagaaaaataacaagacatttggctagaaaagcttaggcactgaacttaaagatctaatcttacagtcaatctatggaggcagcaaattcacacaataacccataactggttgtactttaaacaggaaagtattctatgatcgaagacataaacctcactgctttaaccagatggagataaaagagaaactggtaaacacaaagagaaactgcaacccaccaaaattcaataaaaccaacatgatattgcaaacggcgattctgacccgtaaaacttctcatttgtaatctatatctttatatagaaataagtataaataaaagtttgttactaagaaaaagtgaaagtaatagttatagacatactgtgacaaagaccatatctgaaccataaagtgcttcttgaatagcttctttgctttctgtagcagcattcatcccaatctctggattacctccagcacctaaacccctagtcaactccttaccaatttgtaacctattgtctggaaaaaccggagatattctcattgcttggatatcggtattcacaatccaaaactccacaccaatcatctcactctcaatcatacgattcacagcgtttgaaccaccacctccaacgccgataactttaatcctagcctcattgtaagtgtttggagtagataactcatccaaatcctcagtaatgggaacactggaagtttcttttcttgggttgagcatggatatctcagggtggagattcaagaaagagtcttggctttggaaatggcttgtactatgagaattcaaagagtttctgattgacgaagactcgtacttatgagaagcaacaacacgatatcttttagtagtaccttcactcattcttaagcaaccaaccctcgtgcctagatgatgatcaggtaacacactctttctaagaacagtgagtacccgagaatccggaggagttaaacagggagaaacataagctgccattctgagactacagaagcaaccaaagatctattaaaaactccaatttcactgcttcaagagaaagaacaagaggtcaacgtcaagtcctgaaccaagaagaagattaaaaaaaaaaaaaagtggcactcacattctacagtactataattggaaaccagttgcatatcagcagcatatggatcaagttcaacactagaagctaagatactacaaagaaaagtcaatgctttaattaataaatttccgaggagtatcaatttgaatcagaaaactacaattggcacatcgtactgttctaaagtaacgaaattgaagatggggaattccagaaatttgtaaaacagtagacgaatacaaaaagctaagacatttcgacgattgagtacagaatttccagagggagcagttttagagattgtagcagaagtacattaacatgtaaaagacgaagagtaccttacgagtagtggcagcagagaattcgagctacaaagaaaaaaaaatgggaaccaatgaaaatggaaggttttggtgttttctgggcttagaatctctttctcgatcacataaaagtggattatgattttgattttgctcctaatttttatctgtttcagtaacaactacagctactaaattcatctgttaaataagttggtgaaagagacaaagcgttagccgacgagagtgatgaagaaaattaaatgtttaatataaatgggcctataatgttggtcttaaagcccatacaacgaattctgggctttagccggataataagcatacgaaaaatttgcacaattttatgagtcttttgcttgctcatgtagaacagtgaagtccatggaaccatgaatgatgatgaacgtaaacaagccacaattctataattcagattgtttgtttgcgtttagatttgtttcgaacgcatcaattgtgattgagacaatcgaagtatgatagtttcgctatcttatgcaatgccattgccaggccaaagctcgtcatgtgtatcttctgatcaactactttctcgcttatagaacaatttcaagctaaaccattcacacttctccccagtcacttatttatcattggtagttgaagcaacctaagatctttaatcaaaacatcttagtgactcgcttctacgttcggaaaatctacactacaactgcaacacatgtacgctaaaaatgagcaattgatactctcaccaaatctaattcaaagaacagttcatgtcaagaaactgtcaaacagaaccacaaaaggatgtatatggcataaacgtttcgagatttccaatagtaagagatcttagaacatcatcttcaattacttaaaccacatcaataacaacttcctctaaagttatcaaaaacctttacaatgtctcagctatttcaccacaaacacttataagatatcacattaagctactcagtaatggcaccggaaagttcaacaatctatcaatattcgaaagcaaggaatcaaaagataacgagaagcgaaaacagagtatagattaagaaacaggcgtacgaaatcaatccacggtgctcttctcctccatcagcaagagacaccaccagattagaacaagctctagtagcccacaacacgaaagccgcaccgagcacaaaccgaacgggaccagcaccttgtggcacaaacaaggacaccgcggacaaaatcacaacgggaagcagagagtaaccaactaaactcgtacaagtatgaagattaagattcccatttctaccagcaagcatattgaagacaatgtacaagaagatagaagaaacaacaacccaaccaagtataacaccaaactgtatcttcccagcgagcaattgaaataagcaaagcgcaaggtataagaagatcggaccagagagatctgaatctttgtgaacagtctgattgattcgaaaaggattgagaatcgatctagttttcttccagatttgatctggatggataccgagttcgtcgagtaaaggctcctcatcctcaaacgaagcagagactcctctaccgaaagatgcagatgaagcgattgttccgtcgaatggtcccgccggcattgaaacggcggcggatccgatttcaaatggaatgaaagggattgaagatgaagcggaggattgacgtggtggttggtaaggagctgtgggaactcggcgttgctgaacatttgcggtggccggagatgatccactggtggggaaaacaaccggtggaattggaaaatccttcgtcatcctctagaatccctaattcagatctcgaatttgaagttagtgttttctctcaatcggatttgatttcagaaattgaaaataattccagtaacaggcgactactacgcattcttcgtgttcgtatcttcgtgatatgtgataagggcattttcggtaagtgaattaataatgttttgggccgtataaggctttatcagcccattagtttgtagttttgaacagcctttgctacacaaacaagtcaatagccccacttgtgagttgtgaatagttttcactactgactaattatcgtaattttataagttattaggctcactgaacaacaaagtcgttgtagtatagtggtaagtattcccgcctgtcacgcgggtgacccgggttcgatccccggcaacggcgattttttattttttaaacctatagtagtgtccttaccattttttgaaagtcatttagaatttgtataaattgtaagagcaatgatcaatacgtaagtcatttagaatttgtataaattgtaagagcaatgatcaatacgtagatttattcaaagttgcctttctgatgttcatgatacttctttttctatcaatcttagctttcttaatttgcaataactgaaacattcgtttgctcaatagtataaagaaagaaaaacacacacagttcaatcaacattttctcctataatcttgaaagtattatgttattcagaataacttattctgttattattattcttttggtgttatcttgatttctacgaaaactcacagatgttcttgattttatattgcagagttgtaatattacttccaagagataagattatatgaagagcaactgcagaatataatttgcataagttgagagtcaaagatattgtaacatcgtaactcaaacctataacatattgaccgatatcaagatctaggtctcataaataagaagtgaggaaatataatgattgtgaaaattgaaaaccagaggtccataattaattctgacgtcagatgatgatgccttgcatggtcttccaaagagatttggagtaatcataaatcggacatctctaaaactgagatttcaaagttgacttcgagtttgccttgttttatgatatatgatgattattcatttcggccaattatatcatgattgttcttcttcgcctcaaattttatttttcacacaaacacttgagttcgatgcgacatcttccttgtttttctagtctatttttgtcgaacacattttgatatgcaagaacataccaaatgttactattgatattgcatccgtatttgcgatgtttaaaatatgtgttaagtatatccaaaactttttgtctatttactcattacttgtgggaatttttcaagttaaagtaaattctattaaactagtataattatgacaggatatagttacacatagttgacaagaaaagcttatacaagcaattaaaaaaaaatgctgacaaataaacctagctaaacatttgtatgtctatatactccttactttatttgtattattataaatatctattttacggggttttttttgctaaaaatataatttttattattcacttatatttgttttcccatatttccacgaaataaactaaaggacacattgatgtataacaaaattaaaggacacattaaagtatagtgctccaatattggtatatccttaatttaataaggttttgtttatcgacctcatatgaagaatttgatttgtcattataaaatgtttaggaaacaaattattttaaatccaatttgaaaatattcaagtttttattgaaaatgtgaagaattgaaaaaaaaaaagaaaaaaaaaatgtgaaatgacttgatgtttagaaagtagttgtaggaaaaatagaagtcaaataaaagagcagagaactcgtagtttagtttttcaaacgaaaatgaatagttttttgactaatactatataataataacttgtaggggtgtgtgtgatggcgtcacatagaatccgaatgaaaagccccttgtctcatctctctggacagagccgcttgaatctcatgtcatgacaccttctgccctcctttttcttttattttctaaatggaaaatatatattccaaacgaatattgggaaattatttagtttttaaaaatttaattaattagttaacattttatgctcaattcatccatcataacaaaaaaaaaaaaaaaatagatatacacatttagagagtgactggagtttataattcatattcaaacccaagagtgtgtgtaaatttgacgtagcatcaattttggtctatttaaagctatagtattctgatattatccattctgaggttttatccagtattactgttgttgaaggaaatgatttacatgaccaatattatcaacaactggtttgaaccataataattaaattgttcagatgcacatggcataataattaaatcatttcaatttagaatgttaggataaagctttcattgaacttgctacaacacatgtagactatatatacacaaacactactattaatattgtttttcttcctcatttcctctactctagtctacttgaaaattacatagacctatttatacttaagaagtgtttgctaatcctgatgaataattagtgtcaattcaacgattcagtttccacttactgtcttactcgatcggaaaatatcatggacaaaatgggtcacttttgtttttgtatgagatgatatatcaatattgaatgcgttttgtatatgattataaaaatcgaataacttgtccccatgttatatacgatacattagttgattgatatgcacttgacaatatttgataaatggagcaaaggtacaaaatgttagtccaagaatcaaccatatcctaaagtccccaaccccacaccagaggatctttaattaacatagaaaatagaaacaaaagtaaaaatatgactgagaagactaacagagagacactgtcttcttgtaataaaacagaatcttcttttcataataactactacagtgctcgatactacttatcttcctataatacaccaaacaaaataaaatacttccaaaaggttgggtcttcttttaatcttctcctacgtacggattcgagatctcttgctctaacgtattcttgatttaaatcaagattgtccagaagcagagcttgatttgttgtcattgtttgatccattgttagagttcttagttttggagagtttctgtttgagttgaaacaaaagctgttggttctcttgattcagaagctcagctttcttccttagtctctcgttctctttcattatgtaacagttttcaacaaacagcttcgagtttagcctctccatttctgctttcttgctacaagtaaaacaaaacaaaagtattattacgaattttgaaaaataaatgagaaaaagagagtaataatatcaataaaaccaaagcttgtgttatgattattattgttcatgttaaatcattacatcacacatgggttgtgcagcttcacacgtcggatgtgaattacattagctataggaaaaatcatttgtcgcatttatttcgttttcatgtgaatttctttttcttctttttatgaaatcaatgatcaaagagagaagaagaacatgattataaatttgtatggaggataaaaagataaagctaataaagagaaagaaattgaagaaaagagataaaaacaagtaatcatgatgatatatatgcagtaattataaatgttttaacctctatggacagagagagtaatgattatatttgaaacgctagaaaaaaacagagtaagcaacaaaacaaagatggtgatcgtagcaatacagactattaaaaagaaaaatcaaacaattttttttatttatttcggttgcctcaaagaaaaagataaagattaaaaactttccatcattgaggaatattttaaaagatgaaaaagttttaacatagaaaaagagagaaattaagggtttgtcttcacgttagttgtacgtgtgacgttactacataactattatcttaacgtatgaacgcaaaagcgatagataacagagcaagaaacagaaacagagcatgtcgagaaaactcacgttaagcttctagaacagtaagagagtgagagagagagaaggagaatagaggttataccttttgggaaggagtgttgagaagcagagataacgaagaaagattgagagagagaagagagacgctagtttgtgtgtgtagagaaggtagagggacaaagagaacaaagtgagacactgtctgttatatagatccccaaaagctaaagagaaagagaaagaaccttctctctcctgacacaacaatcatgcattgtgttgtgtttctgcatagatggcggccgcaagaagagagagagagagaggagatttgtgcatattgcgtcatgtgaatgatgatgatttattaaagagaaagaagttagagagagagaagaaaaaaaaaaggagttttcttgcttgctcttctttcgaaattgatcttcagggatattttcgtaatttccgaaagatcccctagcacttcctttggctcttcatcgtattcgtcctctaaacagaagattcggttaaaagaactagagtaagggtatttacgtcattacgaaggaagtagtacagaggagggtaatattgtcatttgtgtaggactaatgagaggggctatagtagaagaggccatcgacctctaaagattcgcaatgatggtaaagattggttcgaaccatcatccttcatgattctatttcaaccgttttggaccattttgtaaatgctctctttccccatctcatgtcccggttagctcaatcttggtttagttcaaatattacactccaccattattatgttttagattattatttcggatacaaatagtttcctttgtgtgttaaactatttgttacttttttctttgtatgaaaatcatagtataccacaatttgaaaatgcatttttttgtcctcttatattgtctcagcattcaagatttgatataattatggtgggagaagaaaaaaagaaagaaataatgaagaagaagagtgtttggactttggagccgtaaaacctacaaaaaataatcatggatcaaaagtgttgtagaacgtgaaacatcataaacagtgaggtggttgtttttggatgtatttatgacttctctttttttcgtaacttcacatgcctttgaataaaactcgttcgtttgcccatgacttaacccccaaaaagaagatgactacaatttcacgtttatttaaaactactttggcttgtgtatataaatcttgtacggcttcttttaacccttctttcacggaataaatgtgagaaattgtgttttttgtaaatatgctgattgtagaagttaaacaaaactgaaacacaattagtattaagtaggtgtgtcttgaaatggaactaaagagtgggtacacttgcttacaccaaaggcaatgattttaaaggtgtgagcagcttcatttcttgctggcctatgcaatgccgtttctacccctcattgctttggtctaagtttgacaattcggtttggtgttgatttttatttataaaatgaaactttaatttataaatatagttggttctaggattaattttggttaatcataacccagtcggaccaattttcacaccccaaaaaggttgaaaactttgtctctttaccatgtaaatttcaaaaacctaagaatattcaaatattcggttttggtaacccctattaatgtagtaaatgtttggtatagaatattagattaccattcagagaaactatatttcgcttttattaattaattggaattttctagttattttctcctttgttaatctaacctaatcttttttgaactttataatataaacacaaacgaattaaaaaaatataccgtaatttaactgattaaaagtctatataagtttgtgtttatatgacgtatatttcattttgctacgtactactgtatgtatacattcatgttgtatgatggagcatgcctcttttgcacaagaaaagtactgaaatctctttatttgaaggagtccacatccacctcgaaggcgatgtgcgcagtggttcgattgctatacccgagattgatttaccggcgattgatgtcgcatcatctgctgcgtcggtggtggcggaagagttaggtaaatcaaatctcacataaatgattctctgttctattctccattcttcgttcttctgattgtttttttaggtttttggtggttagatgtttgcgccagacgattcagaattcataaggtgtaaagtgtgttcatattagactgcatgcaaacattatcattgcacatcttaacttttaaataaaggactactacagatgtttggatggactactacagaagtaattttcatttaaatatggataaatatcgacgctcacgattcaacaagcaaatctagtttgatatgaattagcaatatgcaaaaagtgataaggatttgaaaagttgaaaagcaacaaagaaaatataacaacttaaaatataaatgagatataattcttaattgacttggtatcaaaacatttgtgtcctgttttgatattgttgtcaatactcaatactatatataagtacttttagtatctacgattctacatcgacatttaacatataatcttatagaatcaatgatgaggaacaagtcctaaccacattcaagaatacgaaccgagggggtctaaatcttacaagatgaatcggctaagagactggttaaccaaaccgaatccttttcaaccgacacatcatcgtcgttcctgtgccattcccaacgtgcatgagtcgcattctcgaccaccaattgaccatgcccgaaacttgcttctctaaacaatgatatttcgggatttggatctctatacctatgatgattatcaaaaacattaacatttaattagtttcattttcaaattttgtttataaaaaatctcatttaacgaagatcttacttggtagcaaggccttctagattcccaccatctccgatgttaatataaaccggaccacatttgtcgaacttatcttggtacactcgactctgtcaaataaacacacaaattagctctatatatataaaaaaaaatcaatgcagttttttaatgaaaccctttagacttacaaaacgctcgtaagcatgaacgtgacctgcaaaaaccaaatcgacacgagctttgtaaagaagagtttccatggattctttcatctccacactctctttctctccttggtgagcttcgttggagttgtaccaaggcgcatgcaccacagccacaacccacggtgtggtcttacggtcgattttcttgagattattttctaaccattggtactgctccgagccaggctcaaaatctgtgtatgaccccaacattataatgtggactccataaacgttgaaagaatagtacaaattcgagctcgagccactctcttcaaatggcatgcgccacctgtaacgtgtatacaaaaatatctaaaattagcataacaaagttcttttaataataaaaagtagaccataataaaactgataaacccaaaattaatacaataaataaggagcttaaaaagaaaagtaggtttggttgttggctagacaaatcgaaataacttacctcttgttataggcggtgaatgggttactgtgtaagataggtattttttcgagctcgtggttgccatgagtgaccatccaaggtctttggctcgcaagtggctgcaccaagcgaccaaaagtgtcccacagtggttggtacatgttagcgtatgacagatcaccaggcaagatgaaaacatcataatcccattttgatacatgttccaatgttgatttactccattcagatgtaccaaggtcaccttcatttttatcaaaaaatatcaagattatcaataaaataacaaataaagctacaaaaccatgatgacataaatctatacttacataggacaatctaaagagtttatatgagtgaagaggaaacatggaatgtataccggacacggcgaatttgattgggaatttagagggaggagtcctgaaactgaactcttgagttgaacttgggcctccacatttgtaatagtaaactgtgttgggctttaatgggcctataacaacgtcattaatttggcccgatcggtaaatcaacaagtagtggtacgatgacgacgttccattagccgagccttcgtattttccagagactgtgccatatacaacactaggcgagattgagctttgcgttatccatgatattctcattttgtccggcccaaccagagatatatgcacctgaatttaaacgtcacaaattcataagtaatttaggaacacacattactataaataaacaaagacaaagcgtacaagcaaaactgcaaaacagatgagtgacgaaagatctaacagaaagaagacaaagtgggtaaatttgtagtaatgtttttttcattagacacgtggtgactccatacgtcacatgacagtatgacacgcacgatgcgaatctctgaattatttgcaacttaaactgttattgactactgtggaaactaaattttatcaaacataggaaaatcttttaattttaatttttaaggattctgaaaagtttatctagagtctagaggggatgtttccttagacaattatcattaactatctgtctcaaattttgaatttgttgatacaattaaaaccttttttatgcatgtatagtttgaaaatgtctccattcaacgtttcgtaattaataaaaaggcgagtacagtgtcgtttcaaatagcatgtgtatacaaaggtttaaattggaaaaaaacaaacaaaatcacccgaaattatggcaatgcttccgtaacgtaactttgtacacgagaaagaattaattcaatagattaatctaacaattttctgctttattaaatttttaccctcaaaaacattttaataagagacaacattactgaagccaataagccgaggaggtgaagaagatccaagttttcttgatattcgtattattggtgtttcatgagaaaacttaagtcgatcttgtttatgtttgaaaactaacacatatcaatactgaaagacaaaatcttgagacttgccgtgtcaaaattctacttacaaggattttacataaatgatacagaatccaatatgcataatatataacaaaaaatatagattttaatgtaaatattacctgatcggggaacgtaggatcatcttcgttagtcggatggatcactaaatttttccgagtaccctgccgatcataagataacacatttccggccaaaacaataagcagtattgctactaaacccaaaaccttcaccattttggcgaaatagagagagagaagagagaaagagagagatcggatgacaagaatgaattagggacacagtgttatatagtagtaatcctttccccttctttttgttttcattttggaaacttgtaaaattggaaaatgtatttgaccaaaacttaactaattggtactttttccactaattcattaataaaaaataaaaataaaaactgtgcaagcaattgcaaagtacacgaatgtagcatgttcaaaacctgcatggaaatcattatgtatcttagtatattcggggggggggggggggggggcagtatcctacgagactacgatggaaaaaaatcttgatctttgtataccaaatataaaagttatatgtgttcttaaacaaaagtcatgagatatgtgctttgctagattatctagtaaaacaatgccttgccttctataacaaattattttcttaaacatttagatttcctttgtactaaaatgattctgatagtaatagaatatagattcacaatttatgttcctaataaattgatgctttaagtttttatcttgttccttaaagattaaagttttagattaaaaaagctgaaataatattgtttttactttttactttttactttatgctttttgccatatgtcgtggtaagtaatggtctatactttctagctctttacactcataatgtaatcttaaattaattaataattaaaaaatttcttaatctgaaaataaaataaaaacatcaatctatcaggaatagagagagagagtactatatagtgatggaaaaaaacctatatagtgatagaatatatatcaaaacatgatccattgttattcaataactttattgaaatcatgtgcaaatgaaactaatatacatcgagactaagagatttagggtttatattcttagattttaaatagtcctatacaagcaaatcatttagttaataaatatttaaaattacttgaataatgactaacgtttttttttaaaccagattttatgcttgcaaattaattatctattaaaatcagttttcttcattatctaatatataatgaattttacaaaatgtttaaactaagaaatttttatgatgtgaaaaatggagtacaaatcgcaaacacgtacttaaaattgcatgaaattgtgtatatacgatatcgatcgttatactactagcctactataagtatgtatatagaaattagagtttcaaaatctaacaagtaacaacgataaatattttatatatcaaggctagtactgagacgtaaattaccgcacatttaaattgagacagggtactaattaaaaccaaacagtttagagatatcgatcaacttatcttccatgatggagctattcgcatatatctttcctgattttggaattgtgcatgcatgactaatctaaagtacgtcatatttttcctccactccaccaattttagatctatcatttttataactaatcctccaaacataattatgctttgcgattatcatatcacttctagttctagatatcaaacattttaaaaatcaaaatcaatagtactatgaaagtttttttggggttcacttttagattaggctttgatagcctaacccgaattttgcgattcaccaaaattttgttattttgcttcttttttttttgtgtccaaataataataatatgttacatactactaatataatcattcacgttgagggcgaataaatattatttcacaatcacatgtacgtcaaaaagaaaaactcattcatacattatcacttgagattagagtgaaggagtgattctgatgagaagacccgggaaaagatcatcgtggtcatgtatatgaggattcccttcaactatgtaaggatctccacacttttcacttatcgtttgcaacgtctctccttctttcacttcatatatctcatcgcatgctggccgtcgatgagaatatccggtgatcatcattgacggctgttgtttctccacgatctccgtggaaccctcctgtgccacctggaaggagttcatcagcagcatcatggcggcaaacactgcacagtaccaagagatcttctccgctactgccatggaagaactctttcccattctgaattatatggtgattataggaaaagggttttgtggattgaaatatatgtattagatgcgtgtatggattaagttgattataaaagattatgttttgttgttggagttggtgtgaatattggcgggagttgaaacggttgataattaatgttgcaggttccttttgtgttaggtcacttgtctttgaatccttttccattcaactttcaattacttgaaaataataacatatatatatatatatgatattttattttaaaaatgtaagttatgtgtcaaaatcaaaaatttaaaatgataggagaatgataaaacatacagtatataatttgtaaaggataaaaataataaaagataaagatgattttaaatttcccttctataaatacactatatatatgtgtgtatatctgtatcaattatcaaagtatttacatttgaatgatatgaaaatttaccacacttcaatcatatatatgtatatgatattttcacataattaaaggaaagatatctcattctttcaagaaaattttggagaaataaatactttgacaaacatagttatttacttaattgttccttctttcaaatcaaatatttttatgggtctaaaactctgaaattcactttatcaagaaaaaaaaccctgtaaatttaggttaagaaaataattatttgcttaaagatcacatatggacccatgaggttcttacattcaattaaatctccatactaataaaacaccatcctcaaaacccatgggccaagcccaatcaagcttaaaaatgtttttttaaaaagaaatgaaattcatttttcttgttctaatcaatgttgaaagaaggtgaaagcttttagcaactaattctaaattttagagagaatcctacaatagactcatagtaatataatcgaataagctatacttttttttttggataattggcaaaatgataagctatacttgttcttcctttcttttcttccatcttttttctttgttctttctatatttgtaactcttccaaattattccatcaatcttctatgaagatcctaatcaagtaaatgctaaaaatatgtttacttgcccaactattcccaatatataatttgttgcccatagctccaaagaaaattaacggcacgtgttgatactacattagtgaatcttattgaaagataagatagtgagagtgtctattgtgataaagaaaaaaggctggtggacttccattttggctcctcttccagcctgtttttcgtatctttatctttacacacatttttgtaattccctaattacaatcatcaattagaaaacgagtcaaagtcatgtgtaataaaatatttgatgggaaagaaaaattgaaacggttaaaacttataaagagtctaagaatatcacaaagattttttgttgttgttgtcaacaatgtttatattataaagtcttttggggagtttttcaattctttttataactgattttaaaagttattctaagatgtttcgaaggtagaatcattcttaaatctcttttgtaatagtttcggaacctttgaaacattctaacagtttccatatttgttaaaaaatatagtagttaaaatcggtttttaatgtgtatgcgtagatgctgatttttctttaatatcgcttcgttgttactcctcatgttgtatttcctcgtgtcatgcctccacttgcccgtcactcgtatcttcacttatcgtcactcgtttttgatagttgcaaattgttaattatatgttcactattttccatttaacttttcttacgattcacacttttttctagtaacatctccttcatcaattaatcatacttaaaattgctcttgttgtgcgcagcgtcatcaaaagggaactctaccaatggtgataacacgactattttatagaaatacaagtgaacctcgaatttcatattaaatttctcaaattaaaaattatacgatttgacctgtaagacaaaaactaaaataaaataaacagagaataaaccggtgaaattttttgatatgttgctagagaaagaaaaaactagttagaaaaacgttgttatttccgataagttacatgtgtttaatcttgaatcatttaacgctttttagtgtttagattttagttttaattgaattataatttttgaagtataattgttagaaaattacgaatcagagattaaaaatgtgatttgagaataagatagtactgtatgcaattgattgatgcatcttaaaaaagtttaataaactaaacctatcctgtatctgttgaagttgaagtttgtcaaaacgaatgtttgtagttacaagtatcacgaaataattttgtatttctaaaaaccaattaattactctcatgcttcacctaataaaaaaataatttaaaaattagtctgatgacaaataattgttcccctactaataaacattcttaacaatatctttatctttaaggatatttaaatcctaacccaaacccaatcaaacggttttgcgtacatcatttccccacttcaagtatcaaattgatcattattagtggttttataattcctttacacatgatcaaaaatcttacttgaaccgtccaaattttaatccttaagaaaaatctaatagagacgattggtagatttaaatcccaagttgacaaaaaaagaaagatatcaagtggttcttcttacaaggtatcaaacacgttatcaattaatctcacacggtccgaactttgacccatataataataattttctttttctggtaaggaaaagttactttatgtttcgtaataaaaaactcaaaatcaaatttaaaaatactatataaaatcaaataaatgacaccaccatgacgacatttaatcaaatatataataatttgaacgtcgaatagtgttttcattacgtgttttgtaaccactaattagattattacatttcgttaaattaacgaaacaaattcataagcaaaaataaaataccgttaataattttttgctatttaattttaagcagcgtcgtctctgttttcgccgttgtttccttcttcttcttcttcttctttctctttcttatatcttttttctcttcccaattttctcatcgatcactgaatcttcttcttcttcttcttccttctctcaagaacaggtaaaactctctcctcttctccttctttttctctcctctctcttctctcttttaacaaaaaaaaactgtcttttcttcatttctgttctttttttggttgccgagaaaaacagaggataattttccgatatctgttttttttttctcggtgaccagaatcggttggttctgttttttttttttttttccttctttgttattgttatcttattaatgaatcttttttgttgttataatttacagattttttttaaacgagcttgatcaataaattctctcaagatctatggcggaagagcatcgatgtcagacaccagaaagcaaccgtctctgtgttaacaactgtggcttcctcggcagctccgccaccatgaatctctgttctaattgttacggcgatctttgtctcaaacaacaacaacaatcctcctccatcaaatccaccgttgaatcttccctctctgtatctcctccgtcgtcatcatcatcggagatctcttctccgatcatccctcctctccttaaaaatccatcagtcaagctagaggtaccggagaaaaaggcggtgatttcgctgccgacgacggagcagaatcagcaacagaggccgaatcggtgcacgacgtgtaggaaacgggtcgggttaaccggattcaagtgccggtgcggtacgatgttttgcggggttcataggtacccggagatccatggatgcagctacgatttcaaatcggccggacgtgaagagatcgcgaaagcgaatccgttggtgaaagcagcgaagcttcagaagatatgatcagagccgttcgatgcgttgacttttcctctcgtaagtcttcatttctacgcgtatgtgtgtcctccgtcccccgagaaatacggatggtgtcgatttgattgatctcagccgttggatcaaaaatggtttattattgtaaaagattgattatgtatttatcaaagggacacgtgtcacgtggttttaggatggagacgctttcgctttttctccttcattttattttctttttcctttcagaaagaaataagattattcgcgttggctttttctttttattaaattccggcttattattattattattgtgtggcttttgcgtgtacaaagtctattcagaaaaataaaaaaaatgatattaatttccctcaattggatatggacttctatacactctttaatagtataattttatatggatgtggaatgtgttgaagaaggctgataatcacgtctttaaaactcaaaaatgatgaattagcaacgaatttagattgtctcgcaaggtgcctgacggttcaaatagtatcaaaaacggctacatatatattactacatgttgattagccaaaatttaggtaatacattttaggaaaagtatatgacttaaagtttggttatcccccccaaaattggtatttgtaacaattcaatatagttttttttatttattaagtaactaaaagatttatataaatttactttttgagttatttttctacaaaacattagataacaagagcttaaatgttttatgatacggtgatttagatctcacctctataacgatttgaatgacaatgcgatgatgttctagggctttcgaacgatacttcatcggcaatagatgacatctcgtcgttgtttctatgccacgaccaatgtgctcgtttatggtctataatccttaatctcccatgtccaaaactcgattcacggaattccgacaaaggtgactgaggctttttgaacctgtagtattggtttgcttatacaattcggttaaagaaccaaaacaattttacaaacaaataaaacaatttaattgggtgaacatattaattatactagtaatggcctaatcggaggtggcatacgtaccgtaaagcaaggccttctcggttgccaccgtcaccaatggttatgtacattggtccacatggatcggctttcttgttgtatatcggcttctgcattgtccataattttcatataatagtaaaagatgtgtaatgtacagtattcacttcattctaaccactaaattaaagaaaagttaatgaagatgggaggcacttacgaaacgttcgtaggtatgaacgtggccggcaaaaacgacgtctacttgagcacgatagagcaaactctccagggcacttctcattttctctccttcaccataatgcgccttgtttgtactgtaccatggcgtgtgcatcaccaccaccaaccatggcgtctttttacggtcaacctccctcacacacaaaaaatttatacttttcaagaactaattaagaggaacagttgaattgtttttacttttaaaacatgaagtctcgtgtaaaaatccagaatagtcttcgtgtggtttctgctatgtaaattttgcaatgactaacttagaaatgttgcaaacaaatagtgcaaattttaatttatatatcccaactagttacctttcttaaatcagcttggagccaatgatactgatcggagtgggactcatagggggtgtaagaaccaagcataacggtgtggacgcctgctacatcaaaagaatagtaaagattggagtgagagagactctcagcgtgaggcatgagccatcgcgcattgtatgacttgaagcttatgtggtcattggttgggaaagactcgatctcgtggttcccctccgtgaccatccacgggcgggtgctagctaaagtctctaagaggcggccaaaggagtcccaaagtggctggtgggtgtctgcgtaggagaggtcaccgggaaggaggaagacatcgaagtcccgtttccgtatctgatctaatgttcttacggtccaatcggtttggcctaggtcaccttcaatatcacatcaaaaccggtttttagtatgtccacaataagccattgattatagtgttcactttaggaatcaatatgtaattgattatgatcgtttgaaagaatatttacaactctaacccacaaaatattatttgagttaggaccaattcatgcatggataataaccgacgataattgtaaaaaaaaaaaaaaaaaaaaagatgagacgtgtaaaactattaaagtttgagattctggcgtatatacttcaaacaatcaaactccaacgggaaagttgtggacatggtataaaaagtggaatacatgtaacttcatgcacggtttgcatgctattgtataaatatatttagtccaattttaagtattctattaagcctgaagttaattgaaaacctaaaaagaaatagatggacaagattaacccaccagtgacataactagacaaagtatgaacaaatcacaaatcgaaaataagaaaaatactaatctttctatataaaatattgggatcaatctcactttaatctgcaatatctctatgcacacatttgttttgcaaaacatgactaagatgtaaagttatatatatatcatccctctctaagtcacgtacttaaaactcatatgcaattagaccttccattccaaaggaatgacaaaacactagtgagttaaagaagggactttaccagcgacggcgaattcgattggaaatttggatgggggagttttgaaagaaaattcgtcaccgtgaccaccacaacggtaatagtatttggtgttgggtttaagaggaccaatcttgacatgatggatctttccagagttgtagaagaagtatgtgtaagaagtggattctccggccgtttttttgtcatacttttttggatgtttaccgtactccaccatcgatgccacattcaagtcgtctgttgtgtatgttactctcatgtggtctttacccgccaatgatatgtgcacctatatgtgtatacaattaatatatagacgatcaacattaacaaattgaaactatctcgagagcagagggcaatgagaaagagaagtaaattaatgaacctgttgaggatagaactttggacgcccgtgagagacaatgaagagaggacgaggcggcgggcgggtgaagtttgaatcatagttagcttgacatacaaacggagagaggaaaaagagagaaaagctaattaagaaaccaaatattttcatcttcttcattttcaaagagttgatgtcggtgaaagatgaaggagaagaagatgggatggattgatcaaatattgaaaagatccgtggatgcttcaggtttgtttatacaactcgtcaagtcacagtgtttgtttgttaatttgtttataaaaagcttaattagcttgtagctttattcatcttccttttgcctataagaaaacaaaataaataagaaatgtgaagggttttgtaattttcataagctaatagttttattttttatccaaaaattttgattgaatatatacactccctcccgcatccttttccaaataattcaaagaaaaggaatatttaacgagtaggaaaattcttattgatcgaatatgtaagcgtagatcagacagacatttatctggtatgatatgatatactaaaccttgttggatcctaaaacaaaagcacgcagtacttaaatagaaactccaaatacatccttaaacacaaaaagaaatgcctaaaatagtaaaatttgtaacaaaatgaatattcgtagttccttactattctacgagcgctccgatgagcaaaagaagtacaagacattttcgggtatgatgatctagagctcatcattggagcgacttgaaggccaacatgatgatgatgtgctaagactatcaagccagacctcatcagcaagaagtgagttcgagtcattgtttctatgccatgaccaatgtgctcgtttcccgtccataaccttcaatctcccatgtccaaaactcgattcgcgaaattccgataaaggtgaaggaggcttcttgaatctataattcaagttatgaaaagagaaaacatatttcagtaagtctattgaattcatttaaatgatcaaatttattagaagaaaaaaaacatttggattggtgggaagaatatgaaattaaatttggatttataatgagagctaggtgacttacgataaagcaaggccctctcggttaccgccgtcaccgatggtaatgtgtataggcccacaggggtcggccttgttgttatatacacgtttctgcatcaatcacaattcgacatctattaatccacatggtacaataatgattcaatgaagtcaatagtaaaaaaagagagattgattagcgatgattgaggacttacgaaacgttcgtaggcatgaacatggccagaaaagacgacgtcgactcgagcattaaagagcagagactccatagcttccctcatgctctctccttcaccttcatgtgcctcgtttgtgttgtaccacggggcgtgcagcaacaccaccacccacggcgtcgttttacggtcaaccttttttcaattaattaaaaaaaaaaaacaagtttcaagaattgatagaaattttgaactattacgtaacatgttataaatatgggttattgcgttaaaaaatctttcggcctttttcatgtaatatttattttaccgataatgcttgaacatatatatttttgaaagcaacttcttcataatgtatcaggtatgtcatattttgatattttatacagcaccaaaaaaatattttacgtattatatataccaatatgtttctatttaatatgatacatattaagattaatagatttgattaaatgtttgaagtagttttttttgtgtgtgtgtgtgtaaggtatactatgatcaagtgttaagcatttttccaactttagttgcattatctacaaactaacctttgctagatcggcctggagccattgatactgatcggattcacagtcaaagtcggtgtaagaaccaagcataacagtgtggacaccggctacgtcaaaagagtagtacaggttggaggtagagaagctctcggtgtgaggcatgagccaccgagcattgtatgacttgaaggttgtgtgttcaatgattgggaagaattcgatttcgtggtttccttcagtaaccatccaaggacgcttgctcgctagtggctccactaggcgaccaaaggagtcccagagtggctggtgagtgtcggcgtaggataggtctccaggaagtagaaacacgtcgtagtcttggctatttatatgagataacgttgctgctgtccattcggtttggcctaggtcgccttcaatatcacatcaaaaatcggtctttcattagtttggcatgaaaatttggtccttaaccggttcaaaccagaacccaacaaatagtatagtggtgtgaaaataaatccaatccaaccaaactgtcatggatttagtgttttaggagtatctcaaccaattcactatctatagaacctaattaacatatattggcatattgcattaaggtaactgtttttttggtcaacctaaagtctccaattcaaatataccaaaaaaaaaacgaaggtgataaacttaagaaaagagtgtttgaggaagtttacctacgattgcgaactcgacaggaaaagttgatggaggggtcttgaaagaaaattcagggccgttgccgccacaacggtagtagtaagtggtgttggcttggagaggtccgatcttgacatggtggattttgccggatttgtagaagaagtatttgtaagaagtgcattctccggtggcttttccgtcgtactttcctggttgtttaccgtattccactaccgactccaccttgttgtcttccgttatgaatgttactctcatgtggtccttacccgctaacgatatgtgcacctttaatttatcaaatttgtagattaattagaaataatcactaattgttttgactgaatagaaaacttaaagattagtacggtcttttctggcacaaagatgatatacaaggaaataaaattcacaacaagtagtgatatataatgtagatttgtgaaaagaaaaaaaacaagccatgatagagtcaagaaaaaaatggattttatgtcattattataagtagcaaaatatataacatgattacgtgatagatttaagaattcacaaccaaggatgcaaatacattgtccttaattaaggaccatacatttcacattccgtaacaaacagaagatgataatactaggaattaaaaacacaagggaacaattttgacttaaatgaaaaattataagaagctgttgagaaagagagataaataaaagaacctgttgcggatcggatttggagcggtcattatggacgaatacgatgggacgaggcggctggcggctaagttccggcacatcggcttgagatatgaacggacaaagaaacaagagagtaaaactaagaaagagaccaaaaagtttcatcttcttgtttaaagagtaaaagtttggtgaagaatattggattgttattgaagtgatcggtagatgttttcagatgtgtttacactttatacatctcgttagccatcgcgtcaagtaacttcatttccttctttatttataattcaaaaacatgtcatatatacatttttgtaagctttgcttgcagctttctttatctttctattattaaaggaataaccagctataaggtcaatgcttgaattgttcaatataaggttttcgtaaccttaaagaattggaccctagaaattagaaaaaaaatttgagacgtattacatgaagatattagtatatagtgtcgtccgtgtattagtatatatatctgtatgaaagttgtattcacggtgtcaaactattctgtaacactatactctaattagcagatgattttttgcctgtttgaagaaagtcattacgttgttgcattgaatagaaaatgtactagttacgatataagaaatcaaagttaaatagactgaaagacttctcaagaaacagaaagttgaactgaataagtaactttgaatacaagataagaaaaatgaaacaacgtatagtagttatataacatcgtttaagggtgttttagttatggacttaataatatatcaatgaattaggaaatttaagaaatcgttgaataatacagaatagaaataggacgaaaggggtcaattttttaagttccgacgtcggccaatgagtcattgagcaaggatcatgaccacatacgagtgctatggtaccattcaataaatccttgtcctataagactttactataatgtttttttttttcggttgtttggtcgacttaatttaaaccttgatgtgatggaaatccacgaaatgccacattgccatcccatattgttaatgcacgaattaaacaagtacgggtgagtctcaagggaaggtgaagaatcaatctctaattcacgagctgaactcgaagctggacaatcgacgggctgaagggcttatggcgaactgagaacgtagtcggttgagggcgctacgaggcgatgccgtttcgagctggtggttctggcgagctggctcttcttgctaagttggcttgtcttgacgggatgtcttctctctacgagctgacttgtatcgatgagcggacttgtcctgacgagctgaattgtcttgacgagctgacttgtcttgacgagctgacttgtcttgtcctttctccaggtctcccaaaaaaaatgtcctttcccgagactttctattccttatttatacccgtccgtgtagtagggtacgcaaggtgaattcccgagagtgcccttttctgcgcagccgaactcacatctcgaccaggccgggtttcggcccggcgggccggctcgagttctaaagtgatggtcggggctgggtcgatattccttgaaatgggccggttgatcactgaggcccaattgatgtatcaacacatatctaagattattcaacttcatgtgaatgagcaagcaccttttttctgttttattagacttagacatttttaattgtctccaaaaattgtatacttaacaaaaaattgaagctcgaatttcatcaaatcatgtttatttattggattattttagtatgtaggagttgtcttatcctggttactctaattaacatattaatggtagtggctggtgatcgagaaacaatataaactaattcaagtgcacattattttcacgatattacgctagttatatctgggactgcaaaaaaacaattagatattttcatgtgtttcgtaattaacggagagattatttaaccacaaaaatgatggccatgtgtcaaacaatgaacaagtgataaagacgagaaagagtaaaacaagtaatctgatggaacgtgcgaagatgtagaacatgaaccatgtcatctggccacgttgcttagttaatctggtcctaacgaatatgctttatggatctttcctaattctgaatagaaaatacaaataaatgatttatgagttacgtattttagataagccgtgtacggacgacggactttttcttatggatattgaaatcgaaatagcatatgcttttgacacaataataagaaggatagcgaattatggtgtaacattttggcaaaatataaaatagcgccaattatccaccaagtccactattttcgtccttttcaacatatacactattttaaaaatttatattctaatttgcattttatatttttaaatcagagtctattaacatatagttatatttggcatgagatattgatttaaaagattgaacttgtgcaactcaccagttcaagaaataattaaaaaaaaggagatacatgattcatccctgtttaagttttaattgacttagacgtctgtttatcaattcggcaatatggcttgagataaactaaaatgttagtgttttcaaccaaaaaaaagaaaaaacacaaaaactttaggtcaaccattttaatctcttaaacgcaataaatctaatcgcctgataggtgaggagaaaatgctcaagtgtaatgttcatatcatctgggttggtctatctgagaattc

SEQ ID NO: 1360 - DNA, 94958 bp, Arabidopsis thaliana
aagcttgaatgtttgagagtcatagccaaaagggcacttggcaggtaccgttgcagaatcagtagagtccttattcaagtttccttcttgttcaggacatcctttactcccattttcgtcaggacgagcagatttagaaaaagggcaaccagaagccgtcgtttccccttgctttcgagcagaggcatcgtcgggacgagcagctttagaaaaaggacaaccagaagcggtaatttcgccttgttttcgagtcgacccatcgtcaggacgagcagctttcgagaacgggcaaacagaagtcgtcgtcattcgtgaaggtagcaacaaccctacaacacctcaaaaggaaaattcaaaacctaaattactaaaattgcttcctcaagatgaaattcgaaattgattctctagctaaactatcaacagctggaaatcgaacatagaagaagctaattcagaagtagctcaacagagagagatggaaaaaacctgaattggattggattgagattagatttggaaatgtctctttcgctgcttctctgcaatcaatcaatgatcgattgatagctctctctcttcttttttctgtttccgataagtttttttttttttttttttgtgcgttggaattggatggtgttttgttttctctcagtcaaacgaaaaatagatattactaaatgggcctgcggtttttgtagcctatttaagaatttgggtcactagtcaatttaagaaaaccgttgttctggattataaactggttggatttttaatattaatcagcttttttttttttttcactgaaggtttagttttattaaaatccacatcacaatggttacaacccattaatggcccaaatggctacatcacttaaagataaaattttgctcaatacacgtgtcaaacacaaagatacgtagatgaaacgtgttgcaagaaaagcttggaaactttccgtcatccttcgccgttaattactccgactattgtaaacacaatcgacgccggaaaaagtttaagcatcgttttttgttgttgcttgtcaccggagaatgttgaaacagctacaggcaatcttaatatgctggaaacaagtcttctttcattacattgaacataattaccgatgaagatttgttgtaaccaaagatctgaagaaccagtttgagaacatccaagagaaaaagcagcaaatccacccgatctggtcggattagatatccgcataacctcactggaaaccaccggaaacataaaacaaaacaaaactcaaggagctagttggagaccaccgttgaacgagaaattgttaggttggcaccaccaaacatagatcagagagatttttaaaagataaactaaagaggactaaaagaaatcggcataaaaccgattcacggcagcgattcacggcagatgaaaataccaagccagccaaaaccgctaatgggagccggatttactggacgaaagccgaccatcgccgcatactaagccggtggatgtcgggctgaagccaattgaaccaattggacggccttatcggaaaattgtaacagacggtttttgatactactaatattaatcagctaacataagtaaacaatttttaatattcaaaaaaaaaaaaaaaaaaaaaaaaaatatatcctcttccttctctcttaaaaacaaaagcaccgcttcaattccgccggcgttgtgagccaccacggtcatgacgtcggtttggctttttggtttatgttcagttatgtctctttaagttgtggttaaggagatttctgggttggtttcgatttcgtttcctcctcaatttctcttattagatctatagtttcgattggtgattttgcaaattagcgtggttttcttctctgactaaatactccctggcctaatcacgatcgctctatgccactcactgtcggtgttgtggtgattcgggttgggtgacctaattttgggtttcctcacacagcttcaacaatacggatctagggcgaaatccgcccagattttgggttctttctaccggttcaagtcgcatagtcgatatctccggccacggcgttctcgacggtctctgcatgtttagctgagtttccaccgtctgccatccaaagtatcccaaggtttttcttctgaagatttttaattatcaagtaaggcaagaagatcaaattttcttaaagtgggtgtctcaatctccgacgaaatctccgatgccagttaattttcgatcttggtttatttggttaaagagagaactatgtttatgtgtaaaatcatcaatcatgttttattttgtctttctacgtcgtttccccatgtcggggcttagtgtcggggtttcattcctcgccggcttgtgtaccggaggattatatcctgccggctttgtcgtcccgtaattcactcgggtttatgtatctgatatggtttgtgctgataataaaattagctttgtgaaaaaaaaaaaaaagtaaacaatcaatcctttaaccgtatccggtcggatattttctaagaaatggtttagtcaccaaaatgtcataaccagttgaacccattcaagttctgtagtttacatatatatatggatactatctgattgatataagattatataacttaggtgttttagaaattcaatttcttcttatcataagagagtatgaagcattacaacatgcaagaggttcaaatcgacatcttaatccgttcaattccaatcaaatcataaactttgaacttgtcctctggactacgaaaggttgactgcttcacgggtaaaacagtgaacccatcaggatcagtacatgtctcaagaccacactcatggcataaagattcaacatccaactcctgaaatatacaaacttgacttatgacatttcaagtttaccaacaatacgaaaatagaaaaaaaagacagggaaatatttagtcataggggtattatcaccttcatcttcaggttctgagataaccgcaagagaggatagggttgaagcttgtagcaaacattgtttatgtattggacagccactaatcgcatcttttaccatgaaaacattaagcaaatgatcaacataattgaacaatttactgcaaatatcattccatgtatagccactttatacacacccatatatttgaacaatttactgcaaatatcattccatgtaactatataattgctttaccataccggtaatattttctagtacaaacttattctatatcatctttctcatgtttattttcatttcatattgcattagccgctaccaattaaagtcccacaaagactatccctgagagctaggacataactacatatttatatccatgcaagctcacctctctaatatgatgttcacttatgcaatactgcaagtatgtcgcctcagaagctgttctacttaagaagttcttgtaattgcccatccgatataatctggaagaaaaaattaagagaaaagacaggtatcattatacttcaattcatatttcctaaatttgttcaaattaaataactcatacgcaaatgattgaacagcataagactaccttaaaaggtttcgtacaaaacatatttccttggattttaccaaagcaaaagtcaacttgcgaaaccataaagacagcggttccccctgcagatcataatctcaacgatttctatcaatggcaaaaagaaggtgacatgataacaaattaataaggagaaagaaaccagaaaacaaccatcactccactactaggattgagatgaagcagcacatagagtgagcggaactcggcttcattttcgtagatatagtccggttttctatttgcatcatatatattatacaaagaggtaagagtttttgctagctgctccatgttcaagtgatgcattgagctaatacttgtaccactacaactttgaagcctctcgtgagatatgacatgaaattttacctgttacagaagccattcgggagtcaacaataataacatcaacggaactctatagaaaataaaacaaactgatgattaccaatcagaagaggatgatcaatcagagtggtatatatttctatgaaaattacaaaagaagaaaaatgatcctatttgagcatcctgattaagattacgactatgtaaactacaatcaacacattaagtcaaaatatcttaaacttacaaatattcttttggtaatagcagagggttaaacacacaaacgactgtcaacaaaacccaaggaaagcaattctaaagacaaaatagacatgctcagtgtaattcatttaccgaaccaggaaagagaaaagagttagaaaaaagtcaaaccataccatttcctcataaaggtagatcactctctcattggccaaattctggatgctaagatcttgtctaatagaccttgtcctatcgaaaataaaatcatgaaccacttcaaacgggtgctccttggagtcgagcaaacttagaaggtatctcagggtttcttctaaaactgggagcggtcttacatccgatgcctgaacatccgccgctgaaagggttctgcaaaactagcaagaacacagaaagagagtataaatgccgttggtattggaaaaaaatgaacctcattgcatagcagctggtatctcccaataagtagtacaaactattcatcttgaccaataagttatggattctaatttgcatagatgaagaatttcaacatcaaatttctttcaataacaagttctctcgaagaatagatacgacatgtcaaatatagaaagctgaaggtgaaagtttcccacattagcaccagagacatgaaaactcaaagctgtacaatgtgaaccgcacctttttgacagctatctctgtggatgattttgaggggtttccataaagcctctcaaacactgcaagatcacgcaggcgttctcttgtgactctttccctctctattgataccaaaaacaacatattagatgaagctgtacacactctttttggtacttcaagtgtaattttttacctaaacccctagcaaaagataattctttgttctgaactgccgatgcacggaaggatcatgaattgatgaagggaaagtacctaattgacctaagaactagatcaaatccaattcaggtgcaggatagggttgaattttagcggaatctcaggtcaattggtaatttatctgcagctaacgtagttcgatgattacctgggcacatagaagaacaagttcctacaatcaatgaaacgtcagcaggatcttcgtctttatgttttgattcgtctttttcattgtttcgtttgtgcggtgcatcggatcttctctgaaaggattcattaactccgccgccggatccagtcctcgggttatcagagaactggcggttcccataagtattcgaaaccctagaagaagaagaagaagagccacgattacgacgattcatggcttagagggaacgagatcttcttccctcccaagtcccaaaccagactctgaagaaacgaaccaatcaaagctgttaccgaactattatttggaataaaccggaagagaaccaaatccggtacagtactctcagcgaattaaatctggcggcaaccgggtcaatttaatttacaccggttctgacttgtacacaaatttgcatttctacaaatgcagcattcaaaattcaactcaagtaagaatctagaacatttcacatttccctacactttgtaatttacatatatagttttggaaaatttgattttaagttttgttttgtttttctttccggttttgcagattttctttttaaatcgataccaaatcaaacctttcgtatacggtttggtcttttttttttgggaagaatatatggtttagtcatttgtgcaattacgattcggttctgttttgtttttttacaaacaatagtctagttagatatatttgaaggaaatcaattttgattttgtcatttgagcatttcatttttggtgttattctattttttcccacccctatacaggcaagcttaggccggttggtgggtctagtagtcacggccactctctagacagcagagaacaatgtgtccaccactacaaatttaggtttcttttcatcaactatccctaacaagaatctaactgctaacattcaaaacacatagactagaaccactaatcatactatcatagtgcaatttcccatccaaaaaaaactccatattagaaatgcaaagagaaaaagctggttcatctccactaatactagacagttgtctcgcattcttttgctaagacttattttctctttcactacaatctctaacacgaccaaactgatcgaaccgaactatctaccaagcattctctgtaaatctctacctgaagagttaaaacacttaaacacacacaaatttgagacagtattagcatctctttgactaaagattgatgatattcatatggcaaaagcatacatttgctggtagaaatgtggaaatcgccatctaccccaggaaacaattattggtctctctctgagaaattttgacaaaacaacacttggtatgtacacacaacatcttgagtctccaatataaaaagcagaactcaatttcttccgatccttaatgaagaatcaacacctttgttctgtccagaagaagctgcagcagcaaagattctagcaatctctagctgagtattcgccattatctccgtccgtttcaaatccaattctcctctcttagcttcagcttcagctctcattctctctatctctttcatcgtctccattcttgctctctctgatctcatcaccacctccgctaaccaccgtatacttccggcgatctcttccttctcttctttatatcttctcttcactttcttccctctcaccttcgttttaaccacaggcgtactactgtctgtatccatctccgcatctttttccggtttgttctccggcttgaatccgtcttcctacacacaaaataacttcattagaaaatctcccaaatttggttagtttaggtgatcagaccttaggaatcttgccgacgccgttggatccgtaagaaatctgcggcggatgagccaccgcaggcaacggcggctcaagtaagagcagaggaacagagcaattcagaggcagaacagcttgaggctgaggctgaggctgagttccacgtaggagatgatcaagacgaggataaagaggccaagaggagccatcagcagtagcggactcagaacggtaccgtttcttcatggactcgatcttgttcttgcactgagtctgagtctttggtgacttggtgtgagtggcgcgtgaggacacgtgtttagccacgtcttcccagtcttgtcccttaagcttggctctgtttctgagaacccattttgactcataagcttcgagtaaagtcgaaacagctccttcgctccattcatcacgttttaacctatctacaacgacggaggaagcagatggcttcttaagcgattcgtcgtggttgagagatttgagattttcttggttagattctccgttctccatatattttttcttcaggtgactaaaaacagagacaaggactcaagagtgtgatgaaaggagaaagaaagagaagattttagcaagtcttttgataaagatgggaaccttttgagagagtgaatggagttaaacatatgagaactgtgtaagaatacgctgctgctctcaaaactaaccaatgagtttgggtacacgcgtttctcgcatgttcaatggtcgtgcctcgtgacttaaagctaatgaaattatgtttttcacttatattgttactgtcattttagtctttgttccaatttatggtttgtataaagattacaaatacaaacagagaaacgcataattgcaccggctttatacttaccttcacaaaagttagtggagcaacccgtcacacacacatactatagaggagaataaagagaaaaatgtgagaaagtgggttaccattgaaaaatagggtttcttttcttttatttgtcaacttgaaaaaaggttttacttttgattttattttttcacaataatgatttcaaaaatcttctgatgcaaatgcttttattcatttagctataaaagcctttttgtatgctttttttctctttttaggtgtatggtggagtgagtctggctgttagcgttgatgtcaagccaaaccgcaaaatccatttggcaaagatgggaatgaacctaatggaagtggggtttacacttgtcactctctcacccattctatgttccactctttttcttctctcatgtttgcgcaaagatactaattcggggttgttcctttttcacttattgaaagtgtatatctttcaaaacattcagaaattttgtgggttagtgttcactaaaatctttggttaattatcaagtcatccaaatattacaagtaccaaatattaggacaagtctttaattttcacaccttttttcttacctatatgagagaagttttgttgtaagagtgaatgtgtttcctcgttagtggagtatgatgaactatgcaacttcaaggcagcacatcggacattttggggtctacaagattatcatcgtagatttttaacgcgccatttagaacttctcagtctcatttgggtgatgaaaatgccttccaaggcataatcattttttgttgacattttggtactttctcatgaagttgatgcatatgattatacttggaagttggaacatatatatatttaaaataataaaggtcctctgttccaggcttattgcatccgcaaattcatgagtacaatcctttttgaacagagaacatcgaaagaaaatcatacgaaagattttacaatcgtttgagaattaacaaaaatcattaacttatatagtttccaaaattcaaaagttcaaaacgcattacgaaatcgaccgaaaacaaaaatacaaatcgataaaacttaggtgcaagtttcacgggaaattccgagcctggaatttggaacgtcgatgagaactcggtggttctgttgctgcatactagcgatgacgttaaggacagagttaacgttgaccggagctgcagccatggcgaggcagctgaggttacctgcggagctgtggatgagaaggttgtctggaggcagagtcacgttcattccggcgaacataaacgtcaccgacgggaacacgacggagccggagtagcatgtgtcgaaacctcctagtgaagttgcgtttgcgttcttaacacgtctcctgaactcgtttctcaccgccacgtaagctggttcgactagccttgtgtagaccgtccctgcgtacattcaaaagtgttttgtaattaaaaatcaaatttcttttctaaaatataatttttatatgaaaatttggattggccatttttgttttgattgtaaaatcatttttagtccagaaatatcacgtgttacgtgtgagagagcagagcaattaggttacttccatcgcacgacttttcagttctcaagcgaaaaataaaaaatattaaggagggttgagaagtccatacccgagtcaaagatggtgccggctccggtggccggatcaaaggcgagtgcacttgtaggaatatccacaattttgtttccgacacgaatcccaaccaagttaacatagtaaagcgatgatcttctagggttctttaacaatggagtggtcttgatccggatcggttggttcttaggtcccaatcttagtgatccggagaaattgctggacttactattaggcaagcaatacgagaatgtagactgataaagattttgtgactgtgagattaaagacaatggaccacgacctaagcccatgagtccttgcgctggcaacgatgttccactagctttgttgatgcacccaaaggtgtagtttgggatgacgtcactggccaatgttagtgtgtcttgtgtcagatatgcttcgatggttgaaccaccgtaggtcatgttgaaaccacatgatttgcttactgtgcaacttggatttggagcctgcaataaaaaaaactctttattgattaatatttagaattttttttgttctttgagtttaacaacgtatttccataaagaattgttttatccatcttggatctggttattaaattgcgctactaacgatgtgttacgttatttaattgcagttgtaagtggcgtttttgtattataggcaaaacctaactagcatgacgacaaagtatatatatagatcaaagttcaaacagtaaaatatgctctactagttggattgtttataaatttcttgtataaataataatatacccgtgacttagactcatggtaccaaaaggtccaaaacccgtgactagacttctcgatcatggtgtaataacacgccaaaaacgaagttcacattcacatcttttgtgtagatggatccaaaaattgacgtagaggcattcacattacgcctgacattcggttcgtatttcggttttggttttaaatttcttgttttgttaaaaataatcaagtccaaatactaaccattttttttctttcgatttgaaacatttatgtatgttctgattagatcttgttttgaacaaagtaaaaatgcgaattatttgttagtataatttaaatgtattttttgtatatcgattttcccggtttattcagtacaaaagtatcgttaagtatgaatgtatgatatgattcaaaaaaattacgttgagtatagttttcatttttcaagtccatccagagaatgcatgcacatatctaatttatacggagggtataactataaagcaatatttagttacctgtttacactgaggagcttcgcattgaagagtacgagaggagcttgacttggaagggtcaaagagaacagaggaagaacagccaacgcagccagaacaaggaatccaagcagcgtcattgctagtgtcaagagccacgagcatgggctgagccggtgtcccgatgttagccctcacgatgtaagtcgggctctgaacgatggcccgaccagaggcgattggaactgatgatttcctaacgccagcgaggcttgacaagtataggaaacgagccttatcttgaagaagtgtatctgcccatgaaacagaagttttgaatggagaacatagactgttaatgtggaacactcttagatctgaggaatggctcttttcattgcagtttatggattcagatttcaagattaagagagagattaacaaaatcaagagatgggatctcattgtttaagaccttgattttgtctttgtggtttctagtgtttgtagagtgaatgtgtgagtgtgtgtttatatagtgagtgatatacgatgagtgtgtagaaagtaataagaatataaaaatgaagagtggggttttgtatatcgtagagagaacagtctgtattccatctcctattttttcgttgtttctatctgttttttgggtccacactaatattggctctcttctctatcgacatgcgcgttgctctccatccacaaaaactcattacccaaggtgttgtaatttttagactcattatcgaatggtaatcaagtcaaactggaagtctagctgattaatcggtatattgactcttagcaaaaaaaaaaaaaaatcggtatattgataaaaccgattctcattctaacaaaatagttacagttttgataaatatccaatttatacaacgataagggaaatagcagaggaacgtgtggagtggtattgtttaagagatccgagaaactgagttgaattttttttttctcaaagagaaagatcaaaggtttcacgtgaggagtagaaagtggaagaccgacataaatgcattatgtattgttgcatattatggaatgtatcaaaactacccaatactcattaccatgtggtgggttatatctcacattggcctcttctccactatgtagtgctgtccatcaattattaaaaaaattaatggtgtaaagtatcttcattgttgtttgtttcttaagagttgaatgtgatatgtcaatatcctctatactaaaatatttgatataatttgatagagttttcatgttgtgtggattgaaccaaagaaaattttgacccttgtatgtagttgtaagtagctttgcttgttcttagtctccacttagtcactcgttttgtaagaaaaaaagtggttgcagcgaaaatataacaaatgtaaaatttaataaagttacacgatttaacaaatgtaagccaaaaatgaatatctcgtcggaaatttactcaaaagttacacgtcttaagcttacaaactcactttatttttccgatcaacattcccttaaaaaacaacattgttttactttcttcttttctattttttaaaatgtgaaatgcacttaaaaagcttaattccttttaaactaatggaaacaaattctttcagtgtttattaatatcaatggatcggataactcaagagtctagataatgaagtaacttatacataaaaaaactttttaagtgcggtttgcataatttaatttgtttcctatttagtatataataacccatttgactaaatatataatactctttcttaaatctttaatactctttttttttaatcccactagtttgcgtgtacgccacttctaaatttatgttagtatcagaccttgaccttaacactgtacaatgggaagagtcccaaacatagtaggagtagtcggaaattagagcatctccatcagtagtctctcatatagtttctcattaactaaaaaatataaaatgataataaagtagaagagagattgagaatagtttctctgcagagaaactttagaataatgattaagagactatgtgtatatgtgtgtttataattggacagaagttaaatcataataaaatatcattatttattttttttagaaactttttgaaatatctcaccaatggagattacgctctcttttttttttttccttatatattcccagtcataacttggagttgtattaaatgtacctacgataaaaaaatcacgtgagaataaaacggagtatttctttacctttacaaaagaaaatgaaaataaaacaattaaacttttaaggaagatcagataagtagttgaaagcctttaatctagtagttgaggactgatgagattaagtagtgagaggaagaggcttgaggaggatctctaacattaatcaaactctctcatcttcctcctgcactccaacaaaatcttctcgtctctctttaaaccaatagcacacaatggcacatgaaacaccacccacgcccagtacaagaaagaggatctgcagcttattcttgatcgtttgtgtcattgcatgtattattggtttggtcgtttttatactcatcaacgaatgcaaacgtccggcgccaaaagtagaattagcttctatggacttcatggtgcttaatatcacatagactcgtcttagtgcaaagtgggatttgtccataaggatccctgcagatcttcctggtgactatatatgtcttcaaggagactttcaagtttcatttctttacaagaatgttactctctttacctcacctccacaaaagtaagctgtttactattaacaacctccgataccgctgtcctcagcttcttaaagtttctgttgttgtctccgacgaaaacattagttcgattggaacatacattatggaagatgtcaaagagaagaagcaagtaacttttggattgcagttttctcttaccgattgcagaaaaaagacgttaggagttatgagttatgcatgctgtggagtcaccttgaggttcgaacccggatctgagatgaaggcgtctgtgtttggaaagcatccaaggtacacaaatttctgaccaagtccacgtcaacaccagtataatgttagagtttgcaaagatttgacattacttaagggctttattgaattagagatttagtttatttgtaaatgactttagatttggttcgactttatttagggtctaaagtttattgtataactgtttaatatttgtcaggacttaatgaagatgtaatgtttagactttggtgtattttgtacgacatgcatgatataataaaggaattatcataattaaattgaacttataaaaatatgacttgccttacttctcttttgaaatagaaattctaatgtaggtaaaatgtttgtgtttacataattacattacatcaacaaacgtaaaaaaatgtttgtgtcattaaatgtttatccacgtactcttcacaacgatcataagtcataattcagaaaattcctttaataaatgtgaactgaataagcttttgtatagtcatcaaataaaaagtcaactgtacaattaaaagtccgcaaacatctcgatcgtctaagagacgacttttctcgtaactttatgaagaatatacaatagtagtggcttgatcgcgtccacacatttacattgcgacttttcttgcatgccgtctcacgcactatatttaggcaaaacacaattgtcttcatttcaagactagttcttgttttctccatattcctcaacaacatcaaaatgttgactcccaccatttctaaatccatctctttagtaaccattctattagttctacaagctttctctaacacaacaaaggctcaaaattgcggttgttcgtcagagctatgttgtagtcagtttggcttttgcggtaacacttcagactattgtggtgtaggttgccaacaaggaccttgttttgctcctccccctgcaaatggtgtctctgtggctgagattgtaacgcaagaattcttcaatggaatcatcagtcaagccgcgtctagttgcgccggcaatagattttacagtcggggagcttttcttgaggccttagactcatattctcgtttcggtagagttggatcgaccgacgactctaggcgtgagattgcagcgttctttgctcatgtcacacatgaaacaggacgtaagtatatatagtaacatgtttcactttactcttttcttatgatgcatacatgcatgttctctattaaataccaaacaaaaacaaaatatgaaaacgttagaacttgtttttgttttctaaaaatcattagactaaataacatgttttactagattagtaatatcttttcatcaaacgcatatagcataatcacttttcaaaatcatagaaacttgactagaaatactttgaatatgttgcagcattcgatctaataatttcggtttttgttttagatttctgctacatagaagagatagacggagcctcaaaggattactgcgacgagaatgcaacacaatatccatgcaatcctaacaaaggctactacggccgcggaccgatccaactctcttggaatttcaactacgggccagccgggacagcaattggtttcgacggcctgaatgcaccggaaacagtagccacggatccagtcatatccttcaaaaccgccttgtggtactggaccaatagggttcagcctgttatctctcaaggttttggtgcaacaatccgtgccattaacggtgctttggagtgtgacggggccaacacagccaccgttcaagctagagttcgttactacacggattattgtcgtcaacttggcgttgatcctggaaacaacctcacttgctaacaaaaacatctatttctctgtatacatatataaaagtaaaaatagacaagctttaagaatggaatggcccattaatgttttgtcccttaatgtcgaatatatataaaatccacttagttaaaaaaagacaaaaactttgagatgaaaacagagaaactttatacacagaatcctatgaagtagtttccatcatttttgagaaagacatggaaaagctttgttatgatcaacaccatagtaatgaagaaagcctttgaagatatgaccacttatagttactgttgcttgataaccaatctctgcttgctcgttgttgcttatcgctgttactctcgtccgtttaaaaaccgccggagcttcaattttccccggtaacccctctctgaagcctctctctgcaattttccacacaaaaacgcaaaattcagattaaaaaaggttttgttcaattctagttccaagattcattaccttgacgagaagtggttgtcggaagtagcgagacattaggggaactctgtttatcgattttgagcttcttcttcctctcagaaggagaagatgaagaacgagttgcagaagaaggaatccacgtgctcttcacgtgagtgacacagttgtatcctctgcttttacaacaagttctacatctttcgaacaaacactctttctttgctctgtttccacagtctctgcatactttctctccaactgtgttgttgtcttccaccgccgcgaagtttaccggaggaagagatggccgtgttatctgcgtcggtggtggagataagagaatgatgtttcgaagacctaacatgtagtctggagtagtactgattccaacggcggcgacggaggaggaagagtgatcaggtgggattgagacggcggcgaaaggtgttgaagatgatgatggttgtggtggccatgagagggaagaaggtggatttgccactgtggcagtagtaataataaaagcgcgtggaggctaatctagtaggtggagcttagctatggaggagtctagtaagagtagtgagaaacagagagagagagcaataaacataagttttttaatatttggggttttgacagagttttgtggtcacatgtaatggttaaaaatgttctgcagaaaatgaaataattatctttccaagtggagtggtccacttcattgggaaagcacccgtctaaaacggctttatatcccactttgtgggtctcctctctatgtgcttaagctttgatgggatagatttcttaagaggtttatttggtatggattgcttgtaacaactacactagaacagaggctatatcacaagaagattttgaatcgaatgttttagtttattaggttttttttttttcatttgagaaatcaaacttagaaacattgcaagactcactaagtctagttgtttatagcattcaacttatatgcaagaacagatttctagcaggggagttgatccttgtagatgttcaaacccgaggtggatgcagtaattgggcatagcctgagagaaaacgaatactgtgcaggcggaatcagaaacttatcgtgaacacatggagtccagctatcatctcccccaagacccatgtgtttgtggtccagatgcacctgcacaatgatcaccattcaaatgacaaagacttaactaacaaaatgacaactgatgctcaggtgtttgataagtcgtttccattcttgaattcaaatatatctggtcaagaggatcaagagattgaggaaaagacaatagattactacctcgatgttttgtcctttgataagatcctcttcatgcgttgcacggtgaagctcaccggttgtataataactagcattcatttgcattagagaagagctaccatatgttgaagcatatattcctacaccatctttgtttcggaatgttacccacctaacatctgttctacctccattttctcctggaacaatataagggacatgcatgtctccaacattgtgttcatatatcgccacatgggctgctgcttttcggtctgggtaacactcaaatggacctttgccataccattctacacggtccagtgttttttcaatgtggaattctatacctacacgtggtagcggtggaagatcagagtttggttctacaaaccaattggtgatgatatctccggaaccatagatcagatatgtcacattgactttgaataaggcatctgactttgaagagccagaagctgaagaaccaaggtaaatgaactctatctctacggatttatcagtgatgctctttactgaacagctttcaacaaggaactccacattatctaactgtgccgctttccacctcgaaaaataactagagtcacctccacctttatcattgtctgtaggtgctcgccaaaagcatggcagtatagcttcgttcataaggagaactccttgaatctgtcatttttgaaatgatcttaagaacagaaacattctcactcaagatgaaaaagtgtacgcattactttcactaaaacatcaaccaagaaaagatcttcaatatcgaatctattttttagttttatgttttgcacttttctctttcattgcctagctagttatatacctttttcctatggtagtattttctttgcaacaactatgtactcagtatacccccaatgcgttaatataaatcaggaaagtggttacaaccggttatatcaaactttagatcccaacaggatcgtttacttgagtaactaacctatatgcctacaatatgtaagacttcttccctataatttttatgcattacgaaattgttttagagcttcgcaatcaagaaataaaacagaaaagaacttaccttccaaccttcaatagtcccttttcggacatttaccattagctcccatgaatctttctggctgatcttaatgaaatctccaacagtttcacaagtgatactagtgtctgtcttttttatcgcctagagtaggaggttacttacaattgtcaggaattcatattttctagcagaacgacgagagatctttccaaaagaaatatgacttgtagaggatgtgggaaatacctgcggtattatttgtccctttgctggtaaaggaatctgcgttgaagacaaaagatgaccggcttcaagcgaacgagtaagatttaaaagcttggcatttattgtcagaaacaattctccagcatttgagtcattccagaaagaaaaccatggacctgacttccactccatctcaaaactattttgtggctttatcacaggaatagagagagtcccagatccaagttcaagaccatccccatgaattgtccagctaaactccaattcttctgttgtgttgaaaaagtaagtgtttgcaacctgcaaagataaagtttgagctacatagatggtattaaaaccaaagccaactgagttgatgtatattaaattgtacctttatcatgccatccgtcaatgaaaccttgattggttggtaacaatgcttaacctcttaaacaacgcaaagacatggtgcaaacagaagaaaattagtgccatttgaacatgtatcatggtcaagtagtcagaaaaagggaaacatatgtgatactttttagatttatgttccttaacttcaatttcttgatttaggaaaatatttagaatttccatttcttgactagtttttttttttaactagaatactttttattaggtactggcataagtaaggatgagatttcgtctgtgattctcatccagggtagagagagagcgttggaggttatcggttctcttttcaatcgagagaaaagctttttaagctttcttatcggctttgccaagagaaacgtttctaacagattttggtgatatagttctaatttgtttctatttcaataaagaagagttttttattttctttcgtgattcttaaactctaccagttggtccgacctaacaacggacaaatgccaaaaggtatgactactactcgaacagagagaagtttggaagcgttagagaagaataaaaaaattctgtgtgaaaagttggatagtatgcaagctggtttgaagaatgttttcgatgcaattatgagtttaacaacaatggttgctgcaatccaagggggcacggtatctgaagtatctcaagaaacatcatcagattctgtcgtggtccatataaacaacaaccactgtgccataaagggtcaagcaacagcgattcccaacttagatacaaaggtagaagcagtcttattgaatctccaacctccagttcctgtgaaacgttggcccaaagttgtttgtagataacaacaaaagttcactgaccttccgcggccttatttggattttgatgaggatgattttattgttttggaagggcttgctttagaatgaactctgagtccagccttgaggacaaggctgtttttcaatcattcaacaatgatacgtattaggttatttaattataattcatattacgctatatacgaagttattcgtttcttttactagagtgctttgcttttaagattgactatatatatatatatataagtatgagatctcggttgtgagactcatccaagctagagagagcttgggtttcagtagaggaaaaagcttaaagcttagttattggctttcccatgaacatgtttctaatgatttagattctatagttcatttgcttctaacgatggaaaagcttttagtttttaattcttagctatatcaagagctatatcaagatgttaccatggagtgctggatgaggagttcggtcaggccatataagcccattgagacagaagttcaaatcattaggctggtcaccaaagtcccctccatatgcccaacgcttaatgccatctgaccccagtttcaatagcccctaaatgatagcaaaagactaattttatgcatggatttggctgaccatatatatctactgcgctcattactataggatcttacctactttatctttatgttacaagaataaaaactttcagatcattgataagagaagagattaagaggttcaatttaattttatgggcttaactattgtatgaagaatcagagtatactaaaatttaagatatgaacctggtcaacccagtcccatatgaaacctccttgcaggccaaaggtattgtcaattgcctcccagtactcatctatattcccgttgctgttacccatagcatgttgatacctgtgttttattaagaagaaaatctctcaagtagacacaaaagaaacatgaaatctaaacaatgatgcaataaattggcctatatgatgccaaatgcaattcaggaaaaatgaagaaattgatctaacatactcgcataatatcaacggccgtgattcattttgatcaagtgcaatcttgatgatgtcccaaacccgcatgtacatagggcagactatatctgtagaacttgttctggaaccaccaccttcatagtgcaccaaccgtgaggggtccttttccctaatccaacctgttccacaagttcaacaacaatagctgtaagatagaatggatatgcaaattaattctccatcagggatgaaagtaacaaggatcaaagcttattcaaagtgttctttacataagctcttacttcagcattttggccagatataacctatagattatcttacaaatataacactgccttcaaaattgaaaagcaacttgaggaaaagaaaatctagtgactataataatacttgtctcctccaaaccaaagtaaagcaagacagacagagataaggagagaataaatataggattctaagagattatacattgaaagcacgataagatataattagtgttcattccaatagtacaaattcaattggatttacctgccatggcagaatgattgggcccatagccagcctcatttccaagtgaccaagaaattatgcatgtatggtttttgtctctttcaaccatcccaactactcgatccagcatagcagctgcccagcttggctcttttgcagggtgcttcagatgcccagagagatcaaaaccatgtgtctctatattggcttcatcgatcatgtacatgccgaacaaatcacataattcataccagcggggatgttgaggataatgactgtttcgcaccgcattgatattatattctttcatcataattaaatcctgaggaacagtacaaggggtaaatcaaaatcccaatagagtacacaagttaaatagtggtgtcctaagtaaaccatggaagggagaaagtagagctggacaagagaaaaaaaaaaaacatgttaccttgaccatgcatgcctctatattcgtcttcccaacacgtggatggtgctcatgcctgtttacaccttttatcacgactgggtgcccattaacaagaagctgtttaaaggcctttgatacttgccgaatgcccacaatgcttgattcagaatcaaggactttcccagatgtatcttttagagttaaaacgaggatgtaaacatttggctgggcacaaaaaagaaagcatataaatatatgagctagtaacgtaaattataacgaacttacatcagaacacaacacttcaaagacacatatcatttcaaacttctcactacatctttgttaatatcatttcaaagttccgtgctaccaagataaaagtacttgattaagatcaggtacgataaccctacacagttttgggtaaagagtattggaaatagataacacttagaacgatacccagcccaaattcaatgaactagacgcatcagaaaacatgagaaaattctcacataagcatgatttcaatccatatttcctaatagctgcaccagatagacaatactaaccttatacattttttaaggtttctcatttcacttctccagactaatacatcactttgtttttgttgtagactatgcatgtctgagaagcaaagccaaaattggcgatagaaaatgagcagcttacttgttcagctgaccagagatttggcgaatccagttttccctcaagcaagtaaccatgaaatccaagagttgggcttggagaaggattaagcttcaaattagccaccttgggagaaagttcacaactaaatccttcagagttgtaccaattttttgtatcaaatatggcagcctctatgatgaagttagaaagaacaagatcctttgaggactcctgcatattgtcaatcttcacttcaacctgtaagattataaacaatgaagcttaaacataaaaaagtgcgcacattacttaagtaataccaaaagaagagaagctaatacacagcgaggtaagagataagtgaaaaaccggaaaattatttctaggcacatgaataagtggaatgtatcaactgaaacaagttctatctataggatatactacctggatgtctgcgtatgaaaagtcatctgccaattttgacttgaaaaagtagtcagcaatgaagacctgcatacagaagttaatcaattcaatggccgtatatagtggagaagatgaattaaaattgacatacactctggttaacgaaactagaggaaaaaccttgggctttgctaacaaaagcacatctcgatgaataccagacaaccaccaatgatcttggtcttcaaggtatgaaccatcactccatctaaagacttgaacagcaagaacattttgttttcccgagtcccatggatagcaataatcagatatttcaaattcagcaggtaacctgctgtcttgactggtttaagagaaaagggaaaattagtttggtaaggttacttctgaactttactgccaaacagaaaataggtgctagaacataaatgaagttgaaatgagacaagtctttgtatctcatgatttgactagaaccctggctatagttaaagatagtattctaagttagatgttttttataacagagcacaaaacactagttttttttcagtaaatgcagtattatttcttatgtcttatgtttccaagtaaatctggctacgttcttaaaaaagagaaatcgattggaagtatagactatattttctatcaattcttatctatacgtttccttgactaagcagtttagactcaagctgggctcagaagacagactttgcctctatatactagtagatgactaaagacaaggacagaacaagatcaataaaatggaggttagtcctcttagagcatatttctcacctgtacccaacagggttgccatttatccaagcaaagaatgcggagtctacagcttcaaagtgaagaagtattcttctgtctgccaaaaagacacaacttcagttcagaaaagcaagggaaaatgaaagatcatacaaaagtagtatcctgggaaagttgttcacattttcacttatacctaacatgtgaaaaggcacaatatttatggtcatttgcataacttgctgaatttagcagctttgctgaaagttcgaaaaagtcttcaaaacctataacactaacttttaaaatatagttcactagtctctctagcagcaagatagttggaaaaggctcgaaatgcgagaggcatgcttatcgaaacaaatcatggcccaatgcagttaataaggaaacagtactgttaaccatttaatagtaatgttgctgttattcgacaaaatatatatctgtacattagacctggtcatgtaagaatgtcaaagaataaaacttggtaaactaatcttatgaaagatgaaaagattcaaagttggctatttccatccaaattatatgaaaacacattgttctaatcctaatatcaggccgctacatagataatgaaattaacacatgtaaaacgagagtatgaaaagatatggaacataatatttattttcattagttaaatatgtttacatacccttccattctttgggaatctggaagtaggttctgtagcaaccagtaggattatcctcaggaacataaggaggatcattcgggaaagggtacaccacattcgtatagataggccgatcaaatccatgacactgccagttggaaggaactgtagaacgaaagaaactaattgaaaatttgctagacaccagaagattacataacagtaaccagtatgttattgacggaagcaactctcatattacagactaatgtaccccactatcacaccttcatctatattctaagcattacatgaatacatgacaagcaactagtataattgattgatctcaggaatcaagaaaatctaaataaactgagatatgaaaactgtagagaaaggatcagaaactgaccctgtaaagcattccagtctgaatcagaaaaggcagcatcataaaatttgtcaggaacattagcaggtttaggagccaagaaaaacttccagtaaccagataaagacttaacaaagggcaagccgtcaacccaaaaagcagcgctatcaagagcagcttgaacagcatcatcattccaaacagcagattttgatacggtgagatccacgttgttccgctgataccagtacctcaaagcccctatacaatcacataaaattttcactctcccctgacttactgtttaataacaagtcaaaaccacactcaaaacgaagatgaattgcagctatacagaatttaaagacccgaactttagctaccatgagcacggaattggtaacaccagaagaatttcaattgaaaaggatcattctttacaaaccaattgttccaatttggtcaaaatctctcgattaagtaattgagtgagtataaagaagaaagcatgaagttttaggactgttgggtaccttggacggattcatggcaacgcaaggtgacatgaggatctctcttacgccatttgaaaagggtctgatcctcccaaactctatacccattttcagatggaagaatcatttgggtcgctaacgaaaccatgcttacttactttactagctgtgaatttaaggagaatgaatgattcgtcgcgtaaggttgccaaggaaggatcaaagtcgatccatttttgtgtgatttgtcatttgtcgatggaacataagcaacagagaacaaattcactgagaatatccaatcctactacttcacaaaacgacaaatgccacgtggtgtcgtgttcgcatgattacgtctatgatcgagtttgagtcaacgaattattgggctttcgatatctgtcaaattttcattatatgatgttggtaatgaaaggacgagtgacttttaagcccaacaagacaggcccatatctatataatcttttttctcggtacttttttttcttttaatgttgtaaaacgaaattaattttttgttttctacgtttaatttagttgaatgaagataaagattgtaattttcaaaatctcagtggtaagtgcttaataaaaacacactaaaaagccaaacaaaaaaaaagtgtacacacaacatgtaacatgttgttcttaattgtaggtcacgccttcaccatcgataacttgtccgatgcggtatgcaacatagtcgccattctcaacttctcccaatattctcaaagctgcctcaaactgtccgatccttgattcgtctaatgagttcagccccagcatcgatattcacaccagaatctttgtagctcagactatgatgagtgtcatcatctttctttgacatggataaaaccaagatgcccttcttgttcttgtcgtattccgaggaaagacgatcgagtcaggtttcaaggacgaaacaacggaggagaaacgatgtccattgaagaatttggaggagaaggcagtgtcaagggacgaagtctgcataattctggagtccatggccagaataaaacaatataacaacaagcttaaagtaattaactcttggtaaacttttaagccaacaagaaaagaacaaaacctgaggcgacgttgaaaggcactggagtggctttggtgtgagaagcaaggaagacgtcggaaatataatacatagaagtaattcatttactctttcagtatatcccatcgttttatttttgttttggattaatttgatcatttactcttaaattttattaaataatttgagatatatcttatattttttttaatgaaaatttcatcattaataataactaaaaaaaaaactttcgatctttgaacatattattttggataaaattttaataatataggaagtaattcattcgttttttgtttgtttgtttggtttacagcatctaaattagtttagtcatagcatctacacttatataataaatgcttatattaaacaaacacatgcaatagaaaaacttacctagagatcagaatcaaatttcaaatataaaaaaggcatctcggtgatcacaacgatctccctacctgtagaaaaacgtctagatacactcacaataatctcaaggtgcttccactagcaaaatttgctcagccatggcagattcgacctccctcatcaataaacgaaccaaaggaggctggaacgctgcccttttcatcatcggtatactgaatacactcacggatttggatatattttctttctaatttcatattgtcgagatggtaattcattaatcttttgcagttgtggagatagcagagagatttgcgttctacggtcttgcaagcaacctaataacgtttctaacaaacgaacttggccagtccacggccaccgcagccaaaaacatcaacacatggatcggtgtttcttgcatgttccccattctcggggcgtttctagctgactccatcctaggccgcttcaaaaccgttctcttgacctctttcatctatctcttggtctacatatcgttaccaaacctaacccttgactcatttttcaagatctcaaactcaaactcggactaatatgaacacgttcatcaatgaatttcaggggattgtcatgttgccattgtcggtgacggtggtggcgcggcggatgagagaaaaagtgttctttatggcattgtatgtgatggcggttggagaaggagggcataaaccatgcgtcatgacctttgcagctgaccagtttggagaggccaatgcggaagagaaagcagcaaagacatctttcttcaattattggtatatggccatagtcctcgcttcttccatagctgttcttgcactcatcttcattcaggtcttttacttttcaattgtcttaacattaactctatttttggttttgtaagaatattagctttagtaagatattcatatgctggtttcagtaattattcacgttagataacctaaataatgtagaaatatataaacgtaaactttttcatatttaaaaattggttggcataataactaacatggttggcaggaatacaaaatttatttgatgatattatttttcagttttatttttcatttttttccctcacattgtgaaaaaattatcgctttttaattatatctcaaatcaaaccattactatttttttttcttttttcacaggaacgagtgagttggtcactaggattcagcataatagcaggaagtgtggtgatagctatagtgatatttctgataggaattccaaaatatcgaaaacaagttccggtgggaagtcccttcacgagggttgctcaggtcatggtggctgctctgaaaaaatggcgattgagctccacgcgccaccactacggcctctgctacgaggaggaggatgagcacaagttggagtcaacaaattctaatcaagtatatcttcttgccagaacaaatcaattcaggtacttgctttctattaatatacattttatatcaccactttctatttatatacattttatatcaccttaatttcaactatcatttttgtaatataaaacttgatccgaagtggtccaacatgctggttttgtgggcacatcatatgcatcttaatgttaatatattagcataaagtatgacctaaattacgtcgtccaattggaactgagtcgttggagggacacctgtttctctatcgattaaatatgtctatgtgttaattaaaacaccatagagaggattgcgttgtacatttccagctgctgaaatctctttctttgactttgcagaattcttttatatccaaatttgtatgattttaagaataaccattttctctagttttcacttttattattctaatgaaaacctatgatatataatatccggtagagaaaactttaacacttttgtttcacacaacaaaaaaaagctaagaaaacactaacacgtttatcaatgatttgaatgaattatgaattttatgatacacatctatggatttaaacccgaaatttgacacgacaagaacactataataatgatgcaatatctgttttgattacatcaaaaaactagataaagatgattattcggaggatttccaatattcctctctttgaacgtgcatgggaccgtgaagtttcttagaaactgtactaacattttttaagaaaaataaggtaatagagtatacatttaacaagcttttatcattgtgaaaaagtattattatcattctattactgaatgaattcgtacaatgccacgttcataagttagctggatagtgacactaattaattggtgatcctgatttggaacatgaatatagtgttctgattcagaaccgaagaaaaagaaattcaagtaagagtacgaaaaaaaataaaaaaatttggcatatgcaatcacttttaaatttgtaagtactaatttattttgggaggtgaaaccattccatctaatagacactgatcagaaaatgtgtttagtgatctactactaattttgggatatatgaattttacatattgcagatttcttgataaagctacaattattgacgagattgatcataacaaaaatagaaacccgtggaggttatgtactgtgaaccaagtggaagaagtaaagctaatattgaggctcataccaatttggataagcttgataatgttctgtgccacactcactcagctcaacacattctttttaaagcaaggaagtatgatggacagaaccattgggaatcacttcaccattcctcctgctgctttccaaagcattgttggtgtcactatcctcatccttattcctctttatgaccgagtttttgtccctatggttcgtaagatcaccaatcaccattctggaatcacatctctccagagaatcggtgttggcttatttgttgctactttcaatatggtaaagtgaattatgaattatcctaatcgaattctatatatctatagactatagttgtccctaacacgttttggtcctaaatagactaatcttaatctaagcaatcaaatgaatggcctaagaatttacggagttctgttttataacaggtgatatgtgggcttgtggaggcaaagagacttaaagttgcaagagatcatggattaatcgactctccaaaagaagttgttccaatgagtagcttgtggttactgccccaatacatactagttggtattggagacgttttcactattgttggtatgcaagagcttttctatgatcaaatgcctgaaactatgagaagtattggtgcagcgatctttattagcgttgttggagtcgggagttttgttagtaccgggattatatctaccgttcaaacaatcagcaaaagccacggtgaagaatggctcgtcaacaaccttaacagagcacatcttgattactactattggataatcgcatcgctaaatgctgtgagcctctgcttttatctgtttatagctaaccattttctctacaagaaactgcaagacaaagatgatgatgttgaaagcgaaagataagtttgatcaaaaatgttttgtttgaaatgatcggctttatatttatcctagtttatatccaaaaaaatatgtaacaatgaactgttgtgattacaaaataaacctacttttcttaagctaattggtgatcttttaaacctgcaagctgcgaagctgcaaattccattttgccatcggatcggacaaagctaagatgagacaggtaattgctttctaccaaatcatgtagcgttcggcggctccgtgttgtctcctgcttcgcttctatgtaatctccactcaataatctatcactcttttctgcatcctgcttaaaacaatacacatgggacatttgacatgcaaacgatgttcagactttcaccaaatgcataccaagcttttatagtctgatgactaaataattacagagcaatgaggaaaaaacaaaacaaaacaaccgtacctctaggaatctcatcatttgttcttcaatcgtgccacgcatggttaaggtttctacaaaaatagggcgctttgcgcccatccgatgagcacgactgatgacttgctcttccaagctgctcatttgtaaacattgtaggagtcagcaacaccatgtaatggaaaaatatttgaccagatatggaatattaatataaaaggcgttgccgtgagacaccaaattgtgaaccactcaatttagcttttagttttatccatacgagataagtatatagaacggccaaatgattcactccagaaactccaaaaaagtttaaaacaaaatgaagtgaaaaacagaagatcatcaagtttttatttgttactgattttttgtctgtgtttgctgaatgtaaaattgctcaaagtcgtaccttttatcccagattggttccatcaggaaaacatgtgttacaaaactcaaatcaagaccaagggccccacttccatccatcaaaagtgccatgcaatcagcatcgttctggaacattgccagagctttcatctgaaaagttgaaatcgaaagttgtttgacttataaaggattgcaagatgtgagaaagaaatacaaatcaacagacaagtaccttattatacgactgcattggactgtacattttaccaaacttgatgccagcagttgtcaactacaaaagcatgatataaaattgatcaaagcctaaaacactaaggaaaaataaagaatgacgttacaaatacaaggtaattcatacctgttgttcaatcacgtgaatatgctccagaaattgagagaaaatcaatactttatcaacaaataccatctgagatccacaatcctgtccatgtaattctttccccaaaaaggcttccgaggtacctgggggattgtcttccaggttgtcattgtcagtcttgttgaaagacaaaatgctttttttattaccctcatgtaacttcctcagcctgtctacgagataactgactttactgctggacgtagattgccagtcaggattccaatcgtcctgaataatgaagtaatgcatttgagtataccattccaggaaccaagtcgttaacttataagatggtttatacgcatatctacctgcttatatgaaggctgtaactcaataagatcctttggcacaggccactttggatttggattttctggtcgcgccaaagtttcaggagtttgcatctcatataaatatccacaaccagaaatagtacacctttcgctatcaagagcaacacaatcaaggcacaacaggtgtctacatggagtgataacaggaagtcggcaccattccccacatctatttataagatgagaagcaaaagcgaaattagatacttgtggcaaatgccccaaactaatgaaaacattggatttaagatataccttttacagttacagccaccaataaggctatcttgaataaaagagtactcctccgtccaaagatccagatcattttcaagtaaagcatccattgtctctttaatgtcatgaccagcgtcggtcatttttatatgcccagccacacagcaagatagtctgacattactaatggtaatgctccgaaatttccactgtttagagttaagcagactttctacatgagacggatcattccaatcagctaataagatattacgcctaactgtctccactagttcattgtagcttcttgcatgccctggaaggaaattaaggtatgtcaccttcttgatacacggaggaatcatctgcagatctttctttctagagcttatcatgcatctctgaagcagctgaagtaaacgcaaacgaccctcctccatttctgcttcaaatggtctaaggatgccagcttcccaaaactttggattttctccatagacttcctcgtgaagaaactttaaaagaggttggatatgtgaaagctggctatttggtgtgttaggggttggtgttcctgtcaatagccaacgattacaagctgtcagagaaacagccatctgaaatttattagtcaaactgacactagaaccaagagtgtgtccttcatctagcatgaccctaagccaatgcacttggatcaatgggcttttcttccggggattccattccgcacttaagcgactaaaagttgtgatcacaacatcataatcccaagccaagctgtgtggagaaagctctatatggtcagcccaaacgagaatacgaagctgatcagagcaaacatgtttttggatttgtgttaaccaatgattaactaaatttgtggggacgacgattagagttgcttttgacaaatacagtctaaatgtatccagcggctgacagagagcaactttgagggcaggtacatcaaatactaagttctcaagaaacttcgggtaaaaccatttggtgacacccttttcaactctactcttaagaccaaatgctcgaaatattctctggaacccaagggcatctaattttaaacccaacactggaccaggtaagccaactgtttccatctgtgagagcttctcaagagggagtttagcaagccaaattaaggctttctttacggttgagcttactgaagacttgtgttcccgaaggacactcgtgaagaaagagatattatcactttcttccccagaggctcccttagtataaaacccttgcaagtattttataggttgagatttatcccataattcttcaggatcattacaactttgatatgcagggtcattattgttgctacaaaaccatgcagaaccagtaacagatacaccttcatctattattctccgccactttgagcaagaatcacactgcatccaaatatcgctttccacatccgaatcagtaagaccctttctcttgcaacctgttatcataccacatttcttccaattactgattcttttagcttccatcacttcagagagctcagatgcgccattatatgcaggcaagagattttttctgacattacccaagctctttctacattgagcttttaaatccagggacgcagggatgtgagtttcaaattcgttttcaaagtttgaattcttagactccaatgtttgatcatctggatccatcagcctcgcttgcttaaatggcaacgattttgactccagcagcggacgaaaggcttcaaaagaaacctggtttcgacagctacttggactttgaaacctctttacagcagacatgctgttagaagtgaactggtcactcgtgtactcataataggcacattttttgtcacttttgtgggtacaccaaacgataggaagtccctcaggcggatcagccattgttccctgcgtctttaggataagggataatgctgttattgtctttccgagacctggttcatcgcagaacattcccccacggaaatccttgaccatgggagctgcctcagtgattatatcaccagtcacagcatttacgtagaaactaaacccatcctcagtatcaaaactcaagtaaaggggatgcgaggaaacttcagctttcctctcacgctccagcatccaaccaactgctgcctgctgatgaggaaagagttttagattcatacatggcacaattagagaggtcaatgatctgaagagacggcagactgctgcaatgctaaaaagatccttcgtgtcaagtttcatcagtatgctaatcaaaacgtcatctgagagatcccatacaccagatacacaagagtcagtagacggcaatactctagaagaataagacacatcatgatttcctggactgggcaagctcttaaaaatttcatgtagtttaaataaccgtctttttggagaatttggggcattacagagtaatttgcagtcaaacacatgacagtcagatagatcccagatggcctttattcttccattggcctcttcccaaatactttttccgtcaaggattgagactctcagtccccagtcacagctgcaaaaaagtggaatacattaaaattgcgagagaagtatctattcattttacagtgaacctaactgacatagctcaacagaagaagtttacattcatgataacaacagatgcatacccataccatgaaattgaacatgtccatttaatctctctaaaccaagcaactacaatttagaaaactattctagcgatagagagattactcaagagtccaaaagaattacctcaagtgcttaaacaatgcagcagcagtagcttgagatttaggaaattgccatccggaccacaattcaataggcaggtaaacatcaactaacaccacagctctttcttctccattctcacctttatcaaccttcaccacacgacatataatcttcaagcatttattagcaaccaaagcatgaagctgctgcactacacttatacttccattcaccatacctatactctttaccctcttccttccctgtacagtcttctccttgctcccggataaaactcgtctcttcgatttcggagtctttcgcttaccactactctctccctcaacgcacttacggcgtttctgcggagtctccaatcgaccgtcttcaattgttccggaattctcaacatcatgatctccttttgacgaaattagggattggagattagagatgggattagtgagggataagatcaagccattttcggatttgaaaccggtgacggaaccatcattgaagatgaaacaagacgagcccgattgaagaagatcaggcgaatcgacggaaagaacggtacagagaaaaccacagagtttgtgatcatcggccatcgccgccagaaaaaaaaatttataaggctttgtagatttgctttaggaaaatctcatctttctcttcttctgtttcgagtccgacctctgcgaaagaaaaagaaaataaatcgcaatgaaattagtcaatgactaaatagggtttatgttttttaaagaaaaaacgggaaaaaaatcttatttgttattgacttaattctctctcatccagctcagcaaaacaatttagagagtttcacgtgtgtttttctaaccaatgagatagctacacgtgcaccgttttcaaaacaatggatatggagataatgtttatatttaaattcacataaattgatctaaacgccgtcgttttactaacataactactaacaaaaaaaaacgacccaatagagtaaacccgtgtgagactttgtgtaaaacaagacctgcccatattaagcccgtgtttttttggatttggaaaacaatttgtgggcttgcaattttatccgggttttgagtacccagtgggtttaagcccacatagattgatataaacaatttgtgggcttacaatcttaaaaaacaatgtattaagattcaagactaatcaaaatagcaagttagttttgaagttttaagcccaatagaatttgaagttgttttatgatcatttttgagtaaatgaaatagcaagtctgtcacttgttacagaagtctttctacacttgaaatcccttcctgagtacttgagtatttggcaacattttcacgcacatgccctgtgtgtaagcgactgtaacttaacctgtaaattagtctttatattatctcttcgtgttttgattcattacgtgatttgagttacatttgacaaaatgcctcggccaaatccaaaggatccagaaattgtgatcaaccgtacaaatcatatgagatcaactactcgccacgcttcactttattattattgagaactgagaatcactcaatcaagtaaacaatcaacgagacatgagtcttaaaatccatcctcacataaatcacacaaaaactagcacaatcttatagcactagaacacaaaaacaaaaaatctcagccatctctcaggatcgaatctactgagagcatttctccaagtatgcattccatccttgaactctatactcatgagccgtctctgctgggttttccgcctttatgattccccgtcccacgattataatatcacttcccctctcagtaatcacctaaaataaaataaaagagcaatcaacattatatttcagactagaatactaacaatggatgtaagataaatgtggtaaggttgggagagactcacagagtgtggagtgttatactgctgaccaagtgcatcaccacctttcaccatttgaacaccaggtgttgcatgaatcatagacggatacacatacccgcatttccaagatgctggattcaccgagatgaatcccatcacaaaatcagaatgagcgtctgcgattttcacagctgctgcagtgtagtctcctgtagccaggttacctgcagagctcatttcagcaagcaaaagcaaacctctaccacgaggcataccctgcaatcatataggaatgcaacaaaacattagaaaaacaaaagaatctataatctggtaataaagagaaatgaaaaataccttcaatttcaggccatccacgattcctggccccgatattacatgagcgttgataatatcagcccactccaatattttaaagatgcctctgcgaacaaaccagaaaaaattggcacacgaaaactcgaaaagacttgaatgaaagctaagtgacataatgtagaaaaattacccttcatactgcatagtgacagtgttaccaatgtctgcaaacttgcgatcctcaaatatgagaaatttgtgcttgtctgcaatctaaagtaacaataaacaatagatcaatgagtatcaaagagaccaattaatcagtaacagacatgagactcatgtctattgcagatattacaatcttcacttactctatataactaaacctatcaaagaaacagaatttcgaagatgtgtgagagcaaattagtacaaaagtaattaccgcacggagcttagagccaaagtcaggggtgaaatcaggcagtatatcaacatgagtcttcaagagacaaatctctggtcccacctgcatcaacacaaaacatttggaagaagatgtcactaaaacataattctaatgaacagtcttcaaacttcgataccaagaatgatcctaaccttatctgcgatgtcaagcaattcagcagcagttccaacatcagcagctaaacaaagattggtttccttcttcaacataatatcaaacagcttcttccctgtcggattcttagaaagctcagacctttccttgaaccccaaaaccctaggcttaggcttaggtttctccacacttggaacactaaccctacgattctcttccaaaaacttaagcaaattcacttcaacctccacttcaattttccccttttccttcaaaaccctaaccatatccgtcaacataatcatcgaatgtaacttaatcccattctccgctagattctccctacccccttgttgcctatcaatcaaaaccaccgcgtcactaacctttaaccccacagcacgaagaggagcagcagtctcgagaacagaagcaccactagttacaagatcttcaattatcaaacaagtttgatccttttcgaagattccttcaatagctttagatgttccatagtctttaatctccttacgccgcataagcatagggataccattggaaacagagacaacagtggcgatagggagagcagtgtaaggaacaccacagacgacgtcgaaggttgcagaaggtggaagagaagagatgagagtttgagagatctgtgttaagagggatggataagagacgatgagacgaaggtcgatgtaaaccggagaaaagattccagatttgagcttgaaattgccgaatttcacggcgccgatttcatgcagctggagaatcagtgcttccatggctgacattttttcttctgctgcttttggaatcggagaattcgataagcggacttggaacgactgcacactggagagtgttggctttatatactttaggttttgtcttatttttggtgtttcaatgtttttatttattttaatatgtaaaattattcgtatttatcatcttttatgcattcagttttcgttttattttcctaaaaaatctactctgaatatgtcattttatttacattttagaaatactttttcattgtatagaatatttttttgttgaagtcattgtctacaacaattgttgcaatttctttactataataaagctgttttctgttgcattgtttgaaattctctctaatattttttgagagaaaaaaatctctaatattttgataacagtgaagaaagaaaccatttatcacaaaagatacactaagcagaaattataaaaatccaattgaaatgaattcggcaattcgtcctaaaaaggacattatttctgaacataataagcatacaacaaaggacctgtctggtcttaaggggaaacacaaagtacaaatgaagatggatcatttcccatcatcacacagattactaatgttacagacagaagaagaaaaataaataaaaccagcaaaaatcattcataatctacatcaaaccagaaatagaggtaagccttggaatacatgactcgaacacgctgcagaaccaagtctccccttgttgaaacagcctttgcacctccctcgattcttgtctgcaaaacggttacactgtttgctttaatctttccagtaacagtttctttcacttccacatggcttaagatattttcaatgtcttcatctccagcagtgctcacgattgggcatgagagatgatccaaagggtttgtctcacattgaagcacacatccatcaatcgttagccttccactcctatgaagcaaacagcacccgagctctgcttttactgttaaattcgcaagcttgcaggttgataacagttccagggcactgcacaataaacccaacaacaaaaagccgtataccaaagtattttccttttctttaaacatcaatgggaaatgcggtattcaacaacttttaagaagctaaaacctcccagaaagaattttgaaaacaactgtagagaggaaatgtcttaagagggaatatgagttccaaacctgtctgaaccacgagcacagacgagggtggtttcatcaggaatctcgcctccaccgacctgaacaaagcgaagataatataaaactgagactactatcgaacattgagacttatgtatcaacatcatcctcaaggcatctactttcaatagcttaggaactcctttcaacctcaaggcgtacattcttccacttaactgaaactagggacactgataagccaacccctaatctacactgaggtattctaggggtgtgcatccatacattcatgataaatcactcatatttctgcaactctatcttttcatcctaattcatacaccaaggtctactttcaatagttttcattacagcttacagtcattccatgtgttgcccagtatgagaaaaggaacattactgataggtaggtggcaagtgcataaaagactttgaagtcgaactgaattctttttttcgagttctcacgacagtcaaagaaaattttagtcatcaagttctagttctttaacactcgttaaaacgtccatgtcacaaacagctcgtgcttagtttccagttgtggcattgaaagtaattgtgtgcaagcttaagatatctttcatttctattttggtacctaagacgtggcattgttttctctggatctcttcaatgcatactgatctcagatgccgagacctatggcatggaatggaatctccatcctcatgagaatagatatgttaccatatgttcacatgtttcttggatactacacagatgttggtataaatggtttatactaagtcctataaattatttttcactacttgcgatttttgaagtctaattttttttggcaagactcaagaaacatgtgaaagtagaccaatttcacattgccatttctagagaaagttataaacgattctttcagaaatatcaagcaattacactagacatatattctttgaaagacataccaggcaaagaggctttttaatctgaatattagaaacgcgatagttcccaccggctactattaaaatggtatcgccgggtctagaggtgacaatttggttagatttatggacccttttacgaataacaaagaagtgtaaataacgtaactgataatattacaaaccttgctgcagatacagctgactcaatgttgaggaaaactccaggctgagataaatccttgacaaaacggtcaacacggagccacaagcgagggtgacacgccagatatctccatctgtggcaaacgagtgctgtgttatacctatctgcaaactcacaagagatacacaaaacagcattgaaacagactgtagtacgcaacaaatgcccaagtcaatcatacaaacaaaatacgaaattttcaaagcttcacacaacaccatacagatcaaaacatagcaattcaatacaaagtcaaaagctttcttgctgattctgttacattactacaaagctgtatcacatacacaccaagtcaagagaaacagataattcatcatggagattagaattgaattcaattatgatttgattaggatctgcaaagtctcaaagtagtaaatttgagacacagaaccgtcattaagatgtgaaacagttggtcaaattttctaaatgaattacaaacaacgaaacaattaaaagcagaattgaacaaagaagtataaaagtatgagaaaaccaaagtaatagatgcgaaaaagaaaccaattttacctggaattggagataggaagctgaggatatgcataaggcaaccatcgtcgagattgttaagagacgtgagagaataaggtttcattctcttcttcatcttcgattcaacaattctctctggatgcttcttattgtcgagctttgagatctcatgtaactccatggccgctttaggaagtatgaaccctaactcgtcgccgtcgttaataacagccgactcaactatccattgacgtcatctcgacattggttatgtccggtccaacaaaaacatgtctttatgacattatggttatgcttttttggagttttcttaaaagtaaaattgaataaaaaagagaggaatcgtaaccgttggttgattaatgcaatggacagtccagatgtattttagtaaggggccagccgagaagtctcaagcacaaacaacactctctcttgtgacaaaacaaactcataaaacctttctctcttccaacagcaaaactctgaaattgacagaggagaaaaatggaggagacaatggccgaagaagggtgctgtgaaaatgttgagtcgacgtttgacgacggtaccaactgtatttcgaagactgaggacaccggaggaatcgaaagcaagaggttttacttggctcgcacgacagcttttgagatgcttcgcgatagaggctacgaagttaatgaagctgagctctctctcactctttctgagtttcgttctgtttttggtgagaagcctgagcttgaacgcctccgtatctgcgttcctcttcgctcagatcccaagaaaaaggtttcagcttttctttgttccaccgctatttttcgatttgggtgttactttttgtttttaacagatgaaaatgtgaaaaaggcatcaccttttttagattttgggtttgcattttggtttaacgccttcaaagagaaaaaaaatgtgtaaaacgcttaaacttttatcgattttgagcttccagcttgggtttgcgttaaaacagaagaaaatttgagaaatgcgtcgactttttagatttagggtttaaccttggtttaaatttgccttaatacaacaaaaagatttcaacttttaattatagggtatttttaggataagactagtgagaactgagaagtatatgggtttatcttcttctttccaatgatgtgtggtttgcgtttggtcttgttctgtttaatttatagcttttggtatatgttttggaaaagctgaagaactaatacatacccatttttttcttgggaaccaagaaaatttgttgtagcagtaaggttcctcgcatggtacttgtgttgtaacgaatggcatattgctttaactttataatgggaaaggatgggatcatattaaggtgtcattaaaatgttatgtttgaacagctagttgagatgagaatgtaaccagacatattctcatgcttttacctgtttttcattaagcttattgaaatggttttatgcagatccttgttgtgttcatgggaactgaaccaatcaccgtgaagtcagttcgtgctcttcatattcagatttccaacaatgtaggcttgcatgctatgattctggttttacagagcaaaatgaaccactttgcccagaaggcattgactaccttcccttttacagttgaaactttcccggtcagcacttatctgttttcctacatgatgaaacattatagctctggatttggattgtcttgcatgatatctattgaggatcatgaaattgagacctgaattggaaatacgttaactgaacagttacatgtttatacttattgaatatgccaacagattgaagatttgttggtcaacatcacaaagcacattcagcagccaaagattgagattttaaacaaagaggagaaagaacaactgctgaggaagcatgcacttgaggacaaacaggtctgtttatattctgcacaaagcttctttgcctatttgtgtatgctatgttttaatggatgtttcttttccatttcagcttccttatttgcaggagaaggacagctttgtgaggtactatgggttaaagaaaaaacaggtggtgaagattacatacagtaaagagcctgttggggattttgtgacataccgatgcatcatctgaactctgaagaaaggcaaattcgttgcagctactctatgattaactaagacactcctgttacctatttcttctcctcaaaacagtactttatgtgtccttggtgtgtgcttacaattgtattaagagattgaatctggtttcgaatgggggaaaaacattgcaaactacacgttttccaaaatgtagttgtcatggagatacgtataacaaaagaggttttcgaaaagtaacaaaaaaaaaaaaatctaattacaagaataagagcttcacaagaaaggagcagtcaggagattgtttcaagagacgcagaaagatgctgtctagtctgcagaaatacccaaagctcctctctaacacggcaacctaaactgattgaaagcaaaagcaacacctgcgtattagttacaatctgtatacaagctctatgcacgtatacaaaagggcatggaaacgatttatagagttatagtatggaaataacaaccttctaaatttcacaattttcttttgtttccttgggatgcttcaacaaccctctcaccaacagtactactagatccagagttgggtgcattccccaaagcaagtgaatctgcaggtccttcttccttttgagctttctgcttagttaagtgagtctctcgtatgctgcatttaggaaaattccctttttcttcagttcccatcttcgaagaagcgggtgattctggtccttccattcgctttgccgccaacatatcaaaaggcctatgaaagagcaaatgagccacagttctgtctgtggggttggtcactgcttctgtatctggcatcccagcatatctgtaaatatcaaatacaaaagctagttatgtaaaccacaatttgattgatagtgatgatgaactcggtagcatttattaaaaaggttaacccccatttacgaaaaagtatgcttgtagttttactagtttacattgtctaagtacgaagttaaccatattgaataatacgcataaatttgcttacctatatctggattcttctctgggaatgacttcctggtcatcctggctagtcttgttactgtgggatgtatcactagtgtaatgtctctgagctgcactaccagccaaccggaataagctatcccgtatacaagtccgtgttcccatatccaactgcaggtcaataaagagtattagtttactcccaacacaaacataacaagtcaatcaaccatttgagtacctttgctacaacatcctgaagccgataaagaactgcgaattctgctgaattatcaacagcagcagcaaatttgccagaatcatcttgttccaaagatgaactaggatcaaaggaaggcattgcagttagcccttggagattagttttgtcgacaagctggagtggaatatcttggagacagttttgagtaatggattgatctgctacaggcacctgatgagaaaattgctgctgttgtctctgaatggcaagcattgcctgcatttgctgtctgcgtctaagtttttctagtttttcctgtggtgtcattgttgaaggccgtgcagaggcatctgttgccatgtttactgaggtagcagtagcaggattgtaggaaggatgcatcaactgattcctaacatcaggatgttggacggccgaaattacaggcacactagaatatggatttgcaagattaccaaaagcagaattagccatgtattggtttggcatatgtgaatagtgtgatgtcccagacccctcagactcactcaggagattaacagccatcagagacgattgtggcggtgccaactgatttacacattttccagctgaattactaaatggaatcctctgaccgtacagctcttgaaagggccttgcctcagaagtcccaggcattttcgaaaacttcatcattttattttgttgatatggctggtcagaaaaaggaaaatgaaacgaaaaaggctcagtggagctgtacaaatgagaatgcataagaatttgacgacatagttcatgctacagatccacattggcagaaactaggtacatactttcattcaatttatcataaacgtgtgagcaataaccagcagtctgctacgcatagtacctggtcctcaactgagggttgacccttatgctcacgatattggtcagccttaagagttacacgtacacttgggacactttgggatgacagaccattggcttttccagtcaatggaaattgctggttctcttgttgctcaaactcagttctaatatccaatcctagatcttgagagtccaacattgatgataatgattttgggctattggatacatctttagaagatgaccataactcatcaccaccgctgagactgccatcaccaaatatagggacatcattgctgcaaaaccatcacttgtgaggatattgtgttagaggccaatgtgcatgaaacaaattggacacaagaaataaggagctagtatttttttcattattacacctttccaccatattcacatctggtatcttatagttctaagacgaaatcaagtcagtaaataacacattttatacatggtagaaaaggagtatgtcattgaaaagttaccgcctagcacagtgaggatgagaagtcgttttacctgaacattcgatcaagatcatcaaaactaccaatgttggcccagctgtagtcatcaaaatcaccttgctctttactctcatcagagctatgaaaaatatcagggcctttcccaagttcagacgttttctctggtaaaaacagagtgagcacacaacttttaaaatgattagattggaaagaacgtacccaagtaaaacatgactgtttcaagagaaacgcaccacctcttgttgaatcatatctgactggctcagctaagcattttgaaagttcagtcgcactcaaatcttgatcaacctttgtagcattagttagcgacgtgtcaggccatgagctcatacagaaatctggctgaggaagcccctcatcaacattatggctcgaactgctccccaaatttttatcatggaggtcaattttagtcccagttatcttttgctcagctgtcttagattcctcaatctgttcctttttgttaagttgttcacttctgactttaaaaggcacaatatggtcgcctgtctcagcatcatcaccccatatcatattagtaagctgaaaagtaggttaagaccataaaacaagtagggatcaggcacaaagcaagtattaacaacaagccaccaaaactaaaatatttaagaaccaatgatactagagactgataaattacaggatgagtgattcaaaacctgatcgttaaccaaatccataagaaaacagaattatactgattccacataaaaattcgtatatatagcaacagaagaaacttacctcttcttcttcccaatcaaacatgactggagaaacaaaatcgaatcacagacccaaaatcaagctccctgattgctccacacatcgccagctccacaacgaaaaaaatccaggaaaaaacaacaagatcaacaaatcggataacgtaaatccacacacaataataaagtggaaaaaacgataaataaaagaatattaaactgaaaaagcaacaagctttgaaaaaccttgattcagcagaatcctccttcgtgctcaaaggatatgggaagagaaaggagttacagtggaaaaaagaaaaaagagtttttttttgtatgaaatggtcacgtgccaaacgagtggctgagagagaacgggttgccacgtcagacgagaaggccgtatctaaacatgtggctgagagtaaacacgacttgattccatgacagctcattttgactttccctggctgtggtcttttgttgacgtttttttaatattttcatgttatatcggattagtgttcgagaaaagaagagacacacaattgggtaaatatgtttttaaaagagtggaaccagtgttcaacttttagatttggtggggtttgagttcatagcgaccacaatttttatcttatatgttttaactaatttagctttcattgatatccactttttcaaaagtatttgcttggatcagtttattgaaaaggaactaatgcgttatcctgaacagttcataacgaaacagtggatataaatggttgcaattgatatatattttttaataagtgtgtttatttttcaattataatgaaatcgttttcgtccttgatgactaggttgaaaattttcagaccttgttaataggctttgtgcctcgattgtttatgcgtttgtttatcttgtgtttgtactttgtatttcgagattaaaacgaattgttggtaggggttactcttgtttcagaaatgatcacgagttacgttagacacatattaagcagtaaacattgttgctagcttgtgatagatcatagatagagtgagtctgagacaaaagcaaattagtgtatatatcaaaaatagaaatgtgctacaaacccgttattgctgacttgataaatttgtacttgttacatgcgcaagattttagtgatctacaatcatgaaagacgctagagaatatgtttctaagaaactggtacaagaaaaaaattatgttgtatacaaaataaaataaaaatattaacataaaaaagagtgatgatcttgtcttttaaatctaccaatttagccactaaacaaattcctttcgttcatcaaagtccacaaattcactgaaagtaatgattccaagcattttttcccaccaattcaacaatttttaagtacaacactttagtgattctaatttacaaaaataacattttgttgtaaaacaaatttagtagtactagaaatttccttttcagggagatgcaaaaattcaattatcacactgctattttggtcgaggtgtaataaaaaaacaaggagacaattgcggcgtggaggctttctgtttacatgcagcacaagaagggccacatgacatgacatcatgtgactctgtttcccatagtcagagaaaagaaaaaatatgacgccagaaagcttgttagcgtcggcgtcgatcaacataggactcgccgtcgttgcactctggctcttctccgtcctcaagaagcagccccgtaacgccgtcgtatactatgctcgccgcctctccgatcgccaccaccaccgtcctctgtctctacactcatccctttgcctccctcgtttccttccttccgttgcgtggatcccacgcgccttccgtgtccccgaggacgagatcctcagccgccacggccttgatgctctcgtcctcatcaggctcttcaaattcgggtaaggaagatttggtcttatctcgcatataaacacgattatcagattctttgaactatgtgcagaattagattcttcctgatgtgttcgttacttggagcatcactacttcttccggttgattattacaatgagtcagatttaccgacacgaagagagtattcaatggatgctttcacaatatcaaatatcacacgaggttctaacaagtaagccgtttcctttttatgtcttaattaattttgcatcatctctcttagagttgtgtttcttgatatcttgtcttaattttcctaggttatgggtgcatttctcatgcttgtggtgcatatcattctatgcattgtttttgttgcataaggtaagcttttactcttgtctatcagtgacggatttttttttgttatagaataggtttatttactggatcttctccatctaggaatataaggagattcttgtgataaggcttcaacaaatgaaagaacttagacatcgtgctgatcagttcactgttcttgtccgccaagttcctctctgccctgagcataacactcgtggctgcgccgttgatcactttttctctaagcatcatcgctttagttatcattcacatcagatgttgtatgacgggagagatcttgaataccttttggtaaggtttgaaactttgtggtggtatcatctttgcagtttttccttcaatacgtgatggtaggatcctttatgtaggggaagcagaagaagcttaagaaagagctagaagacaagagacacacagaaatactttcaaatggatcacaagaacacaagcaaatatccacatctgaagaaaaacttcgagaaattactcatatgatttaccaccttcaaagtgaaactatgctcagagagaaggtactctttattgaggtcagagttaaacaaatatatgtgtttttttcttacatagacgtaaatttcaatgaaggagttacctgttgcgtttgtcaccttcaaatcccgaagaaatgccgcgttggcagctcaaacacagcagcactcaaatcctctagaactgataactgaaatggctcctgaaccaagagatgtatcctggagaaatcttgctattccacaaaagattttgcctctcaacaagatcggagtcatccttgcagcagcacttcttacaatcttctttgctattccggtcacagctgtccagggaattgcaaagtatgagaagcttaagaaatggtttcctccagccatggctattgaattcatgtaaggtttctcttctccttgcctattacttttctcataacgtagcatattattgtttttctcttgattccaaaacaataagataagtttgttatttgcaacagaccagggcttagctcagttgtgacaggttacctcccaagtgctatactcaaaggtttcatgtacattattcctttcgctatgcttggactggcctatctcggcggctctatttccaacagtaaagaggagataaaagcttgcaacatggtcttctattttctaatgggaaatgttttcttcttgagtcttatctctggttccttgcttgatgaaataggagaatatctcactcatcctagagacattcctagtcaccttgctgctgctgtttcagcccaggttaaggcctattatacactcttcaaatctatctcaatccaaaaccaaatttattctcaaaatagtaacttatatttcactttcttttctatatataggcagagttttttatgacatacatcttgacagatgggctgtctggattttctttggagattcttcaattgggacttatactatttgatatcataagatcatacacttatggaagaggaaaagagagaactccttacctcttttcatttccatattttagagttatccccacagtttccttatcgataatgatcggtatgatttatgcggtggttgcgccattgatgctccctttcctagttggttatttctgccttggatacattgtctacttcaatcaggtccagattctcttataacctctttcacacatactacttttgcattatattaaccctggtttctgtcagatggaggatgtttacgagactacatatgatacttgcggtcgattctggccattcattcatcattatatatttgtctcaataatactaatgcaaatcacaatggtgggtctttttggacttaaatcaaagccatctgcagcaattgctacagtacctctcatattgatcactatagcttataacgaatactgcaagatccgcttcctcccatcatttaaacatttccctatacaggtacttatcaactttcctgaggaaatgatggatagattcaggggattctttgtttttttaaatctacataagtgtttttgtggtgtagacagcagttgaaatagacgaagaagatgaaaagaatggggagatggaaacacattatgttgatgctgcaacggcgtataaccggcatcaaccttgcttagagcgtgtaagctcagcggaatcaccaacaaacttaagccaaccattgcttgggacagactccatttgagtctaaaggtgaactggtttgaaaaccttgtcttcttagtcagggattttgaagctcctccacgcacgcacgtcctcatgtgttgtcactttagatcagtgaaggctatatatggccaaaatgcttatagagagaatgctgaatgcttctttttttaggttgtttactgttttttcattagttagggttattacatggttttgtttttaaaaaactattgtatatgaaacattagtcacaaaagtggaaaacaactcagagagaatttatcagattatgttttatttctacttctcctccacttcctctagtgctgtttcctctagtggagttgtaaccatctcaatttctatctaggaatattgatatgttacaatcttgtagaacaaattttgataggccagtgattgtagccacaagcactgatatgattggtaaaccagactacagtgggtgggaagaaacactgttataagctcaaggacatgataagcttgcaaagggaaattatacggctgggagatattacaagcttataaccagcccatcatgtatgttcttcaaccctacaatatacttcttttcttcatcccattttccgcatatcatttcacattttttctctagatgcttgatcttttcctcgtgaccataatcagtccttgtctctatccctctttctctttcaagctttttgattacctttgtcagaagctgttggaaaacaaagatcatttgcttagtttcaagttttaagaaaggagacaacaaatgtcttgtaaaggaagaaatgaccatgattttgcttacttttatttccatctctatagaaattgtcaagttgtcctgactagttgggttgttaacaagttcaccattggcaacggctttatccttcaacttctccgtgtctttaaatctcctcagcagattatgtactgttttgctgttgctactttttggaattttactttgactgtagtcgaactgatttatttgtaataatggtttaagtataaaggccattctacgatataaactaaagactagtcaagtaacagtagtagtacctcccagcttattttcgtgaaatgaattgtttcttgaccaaggtcattgttttccaggtgttgttgttgtctttctcctatcagttgaagtatcctcttttcttgggtcaagcttttacaaccgtgctgcatcgacactcgcttgcactaaaccggcatggtgcatcaaaacacatgcaaaacagatgtaatatgatttccatactgaagaatgagatttccttcacctatatatcctaggctaggttcttatagaaacttatctatatgttatttccgttagtagaacagaagacacttattgtctggtcatttaaggcaagatgctgattagtctcttttctaaatccttataaccctgtttgtactgtgaaaacacaaaatgttcttgattagttgtgaggacttacgtgatcaggcttttctactcctctctgtgtttcttctgcttttttcaatttgtcaagattattctgcagttgctctcgcagattgttgtaatatttgatacagtttccagcctgtcgactgcgatacgtagaatgctttgcttcaatgtagaacctatacctgtttgactgcccaaaaaattcattatgataatatataagcttttaaaaacagtacaagtactcattgttctgttatatatagatatgcttactcggatttcattgtaattctcgtaggtatgttgataatccctctcgagctttttcagtcgcttctctgctttggaaactgacatgtgcacaactggatcagcatcaggtgacaacttgtcgcggtaaagtttccctaaacccatttcatcatagttgcctacaataccaatagacttggatatttcgttgacaccgttgagctgagtggaagcttccatgccactgattgcaagaatttccaaagctgctcctaagtatcatttgaaggaattgctcattttgtgttcttataggaacggaaaaagcatagcttgaatgaagcaacctatcacgattgattatccaaactcgtgcaccccacgccaagtaagtcaatggctcatccttgaagatatcttcttttgtatattatggttaattataattaggaatctatctctgtttgctagcgatacgatgatgtctttattaaaaaaacattggaaataatcaaatcctcgaggcataaaatgcttgaattcattgtgctgatatgaaagagagaaagtatagttttgagtgtttgaccaaaagccacatcaccgaagtcaatggcttttggtcaaaatggtttcgaatataagctactttgtttataagacaacccatggatgcatcagatacaaggaaattattaatttgatagtcttaagtgtattcttaagtgtttataagctactttggggacttggtcttgaaaatcaccctcaaaattcctttcaacaatccaatggtgatgaaccgaaaaactttgtagaaattaatcgattgaaacaacatttcatattggatttagtgtgattatatgaaaagagaaagtcatagttttgaccaaagcagcttctgattttgcatcccaatccagaaagcttttaagtctattctggtgttatatggctacttctttattagaatttctttgttcatagacaaatgatccaatggcgagaaatggtgaagtctatttgagaatgatttggttgcttatattaatggaaatattgtaaaatgcatcttataaagctgtatcataacatgaatcatcagtgtgatttacaacatgatagcttaacatgtttgttcttcagttacatcatccatacatatataggcatcttgctttctattccttggaatagaactttgcatgttattgaactgatagaggtacatctctgaagttaccttttcggcagccttttctctgtgaagcagttttgttcatatccctgaaatttttctccaaatcgagcaagtatttcttttctgcatcacgtctctcaactatgcatttacatttttcccgtaaaacccttattttttctatgtatcctttttcattttttcttgcaaaatgtattctgtcttgcaaaatattctctaactctattttctctttctctaactctctgtgtacattcgtcacaatctagaggaaaacagacatcatcacatttcttagttttaagaaataagcccatgagtaaagaggagaaatttgctgtattacctttattaagtcacttgtagaatttttcatattgtccagactcgtgaggttgcccattagtgcaccattggaaatagctttttctgtcaacttctgtgtctcattaactctcctcaacagatcgtgtacagatttcttgttgctattctgtggaactattctttgaatgcaaatgaactgattttatcataagatggagaagtaaatatttaaaacctcatttacaataattagttaagaggctttcagtaggagtagagttgagtggtacctcccaattaattcttttgacatcaattgtttcttgacacagaccatcagtgtattgctctttggtttctgctttcagcttctgaagtaccatattttcttgtgccaagcttttacaaccgtgcgtcaagaagaattgcttaccctaaacaagtatggttcacataaataatacataatatgatttactgaactatgatcagtgcttcaattatatatcctaagttgctagaaaaactggtctatgggaacatacgtttgttggtgtttctcttcctctttgtgatgcttcttctgtattcagcttgtcaagaacattctgcagttgctctactacattttcgatgtgatcgatacagtagccaacccagcgactgtgatgtcctggacgttgaaaagcaatgtagtacatatacctgtctgactgtccataaagaactggccctataagtttctaacaactttacaaatattcactattttgttttatgtattgatgcttacttgtagttctgtgtacttctcgtaggtgtgttgataatcttgctcgagcttttccaatcgcttctttgcttctgcaaatgatgaacgcccaaatgagccagggcatggtgaaaccatgttgcaggaaagtttctcggagccctttttactatagttgcatcccataccaactgagatggatattgttttgaaattagaagtttcctgaccatcggctttgagattttccatagcttcttctgagtgttatatgtattttagcaagcaagtttttacatggaagccttgttctcttgtgttgttatatagagagaaaaaacattgttaacataataaaataaaaactctcagagctgattatgcaaacccttgcaccccactccaagaaagtcaatggctcgtctccaaaagaatcttcttttgtgtattctttctttttggttattaattatagtttgaccatctgtctcttctatatattatcatctacttgaggcataaaatacaaagaaatgtttgtcatgataattagagcttattgtgattaaacaatgaaatgtgaatgattgggattttgacaagtcttcaatctaacagattgtcacgaacaggttgtggtcacattaagttaagagtaatgcttccttagatcagtcttacttactacaatggcgactaatagtcatataggctgctcaacaaccttagcacgttcttgctgctgcaaagcctcaaattcccctcctcttttatcctgtatctgcttgattgattcttagaaaactctgtgttttatttttgaatatgtgtatcagtaggtatctaggtaatacagaatgtcaagtttgtatgttttttttttccggaaataacttacctcttctctgttctgttcatgttgaatctttgttctcggtctcacgattatgctctgcagttttacgcagattctcactcataatttccatagagccatactctttcagtattgtgtgatcttgttctgtaaccagatcagctgttgattggtctcagagatctgcctcagctacttaacaaccatttcttggtaagatttcatctcaaattccagcctcgtttggcctaatgagtaatacataaatacatatgatgcattcacaagaaccaaaaaaactctaaatcccattgaaaggactagaaatgttaatgatgggttaaaacccactcggtacccaaaacccacataaaattttaagcccatagatctattttttctggaaaaaaaaacataggtttaaaatgggctgggtacccaaataaataaaacccatatgggtttacctcattgggtaatgggtacccacgggtttttttcagtcctttttcaggtgaatcaacattttctcgtcaaaaaagatttcacatttttccgtcaaaaccgcgatttaacatttaccgccaaaaaagacattcaatattttcccgctaaaaaagacattcaacatttttccgccaaaaacgacaatcaacattttcccgccaaaacgcaattcaacattttcccgccaaaaacgacattcaatattttcccgccaaaacgcaattcaacattttcccgccaaaaacgacattcaatattttcccgccaaaacgcaattcaacatttttccgccaaaaacgcgattcaacattttccaccaaaaataatttcacttttcccgctaaaaacgcaatttaacattttcccgccaaaaacggcattcaacattttcccgccaaaaaggatttcacattttccggtcaaaaacgcaattcaacatttttccgccaaaaacgcgattcaacatttttccgctaaaaacacaattcaacctttttcccatcaaatatatatgtaatacagaaaataaatataatttaaaatatatttataagcaaattatagatacaacatacatataatagtatattagcagttaaaataaactctaagaaaatgacaaaaaccaagttgggtacccacgggtagtctcagaacaatcaggttttttcgggctttacccactaaatcaaaaacccatctgggttttgtaaagttgggtttttggtgggcggatttattttgggttcaggtcgggctgggcttttttacccaccacaacatctctagacaggacttaaaacaaatatcgaatatctgagggagaagaaccttgatgttgttcattgaatgacttagaacatatactgaatatctgaggtagggaacctcgtggcgcatgttattattgtttggatgatttgattaattcggatttcgatcatacctatgtgtgtatagaacccttgattttgaattaattaacagaattatgatatatgtcaagaataaatgatgttaactattttcataagttgaatgctttacttcaatttggaaattagagaaaaggcccaaatatttcagctgtaataagcccataatgaggcccaataagacactagaaaggagttgagtaataactaagcgattctcttctctccgtctgcttcaatccccttttttttttcgtttcgtcgtttgttcgttttctctatcgctctcgttcatctacgcaatctctctcactaggtgagtttcatattcttctctttgatattcttgtggtgaatttcgttttagatatgtaccgaattgaagttccctctgttttttttaatcagattcggatcgatatctctcgtttaacagttttaggttttcatttgcttatagttgtgcttttatgaaaagtgaattcctcttagggttcgtctattaatttgctaataaatcctaattctttgatttatcctcttttgaaacggattagatggtaaagaatcgaaattgatttgagaatgcatcagatttgtttatatgaataattatttactgggtttcaataaagttttgagcttgagctttttgtcaccattgtcaagtagaaaaaccctaattctggagctctgttaccagtaccagaggcctgagtttggtagttttcgaattagcttgctagataatatatgattattcgtttgataacttattggctgtttattgatgtttcatgtcaggtacagttttaaatgggtaagaagaagtcagacgagagtgctgctaccacaaaggtgaagccaagtgggaaagatgcttcgaaagattctaaaaaagagaaattgtcagtctcggctatgcttgcaggcatggatcagaaagatgataaaccgaagaagggctcatcatctagaaccaaggctgctccgaaatctacatcttacactgatggcatagatcttcctccttctgatgaagaagacgacggtgaatctgatgaggaagagagacagaaggaagcaaggaggaagctgaagagtgaacaaaggcaccttgagatatctgtgactgataaggaacaaaagaagcgagaggcgaaagaaagattagctcttcaggctgcagagtcggcaaagagggaggctatgaaggacgatcatgatgcattcacggttgttattggaagcaagacctcagtgcttgaaggagacgacatggctgatgcaaatgttaaggatattaccatagaatctttttctgtatctgctcgaggtaaagagcttttgaagaatgcttctgtcaggatttcacatggtaaaaggtatgggttgatcgggccaaacggaatgggaaagtctacactgttaaagcttttagcttggaggaagattccagtgccaaagaatattgatgttcttcttgttgagcaagaggtggttggtgatgaaaagagtgctctgaatgcagttgtctctgccaatgaagagttggttaagctacgggaagaggctgaagctctgcagaagtcgtcttctggagctgatggagaaaatgttgatggtgaggatgatgatgatactggagaaaagcttgctgaactgtatgacaggctgcagattttagggtcagatgctgctgaagcacaggcatccaaaattcttgcggggttaggtttcacaaaagatatgcaagtgcgtgcgactcagtccttcagtggtggctggaggatgcgaatatcattagctagagctctgttcgtgcaacctacccttttgctgttagatgaacccactaaccatcttgacctgagagctgttctatggttagaggagtatttgtgtcgctggaagaagacactagttgttgtttcacatgaccgggacttcctcaacacagtctgcacggagataatacatctccatgaccaaaatctccacttctaccgtggtaatttcgatggttttgaaagcggatatgagcagcgtcgcaaggagatgaacaaaaaatttgatgtctacgacaaacagatgaaagcagcgaagaggactggaaaccggggtcaacaggagaaggtaaaggacagggccaagtttactgctgcaaaagaagcatccaagagtaagtcaaagggcaagacagtggatgaagaaggcccagcaccagaagctccaaggaagtggagagattacagtgtggtgttccacttcccagaaccaactgagctcactcctcctcttctgcagttaattgaggttagcttcagctatcccaacaggccagatttcagactctcgaatgttgatgtaggtatcgatatggggacacgggttgcgatagttgggcctaacggagcaggaaagtccactctattaaatcttcttgcgggagatttagttccaacagagggtgaaatgagaagaagccagaagctgaggattggcaggtattctcagcattttgttgaccttttaacaatgggggaaacaccggttcagtatctccttcgtcttcatcctgaccaagagggatttagcaagcaagaggcagtgcgagcgaagctaggcaagtttgggctaccaagtcacaatcacttatctccaattgcgaaattgtctggaggacaaaaggctagggttgtgttcacctcgatctcaatgtcaaaaccacacattttgcttctggacgagcctacaaatcacttagacatgcagagtatagatgccttggcggatgcactagatgagttcacaggtggagttgtgttggtgagtcacgactcgagactcatatcacgtgtatgtgcggaagaggagaagagtcaaatttgggttgtagaagacggaacagtgaatttcttcccaggcacatttgaagagtacaaagaagatctccaaagagaaatcaaagcagaagttgatgagtgaagttttgttgttagcttctaaggtaaactcaaactcctttatgttttataacaaactcaaaaagttttggacaattttatttttagcaatcgtgttctttcatcatttgtgcgttaattacatcatatatgacactatatacatcagtttctccatattacatatgttctgagtgtagggtgttgtgttttgggggaagaaaacaaaagacatgtgcaattctttttcaacagtgtgtttccattagagccataataaccagcaaatgcttctttatatttttagctgtctgaaattttgcttagtttctctcgtttattatttttggctctttctctctcttttggtagttttggctttctttggttgattgtgtttaccatgcctcttcctttgtgtttattttgattaagatagtgagtatcatatgattgatttagggttctaatcttaaagtaagcttgagattcagaaattgagctgaacgggtagagatttcgtgttgattttctggacttcacgaaattaggaatttcagggattacttagttctttcgtgctctattcttagccatagggtcacctagatcagccatcaaatctttcacagagctcaggtcgttttgaacatgataaatcaatgagtcagagtttgtgtatggtttagagtcagaagatgcattttcagcagtgtgatatccttgatttcgtaaccttgatatacattgttagaagaaatttgtctaaatggcttatctttttcgctttctctgtttttagcacactctgtttcgtgcttttctctgattggtctctatttttgtggctgtcgttaatctttttataattattttgaagtcaatttaaatgaaagcaaaaatgcaataaaaataaacaaactcaaaagaaagattggtttcttctacaagggatcagaagaaatcttaaaaacaacaaagaggatatgatcatgatccttaaaatcatacccttacaacaaaaaacaatcaaaagagattttaatcccatgtgtttattgataattaagctaatattatatatttaaggatggacaacaccagcttgtccactggtttctccttgagtttgcttagtacgatcatattgagacacccatttggttaacaaatactctgctctcctccatggtggcataaatagccctttcttcctaaagctcgtctttgcggctttagacaaaaataccacaaccttcgtcaacctgtcaacttgtccaacaaagacgtaaggcaatgtcttcgatatcgactcgtaagtctcactcgatctagcaatttcgaacttcgattggaaatcaaagtcgatgagcactctttctcctccaatgttaacatccaaatactcatagtcccctgtttaccattttccacaaaaaaaaaggttattttcttaacagttttgacacttagagagtggatcaaaatgaagaaacgtaccagcgggaacacaatacgatttcgttttcgatttctcccagcgagatttgcatattgctgcatcatagcctaaagccaccagttcatcaacaacatttttcagtctggacttatcttcaacctctctctcaacgatctcggttgttttcgtctcgagatcacgctcagatacgttcgcacaaagtaaaagactctacaaaacattgaaaagaaaagaaactctgtttataacagattccaaacatcaaatgtgagcatcagagatattattcatcataccttgaggcttcgaagaactcttctagaagaagaagattcttcgtcgtcctcgtcagagctatcagtaccacttccactgaagcagttgcatcggttacgaacaatgcactttgattgtttctcactgtctggatcctcgatatagttctgcaccatcctcctcaaacagaccgagctcggttcgatttcttcggaattttctctagaaagcgatgaatctacaccggctaagttcttcagagagaacggacgttcaaaaagccgcttcagtcgagatctcggcgcttgtctcatccctacaccattgatgttgataggctggactttggaacggaaaggcatggctcaaaacgtacgaaatgtttttctctacgtccaaaaatccctgagaaggtgtgcaaatgagacgaaacaaaactcaaaaaaaaaaaaaaaactagatgagaaaattcaaacgtttatgattgatttacttaaattttctagaggcataaatttagagaaagaaacacattaaaaaaaaaaaggggaaaagatcacttggatggtttttagatacggattgatactcgaggacacgaaaacgtcatgcttttaatgcttaatttttatttttgtttattataagagatgttggaaatcactatgtggatgatgtgattttggtttagatttctccaaaaatgcataggagattatcttcaaagttttgtaagggaaagaagaagttttgctaacaacttagggaggaagaaaccaatgtttgatgcttcttatataggaggacagaaagacctatccatgtatcatattgggaaagaagttaatttgtctctatgaattacgtgttcgttttttacaggtcggttctatgtcattggtactgcttttgatgtaaaccggtgtattattgtccccagtttacattcataattatatttactttacacatacaccaaaatttcaaaggtatctaatttctattttgcaatgatatttaatgttacgcgtaaactttattacttaacataaaatgaaaagttgaaggtaaatctcttttactaaacactttatgtcaagtttataatttcaagagactagcggtaatatcttctgtttgctatttttagcgttgttgtaaataattttggtcaaataaaatcattgtgaaatccaattgtattgcctaaaaactaaataagaaaataagtaaatatccttatacatttatgatgaaatgagtgaaaatcacaaagactaaaacaaacctacacgcgtcaatattatatttcaataattaataaaaagttgaaagtaagtttgtttgactatatattatatgtaaagtttataatttcaaagaaaataacaataatatattttatttgacactaaaatactaattttataccacacaattaatagttttacagaagaaaaagaaagatatctgactgagttttattgagttgtggataccacaattgtattgcctaaaaacaaaagaaaatataaatcataatcttgaactatttatgacgaggctaatataagtaacagagacgtcaatcacaaattcatcacaataactcgaagaaattgattcatcacgaagcgaaatcatacaaaggtacgtctaacaatctcaaatcttaacaatcaaaccaaagcatataatattctcttaccatttagttttaccacaagcatagtgcctacaacctttctcatgaaaaatggatctttctgttacaaaagaaaaaaaaaagctgattttaaacgtttctaagaaatagagggcttaatggcaaaatgttgaaacattttaaggctccaaagcgaaaaatttaaccgccaaagcgtaggtttccccccaagattttgaaaatatttaaaaactcccaccaaactttttaattttaaaactctaatcccattctattcaaccagatttcgtttctttcgtcctttttttccttttgcattctctcgtcgtcgtctcaaggtactttacttctctttttctctcttccaatattcgagatctgtttctgtctttcttggatcgattctcgattctgttcttcgatttagtcttctttcgaatagatctggtagatttaagcattatactcttctttttctgatttcgtttttgtttgactgtgtacggttagatctagaagaaggaaacaacaatttcaagagacatggcaggcaaaggtggaaaaggactcgtagctgcgaagacgatggctgctaacaaggacaaagacaaggacaagaagaaacccatctctcgctctgctcgtgctggtattcaggtcatctcttaaaccctaatttcgacgaccttgtttgactctgattctttcctaattcatcagtaccatttacatttttaggaatagatttgtttttttggttctatgtaaaagcatgaggaagtaaacttgctggatatgtgtaatttcttttactcggtaccatgttgatgtttttgtcaatgtttgtgctaattatacaaatttgtgttgcttgctcactggttgcttggtcatctgagaatacatgttgttgttgtttttgtctccccattgtttaggtagtgtcttatggtatgtgcccaaatgttcccttactctgtagcttactattgatattgatgagtcatgagggttttaatatgttttgtttggttctagtatgtgcaatgttctgttttttattaagttatactattttaatggaactatttggtgtgcgctgatactgttttgacattgatgctgtgcatagccatacaagtagagagattggtcacaccgatactgtttttttttttcagtttccagttggacgaattcacaggcaactgaagacccgagtctcggcacatggcagagttggtgccactgcagccgtctacacagcttcaatcctggagtatctgacagcagaggttcttgagttggctgggaatgcgagcaaggatctcaaagtgaagaggataacgccaaggcatctgcagttggcgattagaggagatgaggagctggacacactcatcaagggaacgattgctggaggtggtgtgatccctcacatccacaagtctctcatcaacaaaaccaccaaggagtgatgtgtagctttttatggtgtttgtatttctgtagtcttggactcattttcctttatccttttcttagttctttgactagtgttgacctcttctggacatcctcaggtgtacattagttaatttgaactctttaggttccttgttcaatcatatgttctctttctatgctattgtgatttgcttattatgttttcaagtgaaccgttttctgttttaaacaactgaggaaatcatttactcgcatgctctctggtaaccggacttacaagtatcttttagatatagaacttgttatcaaacatcatcagtattttatcaagtcacatattccaaatcaggcgcaaatagcccaatcacaagtcaaagactcaatattaaaaaaaaaagagtacatcattcattcactcactaggttccaaggctttgatagcatgttaactgcaagcccgaaggtgtcttgcataagtgaaagctggtgaaggttatttaggtactgttgtttcaaatgcctcaacgagcaatgccacatccttcttcctttctacaacaagtttacttacggtgtgttgcagagcataatcaatcatccactcctctgctttcttcctctcatccatgtcctgatgcctgagatcaactgtttcgttgctcggctctacagtagtttgaatgtaattgggttctcttgggttgagtctcctacaatcctcaatgcactcttctcggttgcaaggtttttgtgcaagtgataacagagcttcctctgttttcaatacaagtttaatccgctctttcactttctctccatctgcctccttccagtcttcagcttccttagattcatgcttctcatccacagcattccctagaatgatgtcatcttgtataatcgactgttcaaataaaagagagttggttgtgttattcgagaaaccaccctcttcacgctcttgatcctcacttgaattttctgattgttcaagaactgcaaagttacatgattcaatgccttcaccttctagtaagctcactatctctgcactctcagaatctaaatctttaacctctcccaattccatctctatattctcagcctcagaatcgattactttgatatcagtttctcgagtgcttctattttctttcttctcatcaacatagatttccacacaaccatcatcacattcaccacttgcatgggacttcaaggagcgtctcctttcggatataaagcttagaagaggtgggaattggctgtgaagatgcgcgttgagtgaacaatacgtataaggacagactttcaagatatgaggagaagtaaacatcagatcctctgtgaattttgagtttttgagaagcgaagagcaagttgctctatgcacattcgcatcccaacaacgaccaatcctaccacttctcttgaagctctgaccctttttcaaagacctactactactctgtttcttttctctagagcaagaatcaagtttcttaccggtttggctcttcttgtctaaaccagcttgaacactttggctctgtcttctagcctctgaactcctcgttcccttcatataattaggtgacccgcctgtgactttagcaacgatctgcttctccggtgtcgttggttgaggaagcctactagcccttggtctcttctttatcatctccggtctaagcctcctaccatgtccttgccctaccaaagcttgagcagttttactctgaaccattgatctttccaagacaaacctgtgctgtgagatgctctcttctcttctatgtttgaagcttttacttccttttctcctaataatacgtttcccggttatgtctttttttgggtctttaaatgaaagatttgcaatgacatgtttttgctatatagtccactttctgtttcttaattattgcttctaaatcaacattttgttgttctcttataacgtctcccgctaaatgagcattatgttcttctttttaatatgacatcgtgaacagacaaataagcattttttcctttattaatttgtttgagagaacaaaactaagcaatatctgcatttttttcattagcacgtattggttgatgaactaaatgtatttagattaatagataaatgtgtgtgacaaaaataaaagtgacaatcttaacaaaaaaaaaaagaaaagaaaaagtgacaaaagacatttccttttcatccttttccgattgttgcctccctaaacgggtgtaatttgatcatgaagtttctaccaaaaaataatttgatgatgaattttatagaagctaaacaaaacataatctgttgttatttaatcgttagttcaaattacatacactaaaatctagtgttttttttaattatgaaatttgtaaatcatgaatcatagattttgaaaatttggtgttattaaatgaatatttcaatatattgatgatatttaaaactaattaaaattgaaatatctttgtatattaaaccacctaatgagttttattagaaataagagtaaattatttaaaacaaaatctatgatatcacaccaaaattcttacaatccacaaacatatattgtatgttatcaaaattttaaaattttgaaaattacaaaacatagataattgaagttaatcttataggttctcctaaataaataatgtaagaaggattactaatatttagaaacccttaagcaaaaaataaataaattataataagtagaatataatgaggcatcatcaatgacagactcggggcgtcttataggaaaaatggtcggccaaggacggggctcattgcatacacgctcctcttctctttttcgtaatgtccttgtcaagatttcaaattgatcagtattatttattatgacttgcaatttcgtaatgaacaaattcccttagcttatatgaagccgtcttgagtttgatcagtatataataagcttcccaaccgtttaaaatgttattacatagatacgaaccgtgacgttttattgatgtttcgattattttctacattttctttgtctagttccattggagttttgcaaatagcatcatctgtttgccatgagttaaattttgtggatttcgcctactacataagagaataatcatttccaatgatccatgcaaaataggtaatgcaatccttaaacaagacccacgtcagaggatacataattatcaaaagctataaagtcaagaatataattcaaatttccaaaggacttcatatagattgattgcaagcaacctttacacatatagaagaagaaaacatgaaaccatacaaaagttttttacccaaattattgatgcaaaccaaatgaaaattaaaagatacaagaacaaaaggaaagaagaaatcaaataaaatttggtaatttatttaattaaaaatcccttttactcttttcaagaatagaaatatgatggtggagctgaagtttagtactcagtttttggagaaggtgaatacgaaggtggaggtggggatttgtaaacatatggtggtgggggagatttgtattcaacctttggagaaggagaataataaggtggtggtggggaactgtagacatatggtggtggaggagacttgtagtctaccacaggagaaggtgagtaatatggaggtggtggagaactgtagacatacggtggtggaggagacttgtagtctaccttaggggaaggtgaataatatggtggtggtggtgaactgtagacatatggtggtggaggagatttgtagtcaaccttaggggaaggtgagtagtatggtggtggaggagaactgtaaacatacggtggtgggggagacttgtattctaccttaggagagggtgaatagtatggtggtggtggggagctgtagacgtatggtggtggaggagatttgtagtgaaccttaggagaaggtgagtaatatggaggtggtggagaactgtagacatatggtggtggaggagacttgtaatgtaccttaggagtaggtgcgtagtatggtggtggaggagatttgtagtgcaccttaggggaaggtgagtaatatggtgggggtggagaactgtaaacatatggtggtgggggtgacttgtaatataccttaggggaaggtgagtagtgtggtggtggtggagaactgtagacatatggtggtggaggagacttgtacacaaccttgggggatggagaataacatggaggaggtggtggacaaacacaaacatgaggatgtggtggagacttgtagtacaccttaggtgaaggcgagtagtatggaggtggtggggagctgtagacatacggtggtggtggagacttgtagtacactttaggtgaaggagagtagtatggtggtgggggagaactgtagacgtaaggtggtggtggagatttgtagtacaccttaggagatggtgaatagtatggtggtgggggagaactgtaaacgtatggtggtggtggggatttgtattgcaccttgggcgaaggtgagtggtatggtggtggtggagagctgtagacgtacggtggtggtggagatttgtagtaaaccttaggcgaaggtgagtagtatggtggtggtggggagctgtaaacgtacggtggtggaggagacttgtagtacaccttaggagaaggtgaatagtatggtggtggtggagatttgtagtaaaccttaggcgaaggtgagtagtatggtggtggtggggagctgtaaacgtacggtggtggaggagacttgtagtacactttaggagaaggtgaatagtatggtggtggtggagaactgtagacgtaaggtggtggtggggacttgtagtacaccttaggagaaggtgagtagtatggtggtggtggagagctgtagacgtacgggggtggaggagacttgtaatcaacctttggggatggagagtatgttggtggtggtggagagctgtagacgtacggtggtggaggagacttgtactctacctttggggacggtgagtagtatggtggtggtggagagctgtagacgtacgggggtggaggagacttgtactcaaccttaggagatggggagtaggttggtggtggtggggagctgtagacgtacggtggtggaggagatttgtattcaacctttggggatggggaataggttggtggtggtggagagctgtagacgtacggtggtggaggagatttgtactcaacctttggggatggagagtaggttggcggtggtggggagctgtagacatagggtggtggaggagatttgtactcaacctttggggatggagagtaggttggcggtggtggggagctgtaaacatagggtggtggaggagatttgtagtcaacctttggagatggtgagtagtatggaggtggtggggagctgtagacgtacggtggtggaggagacttgtaatcaacctttggggatggagagtatgttggtggtggtggagagctgtagacgtacggtggtggaggagacttgtactctacctttggggacggtgagtagtatggtggtggtggagagctgtagacgtacgggggtggaggagacttgtaatcaacctttggggatggagagtatgttggtggtggtggagagctgtagacgtacggtggtggaggagacttgtactctacctttggggacggtgagtagtatggtggtggtggagagctgtagacgtacgggggtggaggagacttgtactcaaccttaggagatggggagtaggttggtggtggtggggagctgtagacgtacggtggtggaggagatttgtattcaacctttggggatggggaataggttggtggtggtggggagctgtacacgtacggtggtggaggagatttgtactcaacctttggggatggagagtaggttggcggtggtggggagctgtaaacatagggtggtggaggagatttgtactcaacctttggggatggagagtaggttggtggtggtggggagctgtagacatacggtggtggaggagatttgtactcaacctttggggatggagagtaggtcggtggtggtggtgagctgtaaacatatggtggtggaggagatttgtattctacttcaggagccggtgagtaagttggtggtggggaactgtcgatgtatggtagtgggggagttttgtattcaatcttaggaagcggtgaggaatacagtggtggtggagagctatctgtgtatggatcatatgcagcaaccattgttgccatgatgacaactcctagagcgcaaatgagatgggttgaaggccccatcatagaagaagatctcattgagattttgtttattctctaccaacgcgttactacgttggttagttgtttttgttttgttttgtgttgtaaagaatgggagcatggggttttatagcaaagtgtttctcagaatccagctctacgattatttttgccctgtccttgtggactctgtcaattaaatcgtggaagcatgtctacacgatattagtgtgagacgtgcaagaacgttttgcgaatgtcaacgagtcattttccattttatattcgcaagttcaataagaattttgtgtatcatggatgcttcacatagattaaaagaccttgtctaattattttcttatgttttaaagggccacttcaaatatattgaaaagtgaacagaaaatttgattattcggatgatttcatacatctccaatatattaaacttaaagaaagaaattgcttaaatggatacttcttattgatattggatgcttgacgctaatattttcctccaacgattacaatatatattgcactagagttttgacatgatctatgcgctggtataacaaaagttattctaaggaatgtaaaggataattaaagacgaagtaaaacgaaagacttttaagatgataatcatgatatcaaaatatatgtacatacttactaaattaaagtagagaactatttatatggtacttgttgggactaaaactatggattgtgtaatattttcagtcagtggttaaatgagtttcagagtttacacatattaaataccagtttcaatgggatattattaccgcaaaaacaacaaactaggatttaaaaatatcagttgattaaagaaactagtatataaatagtttatttataaacttactctaaaaatcaaatcataaaaagagaataaaaagatcaagaaccttctatggtccatgaatgacgatttaccatttcgttattaactcatctctttattagtcacttagtcatctagttgatttttgacagccacttagtcatagatttgctgcatttgcaagacttaattgtatgattgtaattatgttttagatattcatttatcattataaagggtaatccattgaaaatgtatacattgaaaggtacgtagacgtgttcttacgactttggaacttggaaggatggtttttgtggtggctgaatcgtttcaatctcatgagttgctctcaatgtgatgttaattttcttctgtaattgtatttttttgttttaattactccaactttaagaaaccatagaatccaacttaaaagagaaaattgataaagaattaaatttagacttcttaagagaaaattaagtctagatggaatggaagacacgacgattagaattaaaagaaatgatagtctttgttaaattagaaaataagctagagtttcgtttttgtaacgtgatttagagttatatcaaaacgaatcaggaatatttttaagacatgtttgtactaacatatatgtaaagctcgtggccctcatgaagagacacagcgaagaaaataaacttggagcttctttgcgcaattgcagagtcgtcgatcgtggttttgttcttgcctgcatggtggttgaatcttgacagtggttttctggaggaataatatatgtaattaaccataatgacggatatttgtcccccaaaaaatgataatcataatgacggaataaaagagtagtactttgatttactcttttgaggatacttatttttgttcatgtcaagttcttatctataagaaaaaaatgtaaatgagtaggtataggaaaactgaacctccttaaatatatcccatatacaaaactcatttggaggattacatagctaccaagaactatcgagttaagacactacacatatagatcattacaaacaatctttatatatacaatttagtccaattataaatcaaaatccataagaaaattgatattaattaagaacaagaggcgaaatgaaatcacccttaaacaaatctcgcgtgacagttatctactacaatttaccttgtaaatcattgatgattgataaccaggtgagtcaaatatgcaaaaaatatgatatgcagtgaccctttaaaaagtgaaaattaaaattaaactagctcgttgaataaatgatgtatatttgatacataaaattcttcttaaccaagcaaatataatatgtggctcgttgacattcgctaaacgttcctgcacgtctaaaaccagtctcgtgtcgacatgcttccacgatttagttggatgaagtccaaaacaacaaagaaaaacgaatagtctagctgcatttagagaaaacatttgctatataaactcatgcgcacattcttttacaacacaaaccaaaacaacaaaatctaaccaacgtagtaaagcgttggtacaaaaaaagcaaaatcataatgagatcttcttctaagatggggccttcagcccatctcatttccgctctaggagttatcatcatggcaacaatggttgctgcatatgagccagaaacatatgcctctccgccaccgttgtattcttcaccgcttcctgaagttgaatacaagactcctccactaccatacgtcgacagttccccaccaccaacttacacaccagctcctgaagtggaatacaagtctccaccaccaccatatgtctatagttctccacccccaccaacatactccccatctccaaaggttgactacaaatctcctccaccaccatacgtctacagttctccaccaccaccatattactcgccttctcctaaggtcgactacaagtctcctccaccaccatacgtctacaactctccaccaccaccatattactcgccttcccctaaggtcgactacaagtcacctccaccaccatacgtctacagctccccaccaccaccgtactactctccatctcctaaggttgagtacaaatctcctcctccaccgtacgtctacagttctccaccaccaccatactactcaccatcccctaaggttgactacaagtctcctccaccaccatacgtatacagctccccaccaccaccatactattctccatcccctaaggttgagtacaaatctcctcctccaccgtacgtttacagttctccaccaccaccatactactcaccatcccctaaagttgactacaagtctcctccaccaccatacgtctacagttccccaccaccaccatactattcaccatcccctaaagtctacagctctccaccaccaccatactactcaccatcccctaaggtgtagactacaagtctcccccaccaccatacgtttacagctccccaccaccaccatactactcaccatccccaaaggttgactacaagtctcctccaccaccatacgtctacagctccccaccaccaccatactactcaccatccccaaaggttgactacaagtctcctccaccaccatacgtctacagctccccaccaccaccatactactcaccatccccaaaggttgactacaagtctcctccaccaccatacgtttacagttccccaccaccaccaacctactctccatccccaaaggttgactacaagtctcctccaccaccatacgtctacagctccccaccaccaccatactactcaccatccccaaaggttgagtacaaatctcctccaccaccgtatgtctacagctccccaccaccaccaacctactctccatcccctaaggtgtactacaagtctccaccaccaccatacgtatacagttctccaccaccaccatactactcaccatcccctaaggtgtactacaagtccccaccaccaccttacgtatacagttctccaccaccaccatactactcaccttctcctaaggtgtattacaagtctccaccaccaccgtacgtgtacagttctccaccaccaccatactactcaccttctcctaaggtgtattacaagtctccaccaccaccatacgtctacagttctccacctccaccatattactcaccttcccctaaggtgtactacaaatccccaccaccaccatacgtctacagctctccacctccaccatattactcaccttcccctaaggtgcactacaaatccccaccaccaccatacgtctacagctctccacctccaccatattactcaccttcccctaaggtgcactacaaatccccaccaccaccatacgtctacaactctccaccaccaccatactattcaccatctcctaaggtgtactacaaatctccaccaccaccttacgtctacagttctcccccaccaccgtactactctccttcacctaaagtgtactacaagtctccaccaccaccatatgtctacagctctccaccaccaccatattactccccttcccctaaggtgtactacaagtctccaccaccaccttattactcaccttcccctaaggtatactacaaatccccaccacatcctcatgtatgtgtttgtccaccaccacctccatgttattctccatcccctaaggttgtgtacaagtctcctccaccaccatatgtctacaattccccaccaccaccatactactcaccttctccaaaagtttactacaagtctcctccaccaccatcttattattctccctctccaaaggttgaatacaaatctccacctccaccatcgtattcaccttctccaaaaactgagtactaaatttctcggctgcctctatatgagtgaaactaaaaaatgtaattcttaaataagttatcgaatattattcgattttatctttccttttgttctcgttttttaatttctcttatctaatcaatttttaattttcttgggatttggctacaaaattttcttttatttgtgtaacgattgcttgcgatctatataaactcctttgcaaattcttgactttgtatcgtttaaataactatatgatcctctaacatggatcttgtctttggacagcacacctaaaagcatgaattattttaattctagtatgtcttcaaccttaacgatccacaatttttaactcttggaggtttcattttcctacctaaatctggtatggattaaaaaagaaaactcaaactaaaaaacaattatgagacgacaattcccaaagatatcaagaagacaagaactacattttactccacaactatattctatcgcattatttttattaaaagattttcattgatataaaaggaattaaaaaggaactctaatcgaaccattacatccaaccacaaaagggaaaaaaaaaggtgaaagtttaaaacatgaaatagctaattcaagattttatatctttatttttccgaaatatttttgtcccttacgattaaattcaataaaccaaagaactaaaagagtggttgtctagtggtagtacaagggaattggtttctttgtacaccgggttcaattctgtttagaaacagagaaatattctttaaatgaaaatggactaaagactagctccggatatagaagaagattatagatccaaattccaaaactttcgcgagcccgaactttcttagctaaacaaaaagaaatctaatataaaaataagaagaagaaacaaccaaggaacgataagaggtaattatgctataaaaagcggtcacttgtcttggttctcgaggatagaaatcaagtttgcacaatcggaagcgaaaataccaaacatcttgccggtagagatcatgcattaattccattgcccataacagataatcaaattctgcatggagcgacaataaactccgacggctacttctgagaccttgatgaagaactaagttttgtttcactagaacccaactatatccgctcagagccatcttcatgccaaggcgcattaaacagagatcaagatagggggatctagattaaacgttggaggtgtgacagaaattatggactcttcttttagggaagcttgtttccaagctgcaagatgttcaacgctcacaaatatgttagcatatgatatgattaggtttttgaattctatatttttatatgtcgcaagcgcactacaattaataaatcttcttagggtagaatttcaatccataagcaggctactaattataccatgaatactaccattttcccctcttttttttatttatgataaggtttctacgttagtaactcttatatatatgttttgactgttacacacttgtggaatcatgatggctggattggtgattcgaccattttgacattgaaaaccggtctccctccaattaccttgaagcgttatgcaataagtgtaaatgtctgctttcgaatggttttagcagtccatgaggctaatcgacccaacccaactcatagactatagagttacatcatttccgttgcatgtctcttgtgacacaaagaactaaacaagataagagagaattagagaagctataaaacataaaatcactacatgtcacatttatcatttactatgttgaatatttttaccgttcaatttaaagaaatccaacaatatgcttaaaataatttttttgattaatgtttccaaattctatatgttcttttaatcatatggtaattgattattttcgaccattctgataaagtttggagtacactgtatttttttttaaaaatagaagaaatgtatatataaattaactaagaatatattaagttttattgttttaataaagtagtttcattgctgcatgcactctgccatttacataaaatgcaagccttgtaatttacttttcttcattaattgtttaagatttgttttcaattttaattttgttaagaaaacaaatcttaatacgtttttttattttgctggctctgaggcaacaaactttttttacaattacttctttgtcatccccacttaatctggccttaccgtttttatttggcttcccgggttatgcataagaagatgtcaagtaggtgagaggttggtgtgcgtagggaatttgcaattaacacgtgtttattttaactctcttcaattttaaatggtgagagtagacgtagcaaactagtctaatcgcgaactaaaccactttatattttttgaacgaaatagaaattgttgtagttttctataaattattttttaataatctccaaatagagcaacgtatccacttatatatataaccttatctctttttttattggagaaaaaaaaagtacactgtgataatttgaactcatatatatacacactagttgtgtgtgcttgtcttaagaaaaaacaatgggatcaatggctcagaaatcggttttgatgttatgcggagagttcatggaagcctacgagactatagtacctctctacgtcctccaagcgtttggtgttagcgtccactgcgtttctcctggtcgcaaaactggcgacaagtgcgtcatggccgctcacgatctccttggcctcgaggcatttctcgaatctttcactttttcttcatttcagtttttttcccttgcaatcgttctttgcatatttagtaaaacaatgcgatcaaatgctcataattgggtggactttcccctttattatctttatccaaaaagtttagataattgggtggtctcaacccaaaatgcatgggcctactcttaacagtaaaaaagaagagtttcaatttgacttttacctttttacagatatacaccgaactggtggttgaccatctaacactaaacgctaacttcgatggcgtcatccccgaccaatacgacgccatcatcattcccggtggacgtttcacggaacttttgagcgccgacgagaaatgcgtgagtcttgttgctagattcgccgaactcaagaagctcatcttcacgagctgccacagccagctgtttcttgcggcggcaggtctgctcaccggtggaatgaagtgcacggcgttcgaaagcatgaaaccgtttatcgagctctccggcggcgcatggtggcaacagcctggagtccagacccttttcgaaatcactgattgtgtcaaggacggcagtttcatgtccactatggggtggccaacgcttggccatagtctcaaagttttgttagaatcacttggctccaagatttctagctctaaagagaatcatcagacttctttgcttttcttgattggggtaagtagcttattttcataagactctcttttagactttatatattggaattaaaaaaatggtctgactaatacgtaattttggtatatttaggattgtgttgaagattatagtatcaacgtaccatttaaagcgtttcaagctttgggatgtaaagtggatgcagtgacgccaaccaagaagagaggtgagaaatgcgctacaatcgtacacgaccttgaagacggacggcaacttcctactgagaagtttggtcacaacttctatgtgaccgttgcgtgggatgatgtctctgtggatgattacgactgcattgtggttcccggaggaagatctccggagctcttggtgatgaaccccaaggccgtcgaattggtcagaaagtttgttgagaaaggcaagtttgttgctgccattggaatgggaaattggctacttgccgccacaggcgcccttaaggtaatatacaccgttttacaaaaattcgttttactattctaaagacttaaaagttaaaactgaagccgaaccaaaccatattttaatttaaacgaaacaaaaatgtcaagataagttgctctaagcacataggaatctcctatggttatggttatgactaatattattccagcatattgttgaaggttagtaagatataattcatcacatttatggcaccacttccttagcatagattataatttttgccagcttgttataactcatctaattcccattgtggcatgctatattattacattgcagaagaagagatgtgcaagtagttatgggacaaaggtggctgtgaaggttgctggtggtgagatcgtggaatctgaacggtgcgtgaccgacgacaagctggtcacagccgcatcaacttccgatcttcctgcctttttgtatgcattgtcgactgcacttggtctctctgttgtattctaatgtcaagtggtgctttaacgtctaatgcctaaaaaaataaaaacatatctttgtatgtcgaaatataaggtcgtccctctaattatttatgtacaagcttggatttgcatatatatatgggaagaagagttgccacacttgcttacacctcttctaattgtgtttttttataagaaattaccactatcaagttgtcattctcctcgttttacatttggtaaacaagctctattgaccatttatgttgtaacactacttcaagactaaagttgattagagatagcaaaatctgtcaccagcaaattgtgtttccttgttaaatactagtaacagattccaaacacattaaattttgtgaagttaaatttaacaacatactataaaataaaacaacacataaacggattaaagacgttaatgttcatccaaaaagtatactgaacttttaaataatttaccgacgaattgtactgtttatatccgaccaatatagttaatcacattttaatcactgcataaatttactcataggaattacaattaccgaattagtttcggtttaaaatttgttggatcaataaaacaaaaaaaaaaaaacgatgccagaatattccgttcgtcggcgtagtctttcccgcccccaaattatctgagcaaaaaccctagactctcgatttcgtcacgattttctcaatcaccttcactatactgcttcgatggactctcactcttcccacctcaacgccgccaatcgttcccgcagttctcagactccttctccttctcattccgcctccgcctccgtcacttcttctctccacaaacgcaaactcgccgccaccacggcagcgaatgcagccgcttctgaagatcacgcccctccttcttcctctttccctccttcctccttctctgccgatactcgcgacggcgctttaacctccaacgatgaactcgagagcatctccgctcgcggcgccgatacagattcagatcctgatgaatcagaggatatagtcgtggatgatgacgaggacgaatttgctcctgaacaggaccaggactcttctatccgcacattcaccgccgctcgactcgattccagctctggagtcaacggttcgagtcgcaacactaaacttaagacggaaagctccacggtgaagcttgagagctctgatggtggaaaagatggtggatcatctgtggttgggactggtgtgagtggcactgttggaggaagctcaatctcagggctcgtgccaaaggatgagtctgttaaggtattggctgagaatttccagactagcggagcttacattgccagagaagaggctttgaaaagagaggtagcttatcactggatctatgctaatgaattactagatgagttcagagaatcgccattgacaaatttggtgatatctttcatttaggagcaagcaggacgactcaaatttgtttgttactcaaatgattccattgatgagcatatgatgtggtaatgccttccatcatttgtctcctgccattgaatttagcttctaatcagctatgcattcttcgttctaacctcgttttttatgaataatttgttgaatgtattccagcttgattgggttgaagaacatttttgcaagacagttacctaatatgcccaaggagtacattgttcgtcttctgatggataggtaaacatgctaaactaaagtgaaacattgacaatttttgtaacaaacaatcgcaaatggtaagcattctaatatctgtaacttatgttatttgcccaggaaacataagtctgttatggtactaagagggaatctagttgtaggtggtatcacgtatcgtccatatcacaggtaaggttttcgcataactcttcccatcttttgacccagtgatgattttctccaccatatgtatgtgaatacgcttatacagctttttgctgtttagagagtagcatgttgacttgttatcttatattatcatcaaacacagcttacttttcctatagaatatttctgaaactgtctgatgtcataatgagcatgaatacagtcttgacatgcttattaactccattgtttccctgggattcagtcagaagtttggggaaatagcattttgtgcaatcacagcagatgaacaagtaaaaggttacggtaccagattgatgaaccacttgaaacaacatgcacgtgatgttgatggattgacgcattttcttacttatgctgacaacaatgctgttggttacttcgtcaagcaggttggtgtttcgtatattgtgcaattttttgctctatttttaatctctcaacaaacttcgaccaactgtagtacattccagaaaagtagttgaactgtgttttggatgtaatgttttctattggttaataggagatacctcagagtttcacttctaaaagttctgtttccacacttagctatcaagtctactttctggattctaactgtaatttttatattcttacagtcgtccactaagttgatctgttacgtctattatcttgtgcagggttttactaaagagatttacttggagaaagatgtatggcatgggtatggaaactatgtatctcttaagttcaaactgctcatttaccattcttaacttctgtgctttatctgtatgatgtctaacttaaatatttgttggcccaattaagctcacaaaccttagaatacaagcattttattgcgtggctgattatgctacgagagagctatttaaaacttgtctttatcattctcttcttcatcttgaaacttacttttgcaaataaaaacctttgaaattttcttaggttcattaaagactatgatggtggtctccttatggaatgcaaaattgatccaaagctgccatatacggatttgtcaagcatgatacgccagcaaagaaaggtaagcctttgaaaataccttttatgtggtgaaaaaatatctcgagccttcaggttcatctatacccaaatagttcttcaggttacgaagctatttgtttactttctttactttcactatttaactctagcattatggctgattctgaaaaaaattaaaaacataagaaatacaaacttgaggattcgattattgaaagttcctctcttctctctctcgaggaattaattaatggaaattcctgtcttcccctatgagcccaaaaatcaagctgccctcccaaaagctatctgctttcaagagagcatagcaacgtaacactaaacgagtaaccattgttacatttctgtctaattatacgtatcagtttctgatccggttgtacttttataatatcaggcaattgatgaaaggataagagagttatcaaactgtcagaatgtgtatccaaaaattgagtttctaaaggtaaacatcaatggtttcatgtcttgtggctattattgtatacaatgtttccagtagtaataataaatgagatgatttttgcagaatgaagctggaattcctagaaagattatcaaagttgaggaaatacgtggcttaagtaagttatgattctacttgatggtgttattgcagtttcttacccaaaatatagacatatctccctttaaaatgttctagtcatctcaaaattaagattgtgctagtcgctccatgagatcaagttgatatgcatgtttgagattctcctgcatttgttagctgtgggctaagggtttatctgtaatacatgaattggctaattcatgaattatggtatactgttgcaggggaagctggttggaccccagatcagtgggggcacactcgtttcaaattattcaatggttctgctgatatggtgacaaatcaaaaacagttgaatgcactcatgcgtgcgcttttaaaggttgtgataaatcttttttgttttgttattaattattatgtcctcttacatattatgttattgcaattacatgccctttaatttgacaagctgtagttaattgctacagacaatgcaagaccatgctgatgcttggcctttcaaagaaccagtggattctcgcgatgtccctgattactatgacatcattaaggatcccattggtaagaagatatagttaaaatatcaatttcgctattaattatccagaatttgtcctctttttaagtagaagtgttaaatcactttggtaaccaaaaaatggtttgaacacagatctgaaggtaattgcaaagagggtagagtcggaacagtattacgtgacattggatatgtttgttgcggatgcgagacggatgtttaacaattgtagaacttacaactcccccgataccatttattacaaatgtgcaaccaggtaagacgtttttttctttcatttcatttcttctcttcttattcagtaatgaaatagtgcatttactttgtttttctttctcttaaaaggttggaaacacacttccatagcaaagtacaagcaggtctccaatctggtgctaaatctcaatagaagaagatggtagaggttatattaatatcattttctagatctttcattttaagatactttcattggaactgggaatacatgtatactattttaggcccatgtatactggagcttaattgtttgtatgtttttttttcggataggtaaatatttgatttagttagattcagaatgtttaagtttttactttgtaggttaaatttgttctataaagcttatttccaactgtaaagacacatttcattttactaaatgtttctgatgaaaatcacataaccaaattttgatatcgaacgggatcaccagtttcggtggttttgatcggatcaacaatggtgaagagaatgagcgtcatgggtcatttgtgtttacacgcttacactcacgcttacgctgcacagatttctttaatctgatgaatgtgagttgttgttgctcaacatttcgttaaaacggttacgtttgccataagtaactattgatacatttgtgtttatacgcttacgctgctgcacatgtttacgtgattacgtctacgaccatttcaacttcgatttgccttagaagcacgatagcttatacattcttccatcatgtccaatcatatatataatattaagagtttaccgtcgctgagtcatacagtaaataaaaatacagacaatagttacctcaatcaaaatcacaaaaccaatgactctttttctggttaatgcttgtgattccaatggggtagggtttcatacagattagaatcaggagcaaatggattctgcatgccttcacggttcacctgttccggcaagaaatttgccgtctccactctctgattttgtgctaaaccagcactggtgttggtacttgaatttgctggtttcaaaatgtggttagagtttggcggaatactagaggaagcactcggtgtgttgctgaatggtatgcccatgtttggtcttgaccaatgcaaagggttcactcctgtcactcttttcacagtttcctctgccatcttaacctgcacaggttttttatcaatgcaattaacttagttattaaatcataatcttgggtgttttaaattcttaacactcgtgagtcacaagagtacctttgttctcaaagtttcgatatcagctcttagaattctgttgtcaacagcagctgcatcatacttatgattcatgtcactaagacgattaattaaagttgaatgctcggctcttaattggcctacctacaattggtaaaaactttacctataaacccctgaagactgttgaaaagtaagaaagactcgagaaatgtataaatgtatgagcaactaataaaagaccgaacctgtgtatcaaattcattcatttgttcttgctttcttctcctagagcgcctagcggattctcggtttgagagcatcctgggtaattacaaaaaaaaaaaaatgaatcaggatgaccttcgaaaaagttaaatatatagagcctgactgtttcctaagaacaacagtcacaacataaaattgactgaaacattcctctactagatttcagttctttctttctctttagagagagtagaaagtagaaactattaggtacaagccttttcccaaaagcatgtctatatctatcagcctcgagattcagaacgattaccagaaacattctaaggtacaaaaatcaagatttgtacctcctagcacgcttcacatcagtaggatctccattatctgcgtctccatcaagatcatcgtcatcagaatcatctcgtgatgaaatactagtttgtctggctggaacatcaggtttcttttgcgtgcttgttgtgggagaaaatctaacagatgaagcaccaggtgaggtttgtgccacaatggagcctagataatttcaaaataatcccattatccactaactgaaaaacatttcatccaggtacatatcacaagaagcgggaaataagaaagctatctagtataatgcactaacttacactaataagaatggagagtcaaaaggctaagaattctcatctaaacgcataatactacgtatgccttgtttctttcttctcagagaaaaaattgactcgactagaacagaattaaatatgaatgaacacagagaaagctgtcatctccaaaacaaagcctacttatcttcaaattcccttaaagtcttgagtttactgagagagattagcagttaattaattgtctaatcaaattgacaaacaaatctcgatgaaatgtttgctctctatgtaatctaaacattgacattgacgagagacaaagctagagagagtcaaaaaaccaaaaccaaaacaaagcaacgatacgtgaccttgagcttgtttttgattgctagctgaagcactcgaatcttccggtttcacagttcccacctgaagaaaatcatatcaaatcaacacacaaccaaacattccttattgttgaaatcatcaattcctttaatctgaatacacataagaaatggatctaagagacgtacacgacgagcaacagcagcgcaagcaagctcgagcttgctcttaagaatcgcatgatactgattaggatcaacaacaacaggagctgaagaatcaaccggatcagacgacggagcacgattccgattcttcccttgatcatcaacagggagccgtcgatgattctgcggtttctgaatctcaacaacatcttcggtttcgtcaacggtttcttctaatctcgaaagagactgaaccggtggaggtgatctctcgattgtgttagtcgtagggctcgaatcggaaccagacaactcattgataagcctgtggaacgcccactccgattgacttcgagtcatcccatccgccacgttctgcgtcggtgacggagtcgatgacgatcccggcgacggcgccggagcgggaacaggccagaaggattcggtcaaatcatcgacagagaagacgatgtgcatcgcttacccaatcgcctcaaattcttcttcttcttttttctctctctctctctctctcgctctttccttaatttgtttttgtcttacgtggagccgccattattgattaggatacttgacacgtttctgtattgtattggattagtactaaccaacatatcttttttctgttaataatttaataaaaatgcaaattaaggcattcaaaggcattttaaatttctactttagttgatgtgtgtcatttactttgtgggcaaaagggtaagaataatgtgttggctttatagataagcagcttaggtttcctttgtcttttttaactccttcctctcattttcttgatttgatagctactctctcttattcatatcatcagtaagatattctcaccacatatgatgcatgagtaagcaagctttaaacaagtaaaggaggaactcagtgagactgaagaaagtggtaacccaaagaggttacaaccgaggagctgcaaacatagcctgacttcaagagacccgaggggataaaccgaataagaatcaaagtcacctaagtcagcttatggtaaaaagaaggtaagagtgtattcattggaaatcctatgtaacttgatcataacagcgttctttgagttaaacattgtgaatattagattatgtgcctatcatctaagtttcaatgaaaaaagaaacacagatatttatatactactagcatagctgagcaatttcaattatccatcctgaaaactcatacataccacacatagatgctaatacgactatgtgaacaaaagcaataggaattactcacgcttttaacaatctcttggctcagttgattccaaccactagataccaaggttcttcttgaagttggctttgtatatctctgaaacagcactggcagtatcagcaacaccggttttgatctccgatatcttcgaatccatgtactctttctgtttcgatatcgaatcgataagtgcaaagagttgtgcagcacatgcttggacctcctcttcactctccttcactgcttcttgcaatctaagctccgaagcttttacaaactcagcagcttctttctccacaacctccagattcaaagcctcagctttcacactctcaaccaatgttttcgcctccaaatcacattttgtactcaactcctgagtttccttcttcaccaacttcatcttttcttcgaggtcattgatctgcaactgaattgacccaagaagactccttttggattcgatcttcgaagccatttcagacttatggtgctgtaaagtgaccaattcctccactttctccgccgagcttcctttgatcccatcgcacaacgaacacagagctggcttcaccaccgatttataatccacacccatcaccgctgcaggtgtttcccctctctcgttaacagcgaactgaatatcaagcttcaatctcctgagagcttggttgcagtcaatggcaagtgtctgaatctgatgaaactgattcctaatctgtgaattgagttcccaagctttctgatcccaaccatctctagcaacctcagcatccgcaacatctctttccacagcttgtaactctcttctcatcctatttacatccgccgcgctaaagttctgaagctccacactcttcttcaactccttattctctacagagattcgctctctctcttcttccttagctttgagctccttagctttctcctccacaactttctccatcgctggattcctatcagtatactccacaacaatagttcggaacttgtttacgtcattctccaaatcggctttaactttctccagagactctttcttcgaaggacctttcctcagtgactcaagtttagcctccaattcaccggagattttctcacaaccagagatagtttcagcgacgctagtcttctccgcttccaatttacccaaaaattgagaatctaaatcgttaaccttatcatcctcgccgcgaatgaagtgaccaaagctttgaatcgcgaagaaattcatggagttatcttcgggtacggaggtggaattagatactagatgttgatggaaacgagcaagctcagctaaccagtgaacaacggcgagaacagtaggccaattgtgaggcgtatttggagctttgaggctagatttggtgatcttaaaaggacatttctgcgatttgagaaagaagacgagatcctcgtcccatttgatggaatcgcaagggtaatctaaagctgagagcaagaattttagggtttcggagatgtctttgacagaaggaacaggattaccgcggatagagatcgggaagttatgtgtggagaggaaggcgttaatgaatcgaatcatcgaagatctgtcatcggaggctcctcggccgcctaaaccgattgatgaaggacggctgctggcgaaactggcgtcggagtctcttgagttaaagaggtgacgttgttgctcgattgatggtggaggtggcggcggcgctccgccgaaacccaccgtcgttcttctctttcccgcggctccgcctctcatctcttttttgctttttacagataaagcaactgacactggaactggatcgggaaatatatttctatagagcagcgggatggattacttttgtaatttgaattttcgaaaacctaaaaaaacctcttcgaatttctttgtttttttatttctcattcatttcaaaagaaattatatatagggttgttttgttctggtttaatcgaaccataatatcaaaccgggtcgcaaatttatcgaaccaaattggaaaacaatttgagtcataacgtttttattattctgtgtaaaccgagcaactggttgtgtggcttgagtcacagtaacttattaatcatacttgaaatgtatcaaaagattgagacatcattgtcacacaccgataataatcaaaaacacaatctaaagatgttgtctgcaaatgtttgtgtttcaaagaagagcagatttaagagacttggttagtttctcaagctccttaagtccttcagttggcgactttgcatcacccaatagctttaccattgcactgcctacgatcactccatcagctccccatccagctatctgttgacacaacaaaactagtcagcaaagaagtaactatgaagacaacataagagaagctttgtaaggtttaggacctgtttcacatgctccggctttgatattccaaaaccgactgccaccggcttgtctgtcgcctgcattgaattacaaatgactaaacaacttgagcatttctacatcatttcaagatatttgagaaacaatctttaaaaaaaaaactgttattagacctctttgatatccttcaagagcgactgaacctttccgcttacagatgatcgtgcaccagtcactccaattgagctcacctgttaaacccaaaaaaagggccaatacattctcaaattaagtaaacacatgtgacatctgcaaagagaaatatacactgagagggatcttacaaggtaaataaatccttctgacgcatcaacaattagcttcattcgctctgttggtgtggttggtgtagtgagtaggaccttgattacaaacattgagcaaaattatgtttactaaaaggcaaagatactgaaagccgaatgtcaaaatagatcgaggcagatccagcaaaacacatgtatagtactgtagtctcagtgtctacactaaacaatgcttctactgtttctattgataaggctggcaaataaatctccacagagacaaatgatacgtaggttcagctaagaaaaaccaaattcgaggagacgaagaaaataaataagatacacaaatgaatctatactgcactggcatgactgagaatcatgctaccaagatatatgcgtccttcagattatatgcttaccagctcaatgtcgttgttgagggcttcttttctcagcatctcagtttcctcaagaggaacatcgggaaccacaagtccctgtacaccaacagctctgatgctggacatgaacttccccaacccacgtttaagaatcgggttgtaatacgtgaacaacgaaatcggacaagatatttgtggaacaacctgcaccaagtccaacaataagaacacacatataggaacgatatctgacaggggacacaaacacacatctttccttcagaaactaaactcaccttatccaacatctcaaggatgctatcgaggtttgttcccctctccaacgaccttgttgccgcagcctagttgaatagataacaaagagcaagatgatcaaacaaaaaaaaggcaagggaagcatatataaaggttgcattttgatagttggtttaaacctgaataacaggtccatcagctaaagggtcagagtaaggaacacccaattcgattatgtcagaaccacaagcatcaagaactttcaatgcttcagcagtagtagagagatccggatcaccagctgtgatatatggtatgaatgctaccttcacacataaaagttaaacaaattgcaaatgaactgtaaattacaaaatccaatcgtatcagtaagaccaagattgcaaacctaatcaaactcaatgctaactcaatctgataagaagaattcataagcaataacaacacatggttttgtgattctttcaaatccaaatttcccaccagaactaacgataagttttaaaagtccaattcttgaggaacggattggaatatgaaagacggagaattaacgtactttgccttgttttttgagctgtgtgaaagtatcagcgagaccgagagtaggagaagaggtggagagagaagccatgggagtgaatctcttgaaagaaagcgatgaatcaggaggagaagaatggcggaatccaatttgagattttggggattggaggaagaagacgccggatttgaaagcaatcgccatttgaaaaactttgtggaattttggaaatgagtttggttgaagaagagcgagtgtttatttttatatataaaaactgagtaacagcgattccacgtttgagatatatgaaaaaaatgaggtaggtgaaatctaccagccaagagtattcaggcgccgtcacttacatcttcgagctattttgacttctgacttgctcttccatctttgttttgtaaaaatcaaacacccatatttttgtttttccattttgtaagatatttgatttcattattaaaatttgactaaagattattctttgataaagattagtatatttgaactttctaaactatttgaataaaaaaagatgaacaagattagagtttggtggagaagattagagttgtatattgtatatgatttgcgagaaagagagaccaaataaatttgaccaattattcttatgtgaaacaagtaacaaatcataaacaaaagtctgaaatcaaagaaaatacccctagtactctagtagtatataatttaaacaaatacagaatgttatcatacaatttattcgaagcaattggagaacaatgataaacatgtaaagttgataagtgaaacaacagaagagaacgtgatccaacataatctgatgtacacagtacagtaaatataaatatggtagacgaaaattgtgacgagtccaataaaaggattattaatgtataatggtacacatttctttctccaacttccttctcttccctgcataaataccatcttcccttgtctgcaaaatatgaaaaaactttcagatacatatctttcttgctttcttaattctctctcaaaaaactaaaactaaaactcacttcttggtataatgaaggtaaagctt

SEQ ID NO: 1361 - DNA, 90335 bp, Arabidopsis thaliana
aagcttgaatccttttagatgcatcagccaagcgtttccgtggcatatggttctcaccagccgagaagttttcagaaacctatcacaaataaggagacgcttcttaagagtttgggttgggtgtgactcaaacagattgttttttactaatcacatgtctaagacatcacagatgttcaagggattacctgttttcggatagctccggtcaataggccttgacatcctgatgcgtacacaagttgtaactttggacattgtagcaccagactctccggatgcaaattactgcataagttcaagttcaagtccatgagctctgggcagtttaggaacaaagcctgcatcaaaagatcgaaactatgagaagatggtattaaggtttgaacttgtttagagagcattgatgagaggaatctcacgtccaaactggagcatccccacaaactaagtttcttcagccgtttatgtttgataaacatcttttgattgtagcctggtgttttatgtggacttggattctctacaaaggtcggattatctgagttgggatcagagacagtcatgccacaatccatcagctcaagaaggggcaattgagcagtagcaaattgaatgccacctacgagaatattcattataatagaaatgagaaaccaggggataatctcataaaatataatacatatgcaaaccaaagatcaagaatttacttgatgtaatgttgggacaaagagcaacaagtaattttgagagtgtatcaggtaagacatcgcagatcatcccgaggccagtatcagtaatgctggaactaaaaccaacaaaaaatcatgtctcagaaaaacgctcttcatgtgtactattctgaaacctctagaaatatagacaggatatactgaacgagaacaaaacatacccactcagatcaagcagttcaaggtttttgtaacctgaggaaatggcagctacagatgcatcagtgatatttattccaagaactagcgagagcattctcaaatacctggataaaaaggaaactgacatcaatcactaagaacaactgctctcaaatgaaaatagtggactaaatgtgcataagaaacaaacaaaaccaagctataaatagaggtatttgacaaacctgaaattcacagcagtaagagaaagtacaacagtatgtgaaagcttcaaagaggctatatggatgttctgcaatctagtgcaagtccttcccaaaccatcaaccattgttacaagatcagttgaatcatcttcttggcgagaaaattcaagtgatatttccgtaagatttggacagttgaagatctgacaaaacaaaatatattgcagtttagatttgcaaattctcttcctgagctataaaaatgggagaaaaagggaacttcaattaccatctttgagagagaatgaagatccgagagccaaagagtggagaggcttgatgaagagagggaaaatcctcccaaattggaacatccttccatcttaaggcttgttagtcctcgtttattagcaacaaaccgactcagctcatccctattcagacaaatagaccattgaacaatcaaagacagatccacagaagaacaaacaactattattaagtcgtccaaaaccataaagcccctcagaagcaaatcaatgataaatctctgcaaaatgacagcttaagacagatgaatgtatagtaaacagaaccaacaatttctacaattcatgacatgatcacatatcaaactcaaaaatctgaaactcgaacaagactatttacccagaaatcctattgacagctgcacccgaagttgtaatctccaaaacctccaggttaggacaagaaaatgcaatgcaagccagagtcgtcgcgtcaaaatcactgcagggcaagcaaatccaatcagaaacatgtattgtcacaataaattgcaattaatcaattaatacttttgttcttcaattatcgataattcttaagtgttctttaatcattaaactctaattagtacggtgagatgaataaactcacagatctaataatagatcttacgatagaagaagaatcacctctcgattttaagtgagagtctaataagtcgaggacatttttgtaataaggatccaatgtatccaatctgagctctctccggaaccctaatccgaagctcctcagccgctttccacatcttcctcgatgtctctctccatcctttgcaaaccctagccgccatcagtaaactagacggaggtagccgcttaagcacctcccataaacccaccgcatgaaacctcccaggctgaacaatatccgtatccaattgtagatccagatccatcgatgcagcatccagatcggattcatcgagtgaattacgcgcatcgacgtcatcgaacgataaagctcggcgtaagtgagtgaaggtctgtcgcgatgacggcgccgctgttaaagataagacagtagaacgggaagaagatgcggcggcggagatgcagctcactggctcagaagcgatcggagtagtgggaatatcaggtggagcagttaaaagacagacatggcctttcttaggttgaccacatctaccgcaattgtaacttcctcggttttttctactgcgctgagattcaagcgcggctgagatcgcggcagttgcggtgttcggagaaatatgcggctgaggttgcatcgtgagattttgggagagggagagagagagagattggagcttgggaatgagattagattgagatttgtgagattgggagggagagatggaaaaaaataataaaggagggaaggaacggcgggagataaaatggtgttttcgcgcgattgatttcgaaagacaccgaagctaaaatgttaaaaatgaaaattgtagccgctcagctaattgaaagagcgtgaggtctagcttggtgaatgacagttttgtccttggttttggaatagatcacgtcacgtggtcttttttttgtagacgttgggatccactgtacttaacctgtgctgaaaatagttgactaatattagtactattttgtaaggaaaagattcttcctaaaaacaattagtagtaaattagttactagttaaagagttattaaagcaaattacactacaaaataataataagaatctggaaatcgtgtcgcgataagccaataaatataattatgacatatttgctttatcatagttggaaatctcttggatatatcttttttaaaaaaattctttcttctatctatttttgaaaaatttaatggccattcaaagttttagagatattgttacttataatagtgatttttagttatataagtatattaattataatacttaatgtatatatttcctttttgttattaatcaaaacgtatctctttaaaaagtatatatttgtttatgaattttttagtcaactattagtttttaacttttcaaaaatcaaatcaattttaaacagtaataatgtacagtcgaaccataaatatgattatggtaggagactctgaaatctgaatatgataatgactcaaggatttggtgatcgtgttgaatttcttgtcaaaactcaaaacctcatttgattcgcaacgatgctgatatgaggtctcccgtggtgacttcaaagagacaagttcaacacaatagaaaacaaaaatactacaaatccaaataaaactcgaaactgttatatctatacagccttcattatgatgtcacaagaactgaaagcttcagttttagagctctttcggaatagttacaacctctctctctcgaggaatttggtcgtgtgtcaaacgatcaaaagtattgcaggacagcgatcatatcttcacacgacattatgaaaaaatattctctgccaaaagaaaagcttcttcttcacagacacaatgttctcctgcaaacatgcaagtcaaatatcaaacaccgttatggaggagaattctagtctaccctatttttccggggtgggcagaaacaaagctttggccctaattgacatcttacttaagcatggtatgagctaatgcattgcatgtcttttctaattttaggaattaggaccaatacttcggaaactggtgaatgaataccttatcagggggctccaatgccgtaaatacaatcttttttgcaaccttctctacaccccagcagctgttttagcttcaggacttgcctttccctgaaatgaaattggacatacacatctcactcagttccaatcattttcccatgttgcaaaaccacgagaaataactagatggataagttttgactgttcacaaacaaacctcagaggagtctttgcggaatttcctggttggagccctcatagtgacaaactcctcagctgctgtggggtgaacacccactgtagcatcaaagtcggccttagttaaaccagctttaactgcaaccccaaatccctgaaaaattgtaaaataaaattcatattcaatcatatatgttttccgtgattacttttcagagaataccaatcatgttaaaaaatgaaacctggatgatttctggtgaatcttctccacacatgtgaacaccgagaactttattggtgtttgcacagacaatgagtttcataaatactcggtctggaagtcctgaaagggtagcctttaatggcctaaagttcgatgtgtaaacatccacatcaccatattgttctatggcctgcaaacacgtagttaatatttctatgtagtggcatgcatgataaaccatatttttgacaaatcatcctacttacctgctcttcagttagaccaactgttccaataggtggctgggagaaaacggcgcagggaacagctctagttgattatagaacacagaaaggataaaagccatcagagacaacagttataaaatgttatagatcactgatgcagcatgtaagactaaacagagaaaaactctcatcaatcaccaaaaaatcccaaaggtttaaacatcaaaagttaagattgttatgttacctataatcaggctttgttggctcattttgaaacaaagttttagccaatgcacctccctccatcaaagcaactggagtcaaattgattcggtcagtaacatccccaacagcccagatggatggaacagatgtctgtgaatattcgtcaaccttacaaaaaaaaagtggaaacatggagcacaatcacaagaagtaaccaggtataacaagagaactgtgcacaatgcaataatagaaatcctaagtgacaaaaaaactaggtaaaacactggatcatacctctattgctccatttttcgccattttaacgccaacattctccaaccctaagttctgttataacagccaacattacatcaatgaacaatcatattccattaaagtcataaacaaggggcagcagtggtcagtttatcttagacaaattattaaaggatgaactttgctaccagttttcattttataaacatcctttggaaaataataaaaatcacactatacctttgtgttgggcttgcgaccagttgcaaacataacatgcgaaaatccctcaacagttcccttgctggtcttcagagagaacgagccatctccagctttgatgatggcttcaggggattcttcagtgtgaaactcaatacctcttaaagacatctgctctccaacgaaatccctgacctgaaacaagaataacaattacaattagaaaatatccagacggataaatgaaagcagcaaaagtcattctcaattttttacttacatcttcatcaaatcccctcagcaccttcttttgccttataaatacatgaacttcacagttaagaccattgaagatccccgcaaactccagggctatgtagccaccaccaactattgcaattttcttaggcttggaaggcaaatcaagcgcggcatcagaatcaatagcaaactcttttcctggaatgtcaggaatgaaaggacgtccaccaactgcaatcagaatattcctcgtagtatagattttcccatctacatcaacagtgtgtgggtctataacctacacatataaaatacatactcaagctcaaatcaatacatagaggttaactcatgaactatataaacaccgagcctcggcatacctttccacgaccttcaatcaacttgacattagctttgctcagtatattcttataaataccagtcaaccgctgtaactcagcattcttgttagcaatcaaagtagtccaatcatgagaaggctcagtctcatacttccaaccaaatccatgactgtcttcaaactcatgactgtatttggatgcatacacaagtaacttctttggtacacatcctctcaatacacacctgcaaaataaccaaaaatgagtagacaacacaatcaaaccataaatcatcaagcaaatgcttcaaattctggtatagctactactaaagtcaaattcactagctatcgatataagccacaagaaggaagaaatcttacgttcctccaacgcctccagcagtatcggaagagatagtggaaaaaggaagctcgcaaacggcggcggatgcaccgaagctagtggcgaagcgagaggcgcggacgccgccgcttccggcaccgatagtgaagagatcaaaatcgtagtggcggtctgattcagctccattatcggtactggcacaaacagaaaaccggcgagagtggtaatagcggtggtttgagagtagggcgatacggggacggagagaatagagagaggttagggttttaggaagcgagagaaagctagaggaagaagatgatggtagatgaattgcgattgggagttttttgcagaggaattgaagagatggagaagatgatgaaattgtactggtaagcttcggggtcgaagccatctccacgattcttcttctctctctctctttcttttttttttcttttttagtttgggtgtgtgtatttatgtaaaagctttatttcgataattctacttgtggcatttagatttatgacatgtcttattgttttttaacaatttataaacatgtttttatgtgtggtcgtaaaacgctaccaaactgacaataactccacctacgcccggtttatgacacgaatacaaacttcatcaaatctaaatgatgacttagtaataccattttgatgtaatcacttatacatacaagtggaaccaaaatcttttaatttgtactattagttttatacttctacatcttacccttttttattatttttgtacggtttactattttctgtaccgttagaaagttatacgatttgtgttatcaacgtatgtacctgtaaactataaagggaaaaatatcaattaatctcctaactttcaaaaaatggtcattttatacatcaatttcgtatgcggctgtttaaaacatgaattaaatgttgactaacttttaaaacatgattattcgttgatcatgccaaaatagacatgtcgttatcagtcattaacggaacttctaacgtccgttatcatccgttaacgactttattagtcaagttttaaattgtggtcaatttaaacatcgactttatatgtggcaattttaaacatgaactaagcgttgactaccatttaaaacatgagaaattcgttgaccaagccaaaataaacatgttgtcatcattcattaaaagaacttataacattcattatcacttgttaacgactctattagtatccctaaaacgactttgttttgagaataatcaaaagaaaatcaggattgttttctaaatgaaaccccagttccccaaatctatttctacaaccgctcaaacaagacgaacaatcttataatgagtcttcaatttgcttccatgattcaatttcaaatttaaaacaaatatataaacgaaaatacctttatttgcttccaattactgacactgcgattatctctttatcaaactatgttcttgggttctacttaaaactttttgatatggagatttcatatgggaaaaatctttatgttctttcgattattctcaaacgacgttgttttggacagattaacagttattaacgggtttctaggttctactgataaagacatgtctattttggtctggtcaacgatatttttatgtcttaaatggtagtcaacgtttagttcatgttttaaatggccacataaaaagttgatgtttaaaatggccacaatttaaaacttgactaataaagttaacggatgataacggacgttagaaattccgttaatgactgataacggcatgtctattttggcctggtcaacgaaagatcatgttttaaaatttaatcaacgtttagttcatgttttaaacggccatatacgaagttgatgtataaaatggctattttttaaaagttggaggattaaatgacatttttcccaaactataaattagcaagactttttaaccacacttttgtggagcatccaccacgacttttaaactccatgaatcgttgtacaaagaccatttggctatggagaatcttcatggaagaaccagaaataactagctcaacttcccttgattcctataactcatgggataccgacttgagtgattaaactagaaaatcgtgaaaataatgtaattggctgcataatagtttttttcacactattaaaaaaaaacttgcaagtttatagtttgatccgtgcatggacgagattggatgtcattcgtggtctttttccggctatatttgactaccttcaagtttaagctacaaaatgatcatagaactaaagaatggttagcaatagcaatgatttaataaccctttgacattccttttttagttcaatggattctaagcacactatgaaacaatatttttcctaaatctttaacacgactattttttttttcttaataggatttcattgataaaaagatttaaggtgaattacaaaaagccgataagtatatgaacacttccgaaaacattagtcggcgagtacaaaaacattatgcagacaaaaaccaagcaaggtaaacaaaggggaaaaatgaacaaacatactacacaaacatccatcaatattttctggatcagaatctagaaacccataaaaagatgaacaaaacctaaactttaccaatttaacaaatcatttagaaaacacacaaacaggttacaatacaaaaatcttctttacaaagttaaaaccgaatgaaaacttgacactactaatctataaacatgagtatatatagtttttcttgcaaaatatcataaaaacttgattattttttttaaaaacataagatagaacaatttagtcgagcccatacgaaactacgccgtatcattcggcccagccctttgattaaaaaattaaacgcactgtgagtctgtgaaatctcctcggcttcaacttccggattaaggggaagagatgaaattctgaaatcccttgagagaaagatttgtttcgcctctcaaaacattttcaattcccgccaattttcttctccgagaatacccccaaccttctagaaaccctaatttggtttaatttcattctccactactttctctgaaaccaaactcgagatctctcccccaatcatgcctgcgatacaatccccatcggggaagatcttgcagcttgagatggagaatttcaaatcttacaagggtcatcaattggttggtcctttcaaggatttcactgctattattggtcccaacggttctggcaaatctaacctaatggacgctattagcttcgtcctcggcgttcgtaccggtcaacttcgtggttctcagcttaaggatcttatctacgcttttgatgatcgtgacaaggaacagagaggtcgtaaagcttttgttcgactcgtttatcagatggacgatggagtagagcttcgtttcactcgttctattactagcgctggtgggagtgagtaccgtattgataatagggttgtgaatttggatgagtacaatgggaagctacgatctcttgggatacttgttaaggctcgtaatttcttggtctttcaggttgttgcttcgatttaattctatttttgtattgtttctatgaacgattctgtttgtttgatgtgaatttcgtgtttaattgttctggattgcaaaatgtagggtgatgttgaatctattgcttcgaagaatccaaaagaacttactggactcctcgaggagatttctggttccgaggagcttaagaaagagtatgaaggactagaagaaaagaaggccagcgctgaagaaaaagcagctcttatataccagaagaagaaaacaattggaaatgagaagaagctgaagaaagcacaaaaggaagaagctgagaagcatctaaggctgcaggaagaactggtatttatgtggatttgctcttgttctctagtggagaagtgctgatttatttagtttgtgaactagcgtatctgcctacctgttaatctgtcttcacgccttgcagaaagctctgaagagagaacgcttcctatggcaattatataacattgaaaatgatatcgagaaggcgaatgaggatgttgattctgaaaagagcaatcgtaaagatgtcatgagagagctggaaaagtttgaacgtgaggcaggtaagagaaaggtagagcaagcaaagtatctgaaagaaattgctcaacgtgagaagaagattgctgagaaaagctcgaagcttggaaaaattgtgagtataccttggaaatctgtggttaacagattctattttcccttttaaatatagcattttgagacatgtcttacattttttttttttttttgtaatcctctggaatttcactaaactttctcacttgagtaacttatatctgtacctttcctgtgagcagcaacctgagcttctgagatttaaggaggagatagctcgcataaaagcaaaaattgagaccaatagaaaggacgtggataagaggaaaaaagaaaaagggaagcattccaaagaaattgaacagatgcagaaaagcattaaggagctgaataagaaaatggaattatttaataagaagagacaagatagcagcggaaaactcccaatgcttgacagtcaactgcaagattattttcgactgtaagtttgaaagaaataaggatttttttctcttcgcaaaaaaattgccgttttccaactgtcctgaggttatagatatgcaccaacttgatttctctatattgcctatttaatcttcttgcttgagtttttgtggtgtaatgaatactacatgggtttacatgtttaacaaaaaagtttaatgaaatatttgttgggtatgagtacttattctgtgctatgaagaacagtctaagcaaacaaatagttacgcgttttgtttgacataatgacataaatctggttgtttacaggctctattattggtgctgttgttgtgacttttgtaatatgctctattattcacccttttgaatccttacgactacctttgttttctaattaatgttccttcatgtttgtcactgtggttttgtctcagaaaagaagaagctggaatgaaaaccattaagctaagagatgagcacgaggttctagagaggcaacggcgtaccgatcttgaagcattgagaaatctggaagaaaattaccagcaactaataaataggaagaatgatcttgatgaacaaattaagcgatttaaagacaggcaaggagagattgaaacatcttcgtcgaaatataagaatgaaacaactagtctgaaaacggagttacgtgcactgcaagagaagcacgtaaatgccaggttagtttatgtcctctactcactaggttgtctagcaatggatggtttacttgcgatgttatgatatcctttaaatgcgacacattgctgcaagtttttttaaaacctccttagagattcttcttgcggttgcttcatcttttgaactatggcttgagagatattggtaattcatttttcaagaacacattattttccatcttccctatccatagtataaaccccttcttgagcaggcgaaatacattttgtatcccctgatactgaaattcaggatctgctgctgtactgaattcctagctaaaccaaaatgaagcttgtaggctcgtagagaaaccttcaaagtcccttgaggtgcacctcaccagggagaactttatatttgttcttgatagttgctaacctgcttatatgatgaacagggaggcctctgcgaagttgaagactagaatcgcggaattagaagaccagttaagtgatttaacggctgaaaggtatgaaaatgagagagatagtaggctaacacaggctgttgagtctctcaagcgtctatttcaaggagttcatggtcggatgactgatctttgtcggccaaatcggaagaagtataaccttgctgtcactgttgccatgggaagatttatggatgcagtagttgtagaagatgaaaacacgggaaaggattgcatcaaggtacttatcttatggtgttctatcctatggaatctgtgaacttctaaattcgtaatttctatctcttctctgctgacaattatagtttcagactttcaataacaggtaagtaagatatcctttacccatattactactcactagcatatgtcagcaaattaatgatgttttaaacaatacaacctcttagtgatgccttagactctaccacgtcctaaatgatacaattcatattatttaggtatgtaacatatatgctgtaatcatctccaggcagacttcattccttagaattaaaaattaacccctattctatgatacttggcttcaacttaacttttcgaagctttttctaccttgcttttaagcaatttgaagtatatgtttaagaggactttgtaccactgctctaggtatgtgatgaaatgagttcttcttttttttttggtaatttgcagtacttgaaagagcaaaggcttcctcctatgacatttattcctcttcagtcagtacgtgtcaagcaagtgtttgaaagattgagaaatttgggtggcacagcaaagctggtgttcgatgttatccaatatcctttgcatataagtgaagtgatttgacttaaggatactcaaggttacctgtattgaaaacttctcatcccttggattcatatcattgcgtgcatagctgttggtagcttaagataattttaatatattaaaccaagtattgagaagtatagaaaggtttacgtgagcaggtttctaaaatatatatttttgtccttaactactccacgttcgatcctgaattggagaaggcggttctctatgctgttggaaatactcttgtctgcgacgaacttgaagaagccaaggttcttagctggagcggagagagatttaaaggtatgttcttgtttccttctttagatgtaatttactcatatatttgcactaaagttggcgttactttctacataacttgatttctgttatttctagttgtgactgttgatggtatattactcacaaaggcgggaacaatgactggtggtacaagtggtggaatggaagcaaagtctaataaatgggatgataagaaaattgaaggttagtttgacaccagctggtttaaagcctcttcacttctgatgtattttcttagaagagatatttgtttgtgcaggtttgaagaaaaataaagaagatttcgaacaacaactagaaaatattggatctattcgagaaatgcaaatgaaagagtctgaaatatcgggtaaaataagtggacttgaaaaaaagattcagtatgctgaaattgagaaggtaacaaccaatttatcttttctaagatgagtggtctcatatattttacttactgttgtcaagagaaccctgattgggataagaatgccatacagtagcacccattttatctttccttctgctaggaggagctgtcactattcagaatatactaattggggaatttgtttaacagaaaagtatcaaagacaaacttccacagcttgagcaagaggagcggaatatcattgaagaaattgatcgcataaaacctgaactctctaaggcaattgtctatcttttctgatatttggtagagttaatacctgatgaaaatagtatgactgaatgtcattggtatttaatgtaggcaagaactgaggtcgataagagaaagacagaaatgaataagttggagaaaagaatgaatgagatcgtggaccgtatctataaggattttagccagtctgttggggttccaaacatacgtgtatatgaagaaactcagctcaagactgctgaaaaggaggctgaagaaaggctggaactgagtaaccagcttgctaagttaaaataccagtatgtctcttctgctctgtttttctggttacatatcaattctagtcaaactacacatttacaatattactctcttttgatttctttttcccgtttttgtgctaacatatagctctgattctgaagttaacatgccattcctgatttttcgttttttgtaaaactaaacactatcttgtgcatcatattattgtcacattttgactttcacgtgcctactaaaaagaagggactacggaactgtgtgaattttgtaattattatgcagctatggtctacactatcttgtattaccaagtgtgtgagggtcagtatcctgtagcctgtaaaaacctgtgttacaaacctctactacacgctaactggttggctgagttgacatactgctttctattgaatggagcttgagttgtatgatcagagtaaaagtacgtaatttagttggttcttgaaaatcattttttcgaatttcaggctggaatatgagcaaaaccgtgatgtggggtcacggattcgaaagatagagtcttctatcagttctctggaaactgatttggaaggtatacagaagacaatgtctgaacgtaaggagacagcggtaaaaataactaatgaaatcaacaattggaagaaggaaatggaaggtatattgattctatctttacatacatctgatgacatttttagttctaaacttttttttaatctcagtgccattttgagttgtcaatttgaggatttcattcgtagcagacattatcatgaacctgtaaaagtacattgtctgtatctatgttggagctctgttactgaattgatatattcaaatatggaattttcttattctttttagcggttatatctatggatatttacatgctgttttcaaccaattgtctgtttgcattacataatccttgatgtttggttgattgctctttgaacaaattttgggatgtacatggtctgctcgacatcttgcgtaaatgtatggttatgctacgtctgaatctaattcagaaagaaactcatatcatgataaactgcttgaggctgacagatggttgatgtaaaagttcagtatgattaattctgtagcgctgctattctcttctttgcttttgcttgtataagcataagttacagaaccatatactttgattataaccttacctgtctaatgttctttgcctagcaagaatctgcactggtatcttctttcttagagactatctaatgctcctgcttgcagagtgcaaacaaaagtcggaggagtatgagaaggaaatcctggattggaaaaagcaggcttctcaagcgacaacaagcataaccaagctcaatcgtcaaatacattcgaaggtacaatgaagattcatcaaaccctttcctaaagatctgatatgtttgagtatagatacactaaagcttccatatgctatcaggaaacacaaattgagcagctgatctcacagaaacaggaaataactgagaagtgtgagctcgaacatattacccttcctgtcttatcagatgctatggaggaagatgattcagatgggccacagtttgactttagtgagctgggtagagcttatctccaagaacggagaccatctgctcgtgaaaaagtggaggcagaatttaggcagaaaatagaatctaaaacatccgagattgaaagaacggctccaaatttgagagcgcttgaccagtatgaggctatacaagagaaagaaaaacaagttagccaggagtttgaagcggccaggaaagaggagaagcaagtagcggatgcctttaatactgttaagcagaagaggtaactcgaaatttctcttgtgaaatgatatctagagctttgaagacaattgttaccaaatatcaacgactatatggtattatggtgaaaccaaataccgaacaagtaaaagtctgaagattctagttctggggaaattacctgtcaaagttactgtttggatacaatgcacacacatgcacatgtacaaagaacatattcagttttttcccaactaatatattccattatagttttttctgctcatttcaaattgttgtgcaggtatgagctatttatggaagctttcaaccacattgctagcaacattgacaagatctataagcaactaaccaagagtaatacgcacccactgggtgggactgcttatctaaacctagaaaatgaggatgatccgtttctacatggtataaagtatactacaatgcccccaacaaagcgatttcgtgacatggaacagctctctggaggagagaaaacagttgcggccttggcgttgctcttctccatacataggtatcctcaacgacctagatatcccatttgtttcaatgttaaaagtgattttgtaggttcatattgatttatctgtggtgtttagtttcactctttgaaattggactagaagatggtgatcttgccagatgaaatttgttatttgtgtctggaaccatcagatttgtttgactccttagcattggttttaccagtctggcatcgtcttaggttttctgttcctagtaaaatacccatcttcaaaatcgctttttgtttctttacgatctgaaatttggcctacgctctcgtgtaaatatagcatggttgttctgcaaaagaagtttccatggtcagttgttatgaggatttgatgaagtttgtggtgttgattacctttccatttttcagctataggccttcaccctttttcatacttgatgaagtggatgctgcgcttgataatctaaacgtggcaaaagttgctaaattcattcgtagcaagtcatgccaagccgcacgtgacaatcaggatgcagaggatgggaatggcttccaaagcattgtaatatctctcaaggacagcttctatgacaaggcggaggctctggttggagtttacagagacaccgagaggaggtaagcagaatatccacataaatcttttgtacatgcgtctattttattggcataatatctgagaactcgttggagatgtatttttggctgcagttgctcaagtacaatgtcatttgaccttaggaactaccaagaatcgtgattggttcaacaaccctcgggggattagggtttaggtaagtataagaaccctaactttgtaagtatagcaagtactgaatgatgtttgattgttaggtttgtaatttttgtgtcacaatgttaaaaggtatttcacagtggtaaggtgctttatttgcgatttgatttggcataggaccttataagttctgacactgtagagaacctatggaaccttttcttatgtgatactataagaaactcgtgattttagctgcatctgattgacgttttatgttttgataatagtttttggagacatgttgtcaaagtagaagtaaagacaaatgtttctttaattcgtcggactagaaatcaaatcttcaaaagccatttttgtcgtcccaatcgactttcaaaaaagctttaaattagaacgacacaacaatgaatgatttaacccacaaaaagcttgaatccaaaaggtttgacttttcagaatttagtcttaaaattccgtaatcctatatattaacggataagatccaacagagcttcagaatttgtccttaactcatattcttcttattttctatattataattcgagggttacgtgtcatatgcctactactgacatcacttgcgtcttccttttctcttgtcctctttcgtaatcattaaagtaagtaccttttaaaaaaaataaagaaaccaacggtgggagaggaagcagagagagagaaaataaaaaaaacagaaaacgagaaaaccagagattcatcaattcattgattctttagttcttcttcgtccgtctaaccttagaaacttatagctacagcgagagaagacgaagaagaataagaataagaagaaagaaaattgaatggcggcaagagccaacaacaaatacacctctatcaacttcaaccacatccttcacaaagatcctccttcatcttcttcatcttcctcctctgcttcttattcctccgtcgctcgttccaatggccgtatgctcgtcctcaccaaatcttcccccaaacctctaagatctccctccgctgctcccaccaccactacgaccgcacctcctatctctacagctccgaggattccttcaaatcaagccatctctgatccagatccgagtcagatctctcttcgtcccttaggtcatacaggatctagttcctcgctttcttttccaattcggactcctgaaatcaacaaggctccggaggtaaatgctccaactccggtttcattgtccccgaaacctgatcggttcgtgccgccgcatcttaggccaggttttgttcggaaagacgagaaacctggactcaactcttctcgagttagagatccgaatccgaatctgaatcagagattgcctaaccaggaacagccacggcaggaatatttcggttatggacagcccggacggcccaaatcgggcgggtatgagaggatccgtacggatccgagaataaccggaaaccgacccggcacctccggatggtatgttcatccctctcgtaataatcgttgttctagcattactagagagtgtctaggcttcttagctctgcctcaacggaattatcttgagatttattctacgttattgatagtttttgcctttcatgctgataattaagtaaaattggaaatgagattattctggttgtttggatttttgctgaagaagtagtcatgggagccgaatccaccatgtgtctgaacattaggattcgtttgaccatagagaatgtcatcttcacgtggattcgattttgagatgagaaagtaatatgaaggtgttttttgtgtggagaagctactcttgtttgtcctttactctttttttgtgtgtttgatccaaggttgtgtacttaaagctatatatattatatgatggaatcatatctgttcattgctcatctcaactctattctgtataattttctgggggaagttgtaactaaagttcatttgtctgtgcagatgagcttgctgggatgatgcctagttaactcactcgatgatggaggtggaactttacttacttctgaacgttgaaaacagtgacttgtcatttctcacttcttttgatcaaaccagagattatcaaagaccaacccccaagattcagtagatttgtagaagaatgttgttttgggatcaggctgggtgatactatgacacaaataacacttgttctcttacttgtctcactcatgtttcaaaaactttgtttatgtaactataattctgttatagcacgtgttgtttaggtattaatctatagattctattaccatttggtttataagaaaaacatttgtttctggatgtatgtttcagcaaaagaaatttccacttttgtttatttcaccatttgcaattgcaagaaaatctaactaacaatagcaaaaatatagacaaaataagcaaaatggaaaatatgtacatacttttttgggagagatccacttgtaaaagacaaaaggtgactataattgactaattgaggactgagaacatattgggaaggattttgtggccattggtttgaagaccaatacgttatttttttttatgtcattttttcgaacgtatttgaaaacccaatttaaaatgtattttttcgtgtaaaaaatgatgctaacatacttgtttgattttcatctaaacaaattgcaaagcagttttcataagcatcacgctaataataccattgatgcaattaatgaccaccgatcgctgaatcaccgcgaaaacgaaataacccgttaaattacccatttgcccctccgtctccattaatacacactctctgctttttttgagatctctctcagcacaaagcaatcacaaatcaaagctttcagagatccaaaaatgggatctcttccaccgccatcgctagatttctcatcaatcgatcacaattccctcaaaaatggcggatccagccaccaagagatctctcatgataatctcctcaacctcttcaaatcccagcaagatcttctcaatcacttcttcaaacatctcgatctctctcaaaccctagatttctcacgcattctcctttccaccaccggtaccgttttcttcaccggcgtcggtaaatccgctttcgtagctaacaaggtttcacagacgctcgtttccttaagcttccgttcctctttcctctcccctctcgatgcgcttcatggtgacattggcgctctttcgccacgcgatgttctcgttttcttcagcaaatctggcgccaccgaggagcttctccgtcttgtcccttgcgctagagctaaaggagcctttctggtgtctcttacctctgtttctgggaatccactcgctggtgtttgtgatatgaatgtgcatttacctcttcagagagaattgtgtccgtttaatctcgctccggtgacttctacggcgattcagatggtgtttggtgataccattgccgttgctctcatggcggctagaaatctctccaaggaagagtatgcagctaatcatcccgccggtagaatcggcaagagcttaatcttcaaggtatggctaaactatacataagcttaagaaccagtaggattgataaatacaacaatggggatgaatatgaatgtattggctgtgttttgtaggtgaaagatgttatgaaaaagcaagaagagcttcctgtgtgtaaagaaggagacttgataatggatcaattagtggagctaaccagcaaaggatgtggttgtttgcttgtggttgatgaacattctcgtttgatcggtacattcacagatggagatcttcgtcggactctcaaggctagtggagaagcaatattcaaactcagtgttggagaaatgtgcaacaggtgaggaaaacaactctgtttttaaatcatgtcaacattggtgtttgtgttgatgattttgagtcatttgttgataacaggaagccgaggacaattggaccggaaacaatggcagttgaagctatgaagaagatggaatcaccgccatcgcctgtacagtttctaccagtggtcaatgaagacaacacattgattggaattgtaacattgcatggtttggtttcagctggtctctgaacacgaaggtgcctctatattgagttttatatagttgattcttttacagaaacccaaatcgagaatattggtgtaatttgattgattttcaccgccagtgaattgtattgtgtctagtagtacttcatgtattgtccatcatttactcaaagatgtgtatagagtataagaagatttcttgtatctttgtcctgccttaccttcattttcttctactcttgctttcatttttgccttcaaaacctacctgcagcatctttcataatgtcactgctcatagaaccatttctagaaaaagaaaacgcattttttgcttttgattgaacaaaatttcgctgaagaagcagaaacaatgcagttttggatttgtgttgttacaaatggatgtatgattcaaacaattcttctttagttcagtgatgacaaagaaaaacacagttacatcataatacctttccattaacccattgtcgtttgtcacaatgaacagaagaaaagcggttctatatgtaaaaagaatcagatcctattgcatttaacgatcaataataagtaaacatagagagaacttaagttgctagtgagaagaaacctgaagaaatacatagaaaacaaagatacaagagtaaaaaacaaaatcttttagaattctctatgcagttgacactgcgttgttactgttgttgttgctgctgctgctgctttcatcattttgttcgttctcaccggacatttcctcgagagacttgcctttagattcaggaaccaacagtgtaaaaaccatccccaaaagattaaccacacccaaaacaatgagggagttcttgactccaatacctggaggatatccatgctctgtcttggtcttgtcaggactttgtgctaagtacaagaacccaaacgcaccaaccattgctcctaattttccagaagccgcggaaattccatggcaggttgatctaaacctagccgggaagatctcagcgggcacaacgaaagttgttgcattaggtccaaagttggcgaagaagaatgttagagagtacatagcaacgaatccgattctgttctccttgtgagtccaatggtcgtaaggaatggcgagagcgaacataaagacggtcataaagaagaaacccatcatctgtatcgcaaatctaccaatgacgtcaataaaggccactgtgaaccagtaaccaggtaccgtgctacacaaggcgattagggtttgtgcacgtgcaatcttgaaaacctcttgaattgcgttcattgtctgagccggagggatccatccgattgcgctgaaaatatctttctggaataggttctgactgtagaaggcgatgtcgagtaggaaccatgtgcttgtagttcctagcaaatgaaggccatggcgtttcatgaattccttggaaaacaagccaaaggaattggacttatcttcagttccctgctgctctgcttcgatctccacttgcaaaaccttagacatgtttgaagccgctagtttcgcgtccttggccacaagagccgtgtaccgggcagtctcaggcatcttggaccttgagtaatacgtcatcgctgcaggcaaagcacccaccatcagtatgatccgccacacataatccgcctgaggaaccgtggatgccaaggcatctatttgataggttggagctggaaatttagcctcgaaagcggcagacacgatgatggcaaaaatccccccggtcaagattccaaacccttgcatagcaaaaacggcggctataaacgcaccacgggtctttttattagcgtattcagacataatcgtggcggataacggataatcaccaccaatgccgaaaccaagccagaaccggaagaaacatagtgtagtcatcactgtttttgggttactcccaaaggatagacccgaagcgatggaacaaagaaccatgaccatgagggtcataccgtaaacttttttcctcccaagcttgtcaccgagccagccaaagaagagctggcctgcgagtgtaccgcagaaggcgactccattaacagcggctgagacgtttggtggcagcgttcctggcttctctgagccgtccacgtgatagtaaatacggccaagaagctttgtgacgagtgagatacaaaaaaggtcgtaagcgtcggtgaagaatcccattccggcgattataatcgccgtgaaatggtaccattgcgttttggcgacgtcgagtgcgtttagcacgtttagttgatctcctgccattgctctctttctcttttcctctgcgttaatattaagtaacacatattaagtaatcagtatcaaattcatatacataagctggtttcagacacgttttatatgcagaaaataaactatagtaaaattttaatctataatcatcaaaaaggtttaaaaactcgtcaaattcatcaatttttatatctttttggcgtaagtatttgtaaaggttgacttgacgcgtgggaaatgaaaaacgggacacgaagtaagatggtgacgcacaccgacaaaagatttgatcatattccataatgtacagttcaatgacagtcaaaactttcctttaaatcacaaaatatttcagaccacttatcttgtttttgttccaagaatgtgccaaaataaactgatccaagaaagaaagttgtaaacgaattaagtttcaatctcagaacttcaacaacaaaaaagctgtataatcatagtttactgaacaattttgtaaaagacgatttgagttttagcttccacatacatattgtcgtctatcaaaacattgatcaggtatcatagaaaatgtttcttaggaaactactctatttaatagacataacacaaacacatgctacacaacagacacaaaagctatataatttataaacaacactaaccagacgcttgcataacctcatttctcattcaacaacaagtcataataaaagttaataaaagattcaatagcacatagttatgaagaagacattaacttacagaaagttttttttgtttttttgcttactttctcgcaaacaatctctaatatgggattgtcttaaagaaagaaaaaagaagaagaagagaagagtattagtttgtttgtttgttgtttcttcagaaactgtaagagagaaagaaagaagaaatggtgttgtgaaaatgaaaaagaggcagcgtcgggaacggctacttatacgtaatcatatttctgtttttgttttgacatattcttgtggtatattcttctgacaacgacgtcgcttttatttcttctatttgactacttctcctccaccttatttttacttcttttaggagacactattggttctgttttgctgttaattttttttctgttttggaaattgttttactgtctattcgaattcttaagacttacggttacaagaagtcgtttttaagtaataatttcgaatattctttggggaaaaaataagattcagacttcagacacatgatgagctgttatttttatttttttggtaataagtgcagaatttgcaagatattattttgccataaagagtagaaaattggaaattgattcgttttaaccccagtcttctgtgttttcttacatacattattttgtataaccgttttttaaaaacgttgaatttcccagaagtatttgtaaatatagtaaaattcatattataaactaaagaagaaaatgatgacaaaataataaataaattcagtgaaatttaaaataaaaatgtaaaaaaactttaacactttaaaaattcagtgttatttgacacaaaatcttctatcaataggaatacaaattgtttttttttctttgatcgttcataaaacgacgtagtaccaatttatggttaagaaaaatagcgggaaccaacgtttagaatcggtttgagtgacgtggcaaatatgggcccacagctatagattgccttcttcttcttccacctcttgacccttcctttaatgagagctcaaaaccctaatttctattagccgttacgctctctaacttcacatcacttccctaatctctcttttcagcaatgagctcgtcgtctaaaattgattcagagaagccagttatggtttccgagtcactattttctaccaagactcctatcaaaaccgttaaaaggcagatcttttcttcgtccccaaaacctgaatctgttataaaattgcccgaaaggtgagattgattgattgatttgttcatacacttttctcaaatttggactattctttcaattttgttgatttttttattggcattacaggttcgagattttggaggaatttttcaatggtttggatactgcaattaggctgcttaaattaaagggttcgtcaacgacatacgctaatatatgtcccaagatcgagtatcttactaatcggtaaagtcattgactttcacgcttcttgtttaaacggattctgttgaatcttgagagtttaaaggattaaactttttgatgcatatgatcaatcgtgtgtgtgtgtgtgttgtttgattgtatttgcttaatgttgtttgggtctacaggatcttctcgtatgatcatttggctcagatgaagcatatttatccggaagctattgaactaaagagagttttgaagtttgttgaagacacttgttgtatgaaacctaggcttcatattaaattaaataccgatgcaattgtagttgaggataccatttgtggaactaaatacatggaacttagaaaggtgtttcactcaaagcttgtagattttcgcaaagctcatcctaaggtacattattaggcttatctaatctattaattagttgtagctttttgaataatgcttttatatctgatggattctccatctattgttttctgtatgcaggacgaaattccgaaagaactgcttcctgaaccattcaattctcctcaaagggatagttattcaggtatagtaagcgtaggcttaggagaacctaaacttgaagttggagggtttgatgttcatatggaggagatagagcaagaagaacaagatgttaacaaagtcattcctgattctactttgtcacacatagaatcaagaatagttgaaaccccagtcaaagatttatccactccctccaaagacttgtccacgccaatccggctcatgagtgctacaccgacgttgcagctatctaaaagatgtattgagttgactccagagggtggtgatgataactctcttagatcaacaaatagtctagcaaggggtccatctcgcagtctgaattttgatacttttgaggaagatgcaattgagaaagatgatattggtaacgaatctgatgataaaggaatcaactatgaagaagatggccttctccagtcagtaaaaggtccatctcgcagtttgaattttgacactcttgaggaagaaacaattgtgaaagatgacattagtaacgaatctggtgatgaaaaaagcaactatgaaggtgataatgcttctgatgatgatagcctccttcagtcagtaagtgatgctttttcctgcaacaattttgctttcacattgtttccggatatattcgttttcagttgcaaacagacatccttacttaccattgtgtgtgtgtttgtgtcttgcagatgatagagagaccaaagactgaacccgagaagcacaatttgccacagcttgttaatttgattcatagagtgtttcactcaacaaatcggacagtcatcacgaaggaggagcttctttacaagattattgcaaaccaaatcaatataactgatagaagtagggacagttaatattgaatgtttgataatttccctgccttttcttccttgacaggctcacagtttctttcttacttgcattgccaggggaagtggaagaacaattaagtctgatgttgcaattggtcccggattggatatctgaaacaaaagcatcttctggggatcttcttgttcggtgagtatgttccaccaaaaatgattatgattttctttatttggctctaagtttcacaaatgaaacaaaaaaatacattttgtattgaaaatatctaatttgcttcttgaggctctaatactggtatatcttttgctttttgcagcatcaataaaatgtcgactgccgaaacagtacgtgcaagacttgaagaagcaacttcacatgacatttcacttatctactgaaaaaccataaaactgaaacttttttttgtgttttcatcctcttcaccaattcagttatcattattcttcacaaatatcttctttctaagctggtccaacctataaacttgtaacattcgttttacataattcgagaataatcaggagacaaaacaccatttgatgattattaattctactacatgcagaagaactgtatttgttgttaactgtggtctgtggataccaatttaagaagctcttgctacagagaaaaatgtgtaagactcagattgagaataaggtttggcaaaggaacaagattcgctaggtcttcgtcgaatcgacaaattttgaaaagagtagtactaaagcaaaagaacaaaaccaaagggaaacacagtcatcactctccaatcatatgacatcttagaagatagattgagaagtgtttgaatgtaaaggtaaatgaaccatacacttttgaaagaaaagattctagctcatcttaaaataattagattgttaaaaggattaaacatttgaaaccgaaaagcatactctaaaaataaagatagtgattgttctttctttctatattactcgaagaaagtatttgtcctttgcaatgatgtttaagatgttgatatcatacccaaggttacagtataaattagttttattaacccaaaaaaagaattaaaaaaaaatgttagtcttgaatatgattagattatagtgtttgtttcataaatggttatgaaaattagttcataagacgttattcttctacaatctatagtcacaatatatacacaaaagagaactctttcagattttctcatgtgaaacctcctttaagagctttgcttgctctctgaatcgctcttgcgactctccatatctcgtgctcaattattccctctgatgcgttcatcgcaatggcatctgctattcccgggaagaatcctagcttgctctctggctcagccgccggtccatacacctatgcataaaacacaaacaaggtctcatgaggtttgcaaaattggtgaaaatctgactgaataaaaaagttttactcacaagatgcttgaaccattccttccctttgatcccttctgcatccaaaaaccctctttctacaagcatcaacctgtcatttagctctcttctcttcgccgctgctgctacatcatttttgctatatgattttccctttaacttctgcaaatcaatcaccaaaacatgtataggtgagacaaagaagcaaaagattgaggttatacgttaattagcaaaaccattagaaacctttgcttcatctgcggcttctttggcaaccaaagagaactcttgtatcgccatgcttaagggatttacagagactttcccttctaagagcttgctcagtttatctctatgtgcctgaatcattacacaaaacataaactcagttttcctactattctacgtataaaaggtgtgagtaaaagaaatctacctgcaattggtctgcataagagatgtaatcgaatggtatgagtggctcatcagccaagagaattcctaaaagtccccaaattccagccactgataaatatagaaagcaaagaagagagagtgaattctcttcataacatccatgaaaaacagaacaaataactaaaagataataatagatcaaaagagagaagtgaaatctttactagcaacatgacggtgaaacaatggatctgcgttgtggatcatccaatcataggagtcaaatgcagtgtgatagacaggataatctgaaagaaaggataaacaacatacattattggtattacttgcattaaaacatcacattatagaatattttgcaagacttaaggaatcatgttctcattgacctgctccatagtacatgtctatagacggtatcccggcatgatgaagaaaaccggaaaaatcagaatctactctacttagcctctgaatctgcagttcattaaaacattacatagttttacattacaaagacaatgtatgagctcttttgaatagtctactcacaatgttattttgagacttaaatgtctcttccactgtcaagcctactgcatcaggatcctgtacctgaccacgcatagatgaatacgagagactaagacatttcctacgagtataagttttcaacaacgcttgagaatgccccggttattagtattcttaccagcttcaagacatcgacaagaagaccgtctaattgaggagttgcaccagcaaaaaaaccagagccttggactgcacaatctacattaagataagcaacagcacttgcacctaagttaagaacattttcttcaatccattcagttgatccaatctatacaacaaaaaagagaacacaagtaatttagtgaagcatcatatatagattcaacttttcgaagttactaatttactaaccattccaaattcttctgcatcccaactacaaaggagaatggtcctacgtggtctccaaccagatttaagcaaaagagcaaatcgtcgactaatgtcaagtaaagcagaagttccactgtttggatcaacagctccatatgtccatgcatctctatggttcccaagtatcacatacctatccgcttcttcactccctcttattgtaaccacaacattgttaattttcttcattttcatctccccctacaatttaaagaagtaacacacacaagaagtaacgaaaattaatcacataattaagaaatataacggaaaattacaaaagtcaaaccaaagaaaacataacggaaatgcaaaattctagttaactaacctgaaacgtcatgttaataaccatccgtccagggccaacccgttgacccggtccgacacgacccgaattccgccactccaacggagctctagcaccgcccagagaagccaaaatgatctcagcattacgaagagacaaaggcaaagatgggattttgggaaatctccgagtgaccaattcgtcatccaagctcagtttttctcctccgacaactccgggccaacccgggctaaccggatctccgattcctctcataaccgtacctctctcaatcccgccaaatccaccaccgtcattctcggcgtatattagcactcccagcgcacctttagcttctgctattttcacaattgctcctcttcccaagttttcacctttcctcgctaaaaccacacaccctttaacgctcacaccaatagactcaagcgcatgatagtctctctcctcgccgtgattcacgaaaaccacgttaccttgcgccgacccagatggagaataagcgtggtaaggcctaacgaccggagagtctccgggaacgtcgtttaagtcaaactcaagagtcgtcgtgttgctaaaacttgccgtgacggagatgtgcgtaggataagataagagagcttcgtattcggcgacatgggtctcaagtccgaggctttggaaatggttaaagacgtagtgaagtgtgtctaaagagggtttagttccggcgaggtgaggatgacgggtcaattcacggaggtaagaggagatggtggcgttagaagcagaggagaggaagaggcggcggagacgaagggcattataggcatttcgagaaaatagaagaggaggagtaacggcgtctggatgatggagagtgtagaaagtggcgacgaaaagaacgatgacgaagaggaaagaacagagaggcggcggttgtcggaaagggattatagatattccggtaacggtgggtctggtggtgagaggttgtgacattgcagagagagagagagagtaaattgttttagtaagtatagtggctgatgagccaaagtatttattatgaaataatcttcagtctcatttttacgtttttgtcttctttgtctttatgagtatttttgtcttggtcaaaactctgtttattaatctctttttcatcaacctccgagaaataataacaaagactaattctttgtgtaattacgagaaactagaatttcaacagagtcagcaatctaagaaactagaatttgaaaacctttttcccccactaaattactgagcttagtggaatgatgaaaagctgcgatattgacgaaccaaaaatgaaaatgtgtattgtttgattgagtagtagtgggtggccaaaatactatttttcttcgtttgagtatcattttcagtttgttttaattcgtttttatatcactcgatgatgtattgggtcgtatttgacatattccattttagatttatcataattaaacattagcatatcactcgatcgtgatatatattctccattgtgattatcatatgttttccctcattgtcattaattatttaaagtgaaggcagcgttgaaggacaagaggagacacgagactgagaacggtgttgggacttgggacatcgagatcgataattttatcaatctcgtggaggtatcctccaaacatgaatttaattatttttcgtccaaagctatatatatatatgcatgcattgatgaacttcaagtccagaacttgttacgtttcgttttgcatgatgtacacatatccagtttttttgaagaaaatagaattggatttacattagaaactaccaactatttgaacaaatgatgagcacgcaataaaaatgataaccatgaaaagcttttgtctttatgcatttgattcatttggtcggacctattgtctgtatgcatacttacataatagtacattataatccactcagaattgactagaaagaaaaaaaatgctttataaaaaaatggaattatctcttatctatttttattattcactatagattttttgttgtcgcctaattcaatacagactataatttgttcaaatgacccaaataaaaattttggtttgtcagttttggttccttctatgttttagggacacagataaactttagcaggagtatctaagtataaccccatccataagataatttacatctagtcgtcgcctatgctccatatattttcactatgaaaataagatcttaaattttttaaatgtacttcttctcaaaagagtgggaatttcatggaatgattgaggtaattataaaaaaatcctttttctctctcaacttgacgactagggtttcttcttctccttgccgccgttggtgtggcctctcgcccaccggcgagaatcttcctctttctccctcctcttcctttcttctatggctttagtgatgcttgctcgggctcctgctccacctttgctcctcccttctccgaatccgccgccgtgtgctctaccgcaagatttgaccagtttggtctctccttctgaacctcccgaccctccagacccaccagactatctcgttggagcttccaactcctttctctcgattttgttgttgaggtcttcagatctaggatcagatcttgttcaggctttgagccctctagatctgggttttgctttacgatctattactgctgtgtgcagttcgtggtaccaagtatttcctctcgcttgtttggagctttggttctctattccacacctctctcatcctctagtcactctatcaaaaggttttgtctctctgaaaggtagtaatttctttgaattttttaccttcttttggaacatgccttcgtttatacttcagttccctcaccatgaggatgtgatgatttctactagttttaggctggttttacctcagtatgaggctgttatgatcttgcttaagctcaagttgttcttacctcattatgaggatgtgttgttttcgattggacttcgaattcagcttcttttacctcagtatgaggttggtttgattctgtataagcttaggcttctcttacctcattatgaggatgttattcaaaaactttggttaagagcaattcatgttattgtttctttggtttggtttcttgaaatttcacgcaggataaaggaaaagacatatgacgtcttaacaagaaatgatcttgggtcttggactccagatttgttcatcgagaagtggtggttttcgcaaccccacacctctccgaagttgaggtttttctcacatctcgtaggctcaagaagttggtgctttgtcgcctatgctatcgtagccgtatttcatgatgcgttttatccactagaggatgttgcatctccggacagcagatcaccaagtgtgctctcttatttccgaaagctcatctcatgtttcagcactattggtgtctccaactttagttgcttaactgttatgtatgtttttatctttttctttcgtgctttccgtatgccatttgtagcagtggtttctttggcctttgtagcatctttgatgtacttgttgaaccatttctccattgttggagagtagaatcatttataaaaagctagtttgaccaaaaaaaaaaaattgaggtaattataaattagaaatctgacagcactatcgtgagagatagggaggacaaatctaagtgggtccttgaacgtatctttgtagtgtgcaccttcataaatataatccgagtcatcattcggacaaaatattctagggacattggaagtgttgggtttagacaatagacttctataaatctggtagacaaaagttaatcataaaaatctggtaggcaacaaaaaaagactaccttaaatttgtttctttgttcaatcaaaatccatacaaaacttttaaaattattagcagattttctcaagtataaatgtcttacaactcttacaaactattttcagtgaacaaaactctatcctaatcaattgagtagactttactatagaggtctcgaaacaattaagcataacttagtaaaagttgttgttgttctcagaaaaatacttgagcactcttcatgaaacatattttgaagcacttacttagaagtgcatctttgaaagtaactttatgttttgcagttctctctctctgcttacgagtgcacgcacacaggaaataaaggttcaaatattataaactagtggaagtaaaattatgggttggaatcttggagactaaacgatttagcaaggagagggaagggtcaagggctaatattttgggccaaactatttctaaaagcccaagaaactaaaaaaatgttcaaagctaaacaatgtaatgaaaaacattttcaacaaaaacattttctgtctctagctctcttatcttcttttcctctgaccaaccaaagtaaaaggaccatttgcatttatactaatgtaagatgtttaaagaagaagcccaattgtctgcagcttcttcagtgaatcattaaggaatcgaaagccaattatctgaacactagatagacgatcaaaacactattcaataaaatgtacatcttttgttttagttattattccgacgaaagtagcgaccctttttctattcaacaagaacatagcagcgcaccaatattattgggccatctccttttcattgactttgaccagctccttttcattgacgtttttttgtattattgggccaaacaatatattgaagcccaaaagattaaaaattgtaatatattcaattgtgggctcaattgaagattttagaggaaaacacaaccttttcattgactcttataagattgtgtcgttaataatgtggtgttaactttcctcaaaactcttacttcctaattgttgataggagatttagattagctagaagaaggcacagctacaagattttaaaaacacacacttacttgtacttgtaattacaccctcacttatgggttcagtatttatggattcagaagtcttctttagtttgttgggccaaactacttttaaagcccaaacgattacatcttttttttttactgttgttattatcttaagacaataatcacgtgttataaccaactctattaaatttctgtcacaattagaatttaaagcctgacacaaaatccatgtgagccaaaaattcaactaaccaatgaaaatacatctacccaattgacaaatgtcatgcaaccatatttgtgcttttataaaataaatattaaatatcaaatattaacaatggtggattgaaatttctgttatgacttaaacttatgacatattgcatagttttagacttttagtagttcgggtgaatgagccagtagagttggtaaaacattttgattctaatcatatatcaaaacttgttaaggtaggattctactaaatttataactaatgcccatatgatttattttattgattattgatttagcttttgcttttttttttctcctcaaaaaagggaaatttaattcatatgataatagctggtggtctttgtgggcacatagcccaagaactttgaaaatacgctccgaaaaaggagggagagagagacgaggaagatgaagaatcaaacacaacagagacaaaagacaatcttatcctcctaaattctctctcttttctcttctttcgtaggaacaacttctctccctcctgttaatcccgccgtttcttacattttcctctgtttttttcccgggaaacagaaggaaaattttcgtttttttttcttctttttcccggaagaagagatctttgtgaattaggtagctgcccacatctttaagacttgtctcgaggtataaagattatatcttttcttcaaaatataccttctttgtgtcttcttaccttctctgtttggctatgccaaaactttcgtgcatctgtttaacagcaacgttgtttattccagctggcgtggcttcattcttccggttaattcaattggagaatgcaacaaaggttactgcttttattagattctaaagctagggtttttgggaacgtgcttaatctgtctgtatcttagcatttgagattgggtttttgggtataataacctattatggattcagaattgagtttttcttcgagggatgtggtgaattgctgtgaatatggttgtgattattctcttggggcatgttcttcagatcctttggctaggacggtgaaaagaaagttcaacgaattcaaagaagggaacaacatgatgttgttacgaggttcttctgattcatcttcttcaaacgctaagatactagttgagaatgaatgtgcagctttacttgaggctctttctagccaaagggaaacagttaaagatcttcatttagagcttgaagaggagagaaacgctgctgcatctgcagctaatgagactatgtcgatgatactgaggttgcagagagaaaaggctgagattcagatggaagctcggcaattcaaaatgtttgctcaagagaaaatgacacatgaccaagaaaagctctcggttttggagaatttgttgtatgagaaagaacaagctatcgaggcattgacttatgaggtcgaagcatacaagcatagattgttgagctatggggtatctgaagctgagatacatgatcagatacttggttttggcagagactctagcacggttggctttgatgtttacccttgcgagtatacttctttggaatgtagtgtggatgagaacccgagtggaccagatggtaactttgagattgaagaaaaggtgatggttggtcagtctccaagatggccatattatgatcccaattcgcctttaggaactgcaaaagatattaagggggcatctttcgcagactctcctatgtctagtagtagcgaccgagtttatactatcgactccattcacgtgggagtttctgaagttaagattgacgatgagcctaataagatgagtaagggaaagttaaatggtgatcactggaactctccaagataccaagaaccgttcacgactcagcagggagttaacgagccagatatagagaagctttacacaaggcttcaagcacttgaggcagacagggaatcactgagacagatcattgtgtcgatgcggacagacaaagctcagttggtgttgctgaaagaaatcgcacagcatttaacaaaggaaaccggcgcaacaagcaggcgaaaccctgttagcaaaatgccatctcttaaagtattctctgtagtaacggtcttcaaggtaaataaatcaaaacaatctctcctatctaactcttacatgttgcatactgaaactccgtgtaagcctgaattttgctttcccttcattcttgtgtttcagtggattgtgtctttcgtttcgtggaaaaggaaagccagacaaaacaagtaagcagatttacgagtcaaaacgctttgctgtttccctcacattgtggctggtattactgctttctgatgaaatcaattatataaattgcattgcaggtatgtttatgagttgtcagcaaataatatggggatgcttatgattctaggcgagggatctggaactaggagatggagatgtttaacgagttcacatgtctagatttccatttttttatcaggcttctttggcgtagttagtgcaaaacaaatgtacattgctctgcactccaatcaaatatgtatgttggatgattcagaatctggttgaatatgttaaaagaatctccttttctttttttggctcttgcatatcctcaagccaagatcataagtcataacagggtctgacaaagagaaatcactatatgatgcgtttaagagaaagattcaaaccaaatttttgtgcattgccatcaaaagtgtttctggatatgttcagccacattactcataacattaccattgcgtttataacattcatttcatacataatgatgaaaacttggaaaaaaataacagagacagatcacgaaggagacagcgaaaccgtgtaagacttgttgcaatactttaagttctttagatggcctgattgaagctgaggacagatcactgatccaggaatgtccgacgcattgtcgtttgtttctcctgtgccttctatgactctagactcagggtctgtcttctcagggacttgtggtagaccaatgtttaaattaaccgaggttggctcggtcacaaagctgaatcaaactcatcgaatgttagcatttccaaacaaagactgaaagttttttggttttggaagagaagagaagagattgtgcatcaacgaacctggcttcaaagttttgtccattagcacccacatttgcacatatattgctaataatccacggcggaatatattcacctttaatctcaaccatgtagcaacttgtatgttctgtttttaccatctcagagcatttgatctggagatcgaagaaaaaataacctcgaagtgttatcatagactaaggatgtcacagcaagggaaccacaggatacagagcaaagcatcgaatgtgtgaatctacctcgggagaagacagtgcagcattctgaaatggcactggtgaagataatacaggaacatctgcggtaggaagaaattcaaaagaatacctacacatgattgagaaacaatggttacaaacttccaatcataatcaaagttcattaacaagatttacatgtgcacaatatgaattttttttttgtttctaaaagatgttcaaacgcacctataatttaacagaagatcatacaatccatgtacgctctcatttccgacaaaggccaagaaagattctggagtattatcaatgtttgagacagaacgcgaacgacgaatctgcatccattacacggagtgagaaaaaatacgcctataatctctcatataagaaggtgcttcacatggttcataacagtgaaagagtagacaaaaatatgtttcctgcatagataactaaacacgcacaaacctggccaatgttatgattctctaactctgagagctcagcaagatcttcaacagtggtctgatccattttagtcttgcaaagaggcatagagtagcagatgtcctgtgaaaaacatagtcaaatcaaatttagtaaagtaaggatgactatttattgataatgtaggcacaaggtttgcataacatgaggaaaagacaatggataatgcattagatctagcttgtcgtctcaactctcaaggaatgcaaaacacaaacaatttacgtatactaagtaaggcaaaaggctaaacaatacggaggcaacatatcttacaagatttttaagcatggctctcaatcttctagttgactgggtgatatagccattgcatgagcgtttggcaccccctgactcacagcttccagtgaacattgccacaaactgagaagtacagactacaaataatgcacgattaagttcagtttcattccaagagtacagcatacaagtcatttacaataagctgtgcatttaagttcactcttgaatagcattaaaggttaacttgattttgatgcatctttgccaagacaaaagaagtaaaagtaaggtctataccaagttcatctaaatgaaagtgttagtggtaaacaaaacacggatggatctatgtctctgcggaaaaaatttacacctaatgcatttgtatcacagtaagtaagtactacaaggatccggtttgtcttcattaacctagtgccttacacccaaagaaaagtcacatcaaatcaggcaaagataagatgaaattaccataaaatactttgcagagattctttcgaaacataaaatataaacttcgaaatgcatcctcccatgccaattttcgcttttgtaggaaatcaacttcaccttaaatagcaaaatgaggatctctttataaaactcagaaggaagatgactgataagaaggtatagcttaagaattctcattaacaaacctctgtctgatacagatgccaccattgccgatatgacaaaaggtggcaaggtggactgaggataaacccacgagtgtagtgacatggaatttaacacctgggaaaccacagatgctccagaaccactactgttatcttgatttaccacattacacgacagcgacttcagctgtggcataccattgtatgtgctacccatgattgatctatgtaacctagaacatgagaatggaatataataaactgaatcaaactttgaatcaaaagaaaaccactaggtcaacaagatttaatatgaaaaaagtgaagataaagggaatacatctgtgtgatgacaacccatattttcatctatcatcatcaggaagtggtatgtgttaaactattacgaggtgtcaaggaggaatcactcagattcaacttcaaccatcatatgattctattacacaatgtacatgaatatcagaaatagctcaactcaccaacttaatggagaagaggaaacaagtcgagcataagtcttcaaggaaaggtccagaggaatcttctgcccagaaacttgaaactcggacatgaaacttccacttaatgaagcagtatcatcttccccagttatgtcgccaggatgaaccagcaaaggttcacaagtagcaagtcctttcaatgctttgttctgttgaaagatgacatcagtttcaccaggaccagatacataaccatctgacagtatcaaagactacctagtgaaacataccatatcaatatctggcaagcaggataattcttcacccctggttgaaagttgtgtgacactgcgaaatatgctctggctacatctctcatttgtttgacgagcttcagccttagtgtcatcaggaacttcagtagaagcattattctcctcactgctaatacattaaagcattaacataagttgcagcacataaagtcagcttactccagatagaaattgcctgaggggttttaccgaataagttgtcttttggtggcagcaagattcgagagtaaagaaacattgattaggctgctggattgcttcgcaccattttcctgtggtaaagacaaaaaaactaataaaaacgatgtttactaaactatattactttcacgaaatcaaaagaatcaacaatagagtcagagaggtcatgaaccttagagttttctttgccagagagcatccaaggcctagcctttttgacaggatacagttcatccatacgcatctcaatgtattttggattcttcgaaagctctgatttcttgaacccattttctctctcagcactactgccaagacaaatctagtaagaaaacataaaagttgaaaaacttgacagacatgatgctttataccttttgcaaggacgcaatgcatcaaaagcttctttagcttggtccacaaaagcagtccgtttcaattgttctccctgttgagtgagaagggtattcaaataaacaatcttcagagataacttccaataactcaacgaggaaaacattgcacaataaagagaaagaatcaaacttactctcagttcagaaggcgtcttcctcttagcaactactttcgtcatttccaaatgatactgttcgcttgatccccaaatttacctaaccccaataccaaatctgacgcacaatgttattattccattttaccagcaagatctttgtcaacataaaatatcaattcggttcaaaaatcctcacaatatgaaccctagaaactggtgaatagtaccagcgaagaacttacaagcgaaaaaaaacaaaatcacaaacataaatgagagataggacatactcaccacgctcgatggttaatctcttagcgatgtaaacatagaaacccagcggcgattacgagctcgtcgtggtgtaattctcctccacggcggggcaggctagggttttttcattattctctctattttgtaaaatttaggggaaacaaacaaaaaatagtggagagtgagattggagggaagaggaaagagcgtgaaatcggaaagctgcttttcaaaaaatttggtcgaaataatttgggattccctcctgttactgtttttgtaacagtcaatctaacgccgccgttactttcataacgttgactaatttcttaaatcagccattgatttgtttcggttctttccggtttatacatgtaataaccaagctgaaccagcaagcaccaaatataataatgatcaaaatcacttcaaccaacaaacaggctcctaatataacttggtttaataacaacaaatcaaatgttttgcgaccaaaaaaagaaagaagaagaagattaacctgtctctagtagcctcgacagacaaattatacataaccaacaactcttgtctctagaaaaatacatgtcttttcatattacacaatcctaaatgatctctctgcctaaaaggtaataaaacacacaagcaagagcctcctccaatccattgagccacttctttgtttacttctcttgatgcctgccgtttcttttcacctgaaccacaagatcaacaattctgtttaaatcaaactcagtttacaaacacaacaaaagcaaagacatggcttcatcaattttagtcgtcatctatgtgttaatgggtctttacttcctagattgaatctaccagggggtactaaaacatctttgctattaataccataagaaaaacaaaggaacaactatgcatccaaaggaaacaacacatcagctttcacaccagtaaatatcagaagcagtacaaaagatattaaaacagagaagaggcaatgaagcagatttacctgaaccaaaactccatctaagaggaaggacataccgctgcatcctcctcagctaaagacacaacataaggctgaactttgaatgtttcagtaacattacggctgagctcgtacttcacaaccttcgtcccaaatatgttgaaccttcctgcgctattgtaagcaacctccgcatcagcacccttcctaaaaactaccctagcccggtttttctccctgtcaacttcagtccgcaactcctgtatagggccaaaatgtctgaacattttactcagactcttctcaggaggtattgtatcagtttcaaaaaagttcattataatctcagctggtgcattctcatcaatgtctgccggtttcttagtggctgaatgaggaatactgatctgagactgtcgtcttctgtatggtcgccgagtcctttgaacctgagcaggtttcaactcaaccggcacgacttgataatttcccttttcagtagccggtgtttgcccttcaccaccattatggatcactctgtcagtccagtatgtgtcgcccatttcctcaaactcaaatgcttcagttcctgctacattagaattggatggtctacctcttttcttgcttaccttttccgtggtaacttgctgcgatgctgatgagtttcggaaatccaagaaaaagccagtagcaatgtcagatacaacgttctctttaacagggtctgtggctgcgcaatgaagctgggatacaaaactctcaacagaaagagtttcatcaccaaagttactacccttcaaaactgaaggagatcctgccatctgacttgcagccctggctatgcatgcaccaattttaaaggacggcctttcggcaaaagacaccttggcgaatgaaacagtcttcctaccttctcctggtgaatcctcactcaggacatcagcctttcgtttcacaccattggtcttaacatcagaaccagcttcatcatcagcataaacaaaattgttgtgattttcttccatttctgcattttccttttggtttgggtcgaaacttggagcttcatgagtaatgtcatcttcctctatcattgtatcttgtacatctgctgttttcttgtcgaggcattgatgatccttatcttgttggttttcttcagatcccaaagttgcatcagaagtctcttttgaacaatcagttgcagcagctggagattctgccccaacaccaacacgggcttcattcgattcagtttctatatctgctgtgacaacgtcctctgccatgtcagtaactttcttatcctctttcaaagatacattcccggtttcggttttaaggtcttgtatatttcctgaccaagatgatacaccactgaaatcaataaagttggtaatatcagaagttggatcaaaaagagcattatgatccaacggttcaacttcacctggagcagcatcttcagtgggactatttgggattgctgaatcagcagattcaattgttcccgtaagatcacttgtcatatcagcattatctttgcgttcatcaatttccattttctttactacattggattcattgttgtcagcttcagctattggaacatcttgtgtttgaaccatacttgcaccagcagattcattgcaagcattatccgaaccactgcctactttaacaaccttttccacatgttcccctgccacaccatcaatttccatggcaactccgttttcctctttctgattttcttcgtctgtttcctctttgctcaatttggtagactcctctggaacctgtgcagattctgaatgcttagcatcttcggtctcattctcttcatcttcctgtttgctatcaacttccatttcgttaatatccttctcgattttctttgttgtctccttctcttggtcagctttatcttctgcaacagaaagcgtctcaccatggactggatttagctggaaattttcagtttcaacatcttgttctgcatcacaaacaccaccgttatcttcaacttcacatgttgccttctcatcagtagcttcattcgcaacagaattttcagtctcctcttctcctgcagtttcatgagtagcaccacttttactcttaacttcagacttagccgtttcatcattcaacttcacctcaacagttccagtatctccttcacactcaatctcagtgacagcatcagtccttttaacatcatcatcatcatcaacatcaacagtagctaaacctccatcattcgggttcttatcagaaacgcctaagtccgtattggcatcctcatcaactagggtttcagttttagaagataaacctgatcccttaccagcttcctccatgggctcactgcaatcacgaacagcctcactttcctctctcggttcctccatgtgaattatctgattccagctcaaaattactcaagacgtccgtaattattataaaaaaaaaagtcgaaaactttaaacaagaaacagaaatcagagcaaagggtattcacaaaaagcatgaaagattccagatttcagtgatacagtaagtgaaattaacaacgagaataatgaaattggcgaaattacctcaagagatcttgcaagatttggagaaaagaaaccaaaggctagggctttaatgggtgtcagtaacagagacgactcagacgagtgtgggtttccaagaaagaagaagaaaagtgaacactacgccgaattcgtcagtcgagctcgagcgtatcagtcatatttgttttaagttcttcggaaaacttttagattcggagaggagagctaccgaataactcttttgcctgttcacgattttcggggagggttggttttatgatatattgcatccctatgatccatttaatcgaccgtcttgatttatccacgtggctcttttttgaggtaaacttccgattttttctaaattaaaataattcaatacatatatggacatttttttgttcttcttttccttttggatattttttgtttttccaaatatttttgttcatgccaaaaatccaaacatgatgcatctaaaattagcttaagatcagtttactaatataaaccatgatacgtagattcgtggtttatgttagtgtcgttgctagattaacgtgatgaaaaagactcatctatgtctttgtgactttttctggtttgggatagaaggtatgcttcaatttctacaacagaaaccatttcaccatgacaccatccactgaactttaccgggacttttcagtttgaacattttggttagcatcaaaatcaccaccgttatcttcaacttcacagttttccttctcatcagtcacctcattcccaccagatactacactctcctattctcctgcactttcatgactttcactatgttcactctcaactccagagttggctgtctcaccattcgtttcaacctcaactaagtcaacaactgtctcactgactctcagcacatgctctccctcatctaccggcttcacctcatcagagaccagtgtggtgaagaagaaaacgcaatactcgaagagaaaaccaacttatgatccctgaatttttcacttttaacccaatagcttgttgttttcactttttaagatcaaaactttcaaagatatctaaaagaacctttttatttcgtatttgttcacgtcgagttaaaatgtgctaaaagaactcttttcattatattaaaaactaattaatacataaaatggctataattataattaactttatatgttgatatataattaactatcctaaatacttataactttctttcgttttacaatcatagctactcttttcttagatgttaatatgatgattgcacgagtttgttgggccgaatccaaactatctatggaggattcgtttgtatccaccactgtcaccggcaagaaagaagcacatacattcatgtcctatgactcgagtttggtttcacgttattgctaggctaaccgaagagattggtgtatctcatcatgtccttcgtatttaagtagaacacttcattataaagcgattttatataaaaaaaaaacttgtcagcttagcttcaatgaataaattattaaatgtaacgaaattaaattattacaaatacaagtctctagaaaaaaataaagcttagtgagatggataaaatgaataattttgggctgagtcaatcgtttgattaacagcttctagcctatcaatgtatggccttcttctgtatgctctctcctccaactgtgcctattcaacagagtcaaaaacgcaaatctttataaaatcagtttaatagattttccgacacacgaagatcacaacatcttgcatgtaagagacctttccgttttttattaacctataagcaccaagatccaactaaattattacagacacacgtgctacagcgagggatcacgtgccaaagcagggcctagctagctgagggtggatccatgtgataattacatcatgggcacatgaggccatgactgacatcaacttaataacgtgatcaacttgtgtatgcatgtgtgcgtatgtctcatcagttttatttggtgcatatatatagagtaaacaaaaaaatgatggatagacagaagctagatggttaagattaaagaacaacactatatgtgaagaagacacgttacgtgaatgtataatattactaatttgtaaattgtagtcgtcgtaaagagagataaaaaaagaaaaaaaaaaaagcagcaaatttatattaactaagtacgtatgtgaaaccaaatgttgattctgatatgtatattttttttctcaaatgattattgctatagtacttaattatccagatatgtaattttcgatatctttttagtgactagcttccgttataaggtttagaaatagaatgacaaatacctgatataggaggagtggaaaaagaaagaggtttcgaaaatgaaggttgtggaaacccgatggcttgagattgatgataaggatagacagtgtagaaaggcaccattggacttgctgccccaaccataactcgtcctccaccatacatgtgatggtggtaatattgcggttgtggctgcgattgcggttgtggttgcatttgtgcatagtatccgttcatataggttcctccgacatatccaactttctgttcattaaacaaccacataagaaattcataattaagtggaaaatcatagaagaatatcgattattttttaatgaattagaattcatgagacttacttgattgaaggtcatgttcggggcaacgtaggcggaagggtaccttaattcaatatcaagacgggactaatcaaattatcatacgtacatattcaagaagattaaaccttagacaataatttacccatagaaaggaacggcttgatgattttgttgttgatgttgctggtttgtgaatccggacgggtagtaccactgagaatgatttccaacatgtggtggcgtggccctgttcccattttttggtccttcacatgtcaaaacatcattgatgataatgttaatattggttttgaaaattgattctaaaaaggttgaataatggcaaagtggtctttcgattccattcatatcaaggtttaatccttacattgtctcctatctatggcaaagtgttttttccaaattgtaagtgaaaacataattagcttttttataggacattatggccaataatgtgtatatatatagcttttttattagataaaataaaatgaagatggaccttgttgaggagaggtcatggtaggggatttacgaagacggccaccgagggaggcgagattgcagttggcacggcggccattgatgatcggagtagagtcttcgcaagctctcgtggcagctttcgcatctttgaaagtcacctatcaaaaacatattttaaaacaaaatgagaaaggaacaaagaaacaaaagtgaaagaaaagaaacgagagaggaaggaacatacaaagccatatcctttggaacggcgagtgagtttgtcggagataatgactgcctccaagatgtccccatacttgatgaaatgatcatacattgcttctttgtgagtatcccaagccaatcctcctacgaacactttggtcagcttcgtgtctccgaaacatccgttcacgttgttgctcgtcgtcattggatcgtgtttgtgtgtgagagagaaagaaagggcagagatagagagagaaggagagcgaattgaattatatataaaaagtgagagagaataataataaagaagttgtgtaaaataaagagtgacagattggtggacaggtaagtcttaacgtgatcactacacccttcaatatgtctctattcatttctcttatgcattttctcttgatacgatcgcgactaccaatcccgcaaatgaaaaacttataataacatcaccacaattttttttgcactgtcatggcccatgcatgggtttcagcaatgttgttgattgacttgtcctacagtcctagccgagccaattggtgctttagacgtcaaaatctattacaactacatggacttcattttcttagaaaaatgttttgtggagcagtaatgagatcagcttgattaatgacttcatgagatcttaacccaaattttgaaatttttttttactgttttatacatatgtttataattgatccccaaaactgtatttttgctttaggacccaacaacaccaaatactgtataaactaaaatttagataaatttcagttattctttaacctagctccaattttggtaaattaaattgtcaaaccagataaaacaaatgtctggagtgtaaatagcaaacgaacaaaagaaacgtatggagttggacagttgttgttgaacctggggtctgatttagtaaagagcttaggctgggccaagtttgggcctaacagcaacactaaaaaaagatagattcacttgtttacgtcaactatgtttcgcaaattcacagagcgtattaaatttaaagaacgggataaaaaaaaaaaagagagagaaagaaataaaaaaaaattatatggagcttttgaagttgacttagacccaaaaagtttaagaaatttagcgacactataaaggcctaaaggaatcctatcctccaccttcataaagataaaagattagctaaaagcttcttcttttccatgatgcatgatcaaaagataatttaactagttcatgcaaaaatacggaaatacccattgttgatagaaacttatgtttcataaactaataaaacatttttaaaaataactgaccaaaatgaacattttgaatgctattatccataaagttgatgtcaaaaagatttggggaaaaaggtactccatctgttcctttttgtttgattgtttagaaaaaaaaattgtttcaaaaagattgattttttagattttcaatacaatagttattagttataattgataaattgtaaacttcaatacaaattagtaaatatcattaatttagtataagataagcttaataatgtcaaaaagatttaagaaagtaacaaactttttcctctcttttcctttcttttgattgcctttagtttgtgtcttgactcttgatttttccaagttggataataatgcaggcttcatgataacattcaatattcattgccgtttacattgtacacataaacataacataacacacacaaaagatgtctccatcacatgatagatcaaattgtacgtcacacagtgttgtttactttaattttgtaccaataattataaaagctgatatatactgtatttgattattttaactaattacattttgaaaataaaatttttagaaacgtacgtataagttaagagtatgattaaaaaacaatttttgttaaaatccttttttgtgtgttaaaatatttagaactttttttttaacacatatttagaactttcttaataatgaaatggatgtataaaacgatatatcgaatctagtattaatgtgtacataatataataacacaaatatacccgaatagagggttgaaaattgaagaacacgtcaaaatatagaagccatccgagattatcgagaataatgttgggaagatgttgctaatgacaaagtttgaccgttcgagctcgtcgagcccttcggttacgtcttccaagactttgtctagttgcatggcattttccgacattcctaaaaagtaaaaactcaaacactttgaaaaactccccaacggccgatgcttgtcttatcactttcgagccaatatttgaccattctttgttttgttttgcttagtttacaagattgattgaacacagtatacaaatgataatagcgtagaagtaacaaattgtaaagaaaaatactcaaatagcatgccatcaacgaaacaaacaaaagatcatctttaagaaagaaagaaaataaaaggaaaggaaagaagattgactttttaaattttaaacttctgagggttatgacatatgccggaagaaggtgataaagtgcaccgtgcatatcatcatctcaatgtagaaatcaaagtttacatatcaatttttttctccaagaaaatataaaatgtaatccattaatttggactcatgatgccactttctcataactagcagagctcatcattccttttcatcatttacttcccttcccaacttttcttcaccaaactatgattttgcagaagaaaactcgaaagtcattgttaattaataccatttttattttactgtagacaatatttcccttataactatttatagaaatactccaaaatactactagtgtattaaaaacagataaaattcaaaagcaaaattttaccaaaaaaaagaacttaaaaagcaaatagtatcattattgtttaacaataaagtttacatttccatagaaatttcaaaaaatcggatacccataattttcgaggtggactatcataatcaactctaattattttatttttctagcattgattagtgttcacaataatggcataaagcagacgcattaacttttgtaattggggttttacctttcgttttcactttaattattttaactaatcctttttacaagacccataaagaacaaaagtcaaaataatcgatagtctcaaaaagtcaagaatctctcacacactcattatgaacacgcaccaccaaacaacacttccattgatcctcataataatctccaccaatactcatttccctcttggattcttcaaactcctctctgaaagttctcatttttggtttacatttcctttgagtccactgttacttactaaaatggtgagcaaatggaagaagatgaagctagctttgagtttgaatctctgcaactatctccccagaaccctcgaggaggaaccaccatcattggctttgaattccgctgagacattatcagatgctgctttgctctctcctcttaactggcccatgactccaacaccttcttcttaccgtcgaaggttgtccagaagtagcagcaaatcgtcaaaggtttgtttcatcatgacccatattctcaaatctctttaattccaagaaagattgctacttttggttcctgaaatactgacctgttctttgtggttcatgagtttgtcttggataagtcgtttgctctgctttcgagctattgtgtgtagttagttgtaatgaagaagagcattgtgtctacttggaagtcctatttttgtatcagttaagccttatattccttatagaacatttatcatcaactttgccctgtttaaaatagaatatagtactttgtctccaaagatcatggactctttcttcttttagatttttgtggtagttggtttctttaaatagcacttggtctcatgtgagattctttgtcttcttctgatgatctttctctcttttttttcctactttcttaaacagcagacttgctctatatgcttgaacaagatgaaagaaggttgtggacatgcaattttcacagcggagtgctcgcacatgtttcattttcattgcattgcttcgaatgtgaaacatggcaaccaagtttgcccagtgtgccgagctaaatggaaggaaatccctatacagaagccgagtttggatcttccttattacccctttgacaggtgcaataatgatgcagccattagccttttccgctgcttacctccttctcaacgagctataacccaagggcatcccgagccagctactttcgatgatgatgaacggttagaagagcagattgtttttgatggtgaaactgaagtcttgaagaaggagaaccgtgattatgtgcgaatgatggacatgaaagtgtatccagaggtctcagctgtaccacaatccaagtcttgtgagaattttgatgtactagtgcatctcaaagcagttactggtgatcagatttctcagtatcgccgagcgccaattgatttagttacagtgctagacatcagtggtagtatgggaggaactaagctagcacttctgaaacgagcaatgggttttgtgattcaaaatcttgggtccagtgataggctctcagtgattgctttctcttcaacagctcgacgtctcttccctttaacccgaatgtctgatgctggaagacagctagcccttcaagctgttaactcactggttgcaaatggtgggaccaatattgtcgatggtcttagaaaaggtgccaaggttatggaagataggctagaaagaaattctgttgccagcattatccttttgtctgacgggcgagatacatatactacgaaccatcctgatccaagttacaaggtgatgcttcctcagatttctgttcactcttttggttttggatcagatcatgatgcttcagtgatgcactcagtctctgaagtctctggtggaaccttttctttcattgaaagtgagtctgtgatccaggatgctcttgcacagtgcattggtggacttttaagcgttgcagtgcaggagctacgagtagaaattgaaggtgtgagcccaaatgttcgacttagctcgataaaagctgggagttactctagccttgtaactggtgatggccactcagggttggttgatcttggtgatctttatgctgatgaagagagggatttcttggtttctatcaacatccctgttgaggaagatggacatacaccattgctaaagctgagatgtctctacattaatcccttgacaaaggagattacaacgcttgaaagtcacgtgcttcagattcgaagaccagaatatgttgctgaagaaaaagttgttcccatcgaagtggtcaggcaaagaaacagattcctagctgcagaggcaatggcccaagcaagaactttagcagagcatggagatttagaggcagccgttaaagccattgagaattttagattggttttggcagagacggttgcagcaaaatcatgtgacaggttttgtgttgctttggactcggaactgaaggaaatgcaaggtagaatgaggagtagtcacatgtacgaggcatcgggaagagcttatattctttctggacttagctcacactcatggcaaagagcaacagcgaggggaaattcaagggacagttcgagctttgtccaggcttatcagactccatcaatggctgagatgctgcgtcgatcacaggccatgtttctagttagtccatcacatcatagactcattcagcccttgctctcttttgcttcacaaccaaagccaaggtaaagaacaaattttgacatcaatccaatgcttatgtacaagtagttacgtagcaagcttaaacttgttttgtctgtaaagaaacaaccacaagcagtcgaaacaattggaggaatgtaagatagatatataatgaatactgggtttagagtttgggaatatcttttgtattagaacttcattgcctatatatactcgaaactcacaaattgcacatacatataactactacacagcaacattaacacattacataacaagaacccaacacaaaaggagacaccgagacagaagagaagacactattctccagctaatgttcttggcaaaatgaaagaaaaaataaaaatttctagcaaaataatttcccgagggaaatgttaaaatggtatctcttcatgaatcatgatctacctttcttcatccttgcatctctctggtttcggaagtggctaagaagttgctgtgcctgcaaagaacagtactattcagatatctcgatcaataagaaactgaacttggtgtgttttcgtgtaaccgcagaagaagaatatagtatataccttctcttttgctctctgtgtaccagactgagacaaggcaacaagcggaggtatggcgccttcttgcaagaccagagtgcaaaacttgggactgttcagacacaactgaagcagcacagaagctgcattctctttccctctctgagatcctaagtcaacagtttcaacaagtaatggaatcccaccttccctcacgatggcttgacgcccttctccaactgcagaaagatttgcaagaagagcaactgctttatcaaccatctctaaatctgggtctaacagctccacaaggtacttaaccgccttagcttgcacgatacgggccttgttatcatgagtaatcgatagattgaacaaagcagaggcggcgtctttctttcctctaaatgttcctttaccaagaagattcaccagagcttgtatcgctgcgttagactggcctattcgttctctgttgacctgcagaacagacagactgaacaatgatgctgctgaattctctttggctctgtcatttcctgtgttcaaaacatgaacaagcggttctatcgccccgacttccacaatcatggctttgtttagttcactgatggaaagattcaaaagagccgtgactgcgtgttcttgagttagcttttcttctgagtataaaagtgacagcagtggagtaatagcaccacaacgcccgatgtgaacacgattttcaatgctgttaatggtgagatgacgtatttcagctgcagcagcagtcttcactttgttagacccgcttttaagatcttctaccaattttatggtatgtgaagtcgtcattgttcctgaatcatctaaatcatgtacagaacactcataagtctttgctgcgctatgctcatgatttacattgtttgaactttctaagtttttcttgggagacatctcactggagctttggtgattccctagtatactttctgtctcatgtgtcaccgaaggtacataatcaacagacgagacaacactgcaaactgattcactcctgctgtgagtgtaagactgccccggagacaaaagctcgaatatttcaagatccttgctttgagattccccgcataaactggcagacacgttaatcttcagtttctcaaacccatttccagtttcaagagatgatcttgaggttaaactgctgctccgtaaagaaaaacgaaaactctcggtgcggttaaagtcttgagaacccatattattagccatggatgaagcatcaccaccatcatactgatgacaagagttagtagcaaggttgatcctgtttgcctccaaccaactcgctatcatagccttaaccgtgtaattgggaatgagttcttgatgagtcagcacctgccgcgtccttggacaaacagctaacccgttatcaagccatttcttaatggatgttctgtcaaatgtctgtcctgaagctactattaccggatccagcatgagttctgttgacaaaggacaccggaaatacgggggtatcgagatacctttagccacttcaagaaactcagttttaagcatgtgttcacggatgcacaagacgagttctatcaactgttcggtttgttccatatcttcttctgacttactggcctgggatcttatcctctctttctccacagtaatgctttcctttaagagatcttggtttgatatcaatccaagcatttgaattatgctttccagatgattgttatccaaagaggtaatatcatctttctgattccgtaaagcattctccatgagttccattaatgtcccctcttgcttaaaactctcagtctcctgcacgcagcgctgaaaccgttccaagagattagtacaagtggctgcatataagacacagagggctaaagaaatgaagaaattctagtttacctcaacactttgtacgcttgaagtaaccggacttgactgtgataactgaagaagtatgcgactaatctccaacgaacaagtctggacctttcccaacaaaacctcgcattgaaacacctgcacaacaacgatgtagtgaataatgctgaaagctgcagaaaaactgaaatggtagcttatatcatcaacttacaccaaacaacttgctcaactttggtgaccagtcctctaagaactcccgagcctggttaacaacagaatcaaggtcttcacatcctttatataaacagtcatcagaaggtatcttgcaatcaacaacttcatcgagcaacggtttcaagagcttcaacaagagaaccatatttccaatacatgtttgaataggattaaatcttatagtctggcacgcaaccagatgaagataccgagatatactgttaagaagacatcgaacaggaacaggatccatttaactatcaagctgaagaacacaaaaaacaaaacacacacatatcaacattataatctttcatgacttttaaaaagagtgttggttccttgatagtgttatcaattggattagtaaaaatattcagacttttctgtgtattatatggaaaaaaagaaaggaacacaaagttttctgatagaacagacatagaaaagcattgactttttgacttattagtctgagaagacagacatgactagattcagtcaattcttgtggaaaactgaagaaaaggaagtaaatttaaacagagacttgacttgagcacattctctcaacagatgtttctgctttctagtttcctttttcccttatatttgattaaactaatttatccagtctaataaagtgtggagaaaacaacagagttactctgaatctgataaacctatcaaatcgaaaaagaatctcaacaaagaaataagacagaacagtgaaaacccacaagtaaggaaccctaacttagtacaaagctaatgtcgaatttggaaaaagattgtaacaaaggaatgtaagaaggtggaggtacccgagaagattgaagtgatactgaggctggaagaagaaaaggattcgaggtatcaagggaacaaggcggcgatcattcgagcttgcaagaggaataatgaagagtttcctaaattatctaaagattggttctttgcttacacaaagagaagagagaagagagagagaaagagactgatgcaagaattcaggcaacgaaacagagcagaaaaaagggaaaaataataaaatagtaatggcgaggggccccaagttggtttttttgcagatatctctactgtttctgtaatgttggagttggtacatcttaaagctgtctcttttttctttctttttatgtttctgatgatatataatattaacacttaagtaattttactcatattgttgccttgacaaaggaataagttaagggttgaaatttgtgaattttaaaaatcattacttttgagattaggaattatgtcaaaggagaagaagattcattggtccttggagattataaggtacaatgattaactttgttatgttctagttttgggtaatatatatgggtttctatctacatcaatatttcagatttgcttttttctttttgtcaacatacagaattcagatttttgggatttccctatttttcctacggcaaataaagtcaaagaaatattaggccgtatgaaacaaattgatgggttaagcccaattgataggctaggcccgttattgttttgtaaagaactgaaatctaatctgtctatggtctttctcagtttagaacaacaaattcttgtttggagatatatgctaacttgtgttaatgtgttgttctcgttggggttacttgtttctccaatagacaatgattactcggtaatgattccactaattggtcagttattcaccgtacgatttaacaacttagcttttgaacctttggaaagcagagtttaaattctataattcgtataaacaataaaaatattgaaggacataacgaatagcagagtttaaaagttctaattatagaatttaaatccggaagacagaagcgccaatcatttaacctttcacaattagcaagcaatttttaaccaacaatgttaaaaatttataaccaaaacgaaacgtaacaacaatcgaaaaaataacaggacaaaataattatttgtttttctctcttgattgagagaaaaacaaaaaaaaaatttgaaaaataattttttctttgtaactgatctttccatacttttgattctctgtttcgcttcggcggaatcagagaatcgtttcaagttacaaattcgcaacaaaaacgtgttgtgatatcgagtatttattcgtttacggggaagaaacatttcaagtggtataagcatttcctgattgtttgaaactttgaatcgtttaataaatttaaaaataagaaaaaaggatttgtagagaaatgggagtgtctcaaaccgacggaagaatggaaggttggctttataccatccgacacaaccgatttggccttcaattttcccgtaaacgatacttcgttcttcacgagaacaaccttacaagttttaaatctgtaccatctgatcacaatgaggtttgtcttttgacttttttcacactttcatttgttttgtgggattcttttttgttcatgtgttatgaattacgtatagatgcaaaacaacatgtattaagtatattgtgatatataaacgaatgagccatttgaatagcaaaaaattatgttttatgtgtaggaacctgagagaagagcatctctagattgttgtattcgcgttaccgacaatggtagagagagtttccatagaaaggtaccaactttaagatactaataagcctacaatttctatatttcacagaaagtttaagtattactatattttcatgtgttgtttcagattcttttcatattcacgctttacaacacttcgaaccatttggatcaactaaaggtttgtttcaaagcttttgtctttacttctcagacttctatttgtcttaaactcttaataatcagttatgtttctgactttcaacagttgggagcaagtagtcctgaagaagctgccaaatggatccgatcattgcaggatgcttcacaaaaggttttttttaacagttttaacattttctttacaatgaaagattttagagacttttcttcatgggactcatgttttcattaggggtttccgattccggattgcgaattttttgtatctcatgctgagaagggacttgtgaagcttgatgtatcaaagaggaaccgtcgcaaaaactctgtggactggacaaattattcatcgacaaattactcatcaacatcattgaatgtcgaaacaaacgtagcgcctgatgtcattgcaccttctccatggaaaatcttcggatgccaaaatggtaagaaaatacaaatttccttgcgattcaagaaaccgatggccttatcgagcttttgaatttcaggtttacgccttttcaaagaagctaaagattgggattcccgcggaagggtaatgcttatttggtcatattattgaaatatatgtgaatcataattggtttttaacttattttcttttgctgaaacctcttgcagcattgggatgatcacccagcaatcatggcagttggggtcattgatggtacttcagaggatattttcaacacgttaatgtctctcggtcccttacgatcagagtaagctctatgacttttgataacttgtcctattaggtcgagtctcacttactttgtttaaaagttaggcaatataggtctacatattatgacttatattattaagagattgaaaaattgctggatttcttgcagatgggacttctgtttctacaaaggaaacgtggtggagcatcttgatggacacacagatataatccatcttcagttatacagtgattggttgccatggggcatgaatcgaagagacttattgctgcgacgctactggagaagggaagatgatggaacatatggtatgaatcattcttgataatgttcttgatttgttgagttttcgggtttataaccttctcaaccttaaaatgtcacagtcatactttgtcactctgtatatcacaagaactgcccaccaaagaagggatacgtccgcgcttgtgtcaaaagtaaagtttcttacctcactctaatttggtttttaccatatgaaaagttagaagggatactaatctagggacatcggaatgtaggtggtggttacgtggtgactccggcgaacaacgggaaacaatcactagtaaagcatatggtagccattgattggagaagctggaacttatacatgagaccatcttctgcaagatccataaccatccgtgtggttgagagggttgcggctttacgcgaaatgttcaaagcgaaacaaggacacggcttcactgagtttgtttcaggggagtttttggacaccaaaccctgcttgtccaagatcaacactatgccccttaaaacagaggccaaagaggttgatctagagactatgcatgctgaggaaatggataaacctacttcagcacgcaatagtttgatggacttaaatgatgcttctgatgaattttttgacgttcctgagcccaacgaatccactgagtttgatagctttattgatagctctccatattctcaaggacatcaggtaattttctgtttaaccactttgcttgtggatcaaactaatttgaaaggtatgtgtgctttcagctcaagattccaacaccagctggtattgtcaagaaacttcaagatctagccattaataagaaaggctatatggatttacaagaggtgggtttggaggaaaataacactttcttctatggagccactcttcaaaaagatccaagtctcactctgccttgtagttggtctaccgcggatccatcgacattcttgattcgcggaaacaattatctaaaaaatcaacaaaaggtaatccattatttagttataaatatgtttgtgttcttcttgaatcttaaatgcaaagtcaacacatatgtgatgatgtttgtacttctcaaacgataggtaaaagcaaaaggcacattgatgcaaatgattggagctgactggataagttcagataagcgggaagatgatcttggtggacgaataggtggtctagttcaggaatacgcagcgaaaggaagtcccgagtttttcttcattgtaaacatacaggtgaaaatttgagagcttttaaatctaaagaagcaatggttttataatagttaagagacactaataagtagcaaatgtattgagtcaggtccctggttcggctatgtacagtctagcattgtactatatgctgaaaacaccattggaggagcatcctttgttagagagttttgtgaatggtgacgatgcttatcgaaactcgcgctttaaactcatccctcatatctccaaaggttcatggattgtgaaacaaagtgttggaaagaaggcttgcttggttggtcaggtacttgaagtttgttacacccgcggcaagaactacttagaggtaaaatattaatcaaagttgatcttgtttgtgatatgataacaacatcataatgtttttgagctttgtttatttcttagcttgacattgatgttgggtcttcaactgttgcaagaggtgtaaccaatcttgttcttgggtatctcaacaatttggttatagaaatggcatttttgatacaggtaagcaaaaaaaaaaacagaacaatgttttcgtattgtaagatttattattcagtttaaggatcacataatgatcattttcaatgttgttacaaaaatcaggcaaatacagtagaggaactaccagaactgctactaggaacttgtcggctcaattatcttgatgtttcaaaatctgtaaaagaaaggtgagacatccttaacaacaaacactattgcaggagcagaggatattttcgatttttgtttctttgtaaaagctgtgttttaaactgtgattcttgttatgtcaactcgtttttacactcaaactgatgtatagtcaggatcagtagtttggttctctgtgttgtctgatccaagattgaataaataaacttgttgataagacatgaaagtccacaggagtgcttccgttcaacattttgcaaaaaggaaaaacagaggaactagttacttgtgaaacactcaataccccttcctccgattttcccttaagccctatttaatactaggttttgtacaatcaaatagcaaagacgataagtggtccgatgtgttccaaacgttggacatttccatacctaatataaatacatttttttgaccactgaatcaactaaatattaactgtttaatattggatttatgggactacaaaataagtataatagagtgagtgtgattaatgaataagaaactgtggggttgaatagcgttgcgtgcctccgaaagcaaaggagtctctttcagtgggttacaggtttctccggttcaactgtcggcaccgacacatcatctctctaactattcttctgttttgtttttctaggtttttttcaccttagttttcctttgctttttcttttccacgtcaaaaacactattggttattctatttttttctttacaataagatattttgactatatatcatctagtaaaattccttacaaaattacatatttattctgcgagcatatgtgattataccaattgttttttcttttttcttttggtgaacatgataagaattattccatatttaatgaaactttttaacatgttacagatggatgatctatcatctacacattcactcgaaacaaggacatataaatccacctttcttatgctataatgacatcagaaatgttgcgaccacaactgtcaagaagctgagtagtatctctataaaattaaactctagacatgatatagaatcaatttaatcatttagtcaaacacccattcagaatcacaagtcctataacgtttaaaattatcagcataagttacgcacctgcatagaaaaaagtccggtaaccccaaaaacaaagcattcacattccaaatgaatcaaacgaaggcttagaaaaagagtataaataagatgtgaacatattaactatgtgttgaaaaacaccaagacatagcttcacgtcgaatagcgccagtggatacataattgtacaatgcaagtgtcaattttttcacaagtttgatttgtgtttagcaactttttgtatgtactaattaaaaattacttattgccattttcatgcttttaaatatataaaatattatttaactgattcaagattatggatgcggtcgtggtgtatatattttagtcttatagactagataatagagagatgaaggcgaataaataatttaaaattaaacaaaatgaatatgaaatatttaaaatgtggtaaggtgagtatgagtgtttccactttctatccatacacattcatcaaattggtgagtactagtgtagtttttgtgttacttttggtttgctgtttactcgcttatcgattacctacatggctacattcatcaaaattggtaacagatcgagtattcacattgctgaagagtttgtgtttgttttattcacatgttttcatgattcctctgttttgcacgtgataaatcatcgaagtaccgtttaagaaatccgacactcgactcaacacactattgttgtcaccgattaatattttcttttcacgtcgaggtttgttcaaaggctcttttttcatcgatattggttttgaagttattaaaaagcaattctcaaaagtttggtgtcattctcaaacgtgctctcaacctttcaaattatgaaaatatagagaaataatacatatgtatgtaccctaaaagctcaaaagcatatacgaatatacccaaaatatatggatagagctaaacctcgagctagaacatatattaggatgaaagatcaaaaataagcaatgcaccatcaatatctattttcattcgtccaccaactcaaaaagcaagaaatcatagctatagcgacgaacatgacggcatatttatgaaaatttgatgacaggtggtaaactggtaatctatcactagttgtgattatgtggcaaaaaattgtagctaacatcacgtcaaaatagttatatcagaaaatggtgagaaatttccatcaccgtcgcgaactatacatcaatcgtgactcttttgtttcataagtaagaacattgaatatttttactcaaaacaatcgagtgaattgtcttccgctgacccataatattactaccgactaatgaactattaattttgccaaattttatttagctcggttggctgatgtcgatttacatggaaaataacatgtggagagttcaattcaacgttttaaaacttttatcttttgtcaaaaatcaattttgtttctcattttttgacttgtagtccaaaaattcttaagactaaacaggttgtaattgtatgatgcaatctcagaaatatcaacacaaatattagttctttaatcataattattttttgatgcaagtaaaatgatctaatggtttgtgttaatgtagttgttgtgccaccatccaaaatttaaatccgcatattatgtaaaattaacaaaataaaatcatatataacagtgaatctggtcgaatccaattttatatttatcagtacgattttcatactaaaaaattagagtacaagtactacgcatagtccttttttccaataaatttcgctgcttggcggagtcttatatcttctcaagttagtaattcaagttgaagggactatagctaaacaactttttttaaaaatagtaatgattttggtttagacccaaaaatatataatttggtgtctttagttgaaataccatgtgaagaattgctgacaaactgctttatacacaaaactcagaggttcatgaatagtccaaatcacatcaagtaaacgaatatatacaaatataaatcgtatagataataaaaaaaaagttgtgtattccaaaacaaaaaagcagtgcatgtggatatggttatagagtagtaagtgaatgaattattgtatcgatccgttgatcctaggacttgttgttatggagtaaacccaagtgagtccgttccttccttccccaagagctagtagagctcgcacactactaggacccacaccatcacatgatctaacgtggagattgttggacacgtgttagattcccattcgttccagttagaaatattcatttgtcagaaagaagagaaccgatccctaggcaaaaccacgtgattgctgatgaatgatatattattatttcaaacttgaatcttcttctaatctttcttctttgtttaatcaaggaacacgtaaaacagtttataaaaaaaaatcgtatcttgtcacgtattttagacaagagtgggtcctaaggaaaacatgggctcttacttgctcgcaagtcacccgcgccctctctcacctgttctctgtgcacatgctaatcctccaccgactagatacgcatacggtcgcatctcgtatattatacgttatcaaatacggtcaaccgtaccaaaaaaaaagacatataatgtttaatttactagcaccctctactccgccaacatttctgtatcacattattactataactataaataatgtgtcacggatttgtattactcttgtgatgttagagccatagaggtggtggcaatttaatttttttcatttattatatttgtatatgtgtgtgatatggaccaactttatttagcgtacttgttgagatcatggaaagaaatcttttgaggagtttagcctttttctaatacaaagagtagaattatgctaatatcaagttaaggttttagttcttcaataaattaggatttaatattttctatttttatatgatttaagatattccgggttaaagcagaagtcttaccaaactcatacatagcgtttcgtaaacaatttagatcaatgtcatacatgcgcttgagttatttttattggacctaaaatttacttgtttagagaaactaaggtttcctacaaaaatgtactcgttttaatcaatatttgttgagatgtcttaatcaatttaagattaatgatcgaacaacacacataagagaacgccttttcattttatgccggaagttatacgaacatttttggccccaaccatatataggccgaggttaaaaaaattgcatagcataataagcatgacattaaataaaaaagcttaatacattattttgctataatacatgatagtgacgagatgtaatgtatatatgtatatatacacatatagtacatgactttatatgtttatttgttataaattaaaagaaaataacacctacatatatagttttttttgtcatttggactttggagagtaatgggggagaactctttcagaagaaagtgatcgtgtatggagtgaagtccaagttagttactgaaaatatatactaaaaaagggagaaaaaataaaagaaagaaagtgaaaaagtagagccttagaaaatcagcattaaattaaataggtcgatcacatcgtttttttttttttttttatttctttagaaaagagtgtacttgaagtaaggaagctaagagtatggttgaagttagcttaagaaaatggtgatatagaagataaaatctcaaaggaaaactcattggatatgtctaagaatgtggagttctttggatttgaattcattgtgtcttcgatttttagtgactgtgcacagtgttctccacaaactattatatatatatatatatatatattttggtaacctaatcaaagttcatttatccatttatttttatgatttgttgtatcatcattgttcagtaagactagaaacttagaaacaaattcttatgattatatctaacagaaaaaaaaaatgattagatcagtttacactttcttaattatcaagatatcgtaacaagaaaatgatcaacccttcactatatggtttactttagttcatctatatattgcctgactttttagctaactaatgaaaactaagttaaattaaaaaaaaaaaaaaaattgttgcttaaagttaaatataattataatttttttgaggccagaatttatatataaaatatatatttgtctttgcaacttagcaagaaaacatcgtcctaggggaaaaactcatgaagaactttttatttggttaactcacaaggaatattttgctcttcatggattgtaattatacaacaaatgaagtaatgttagatgttcaagaaacactacattttacacctataagaaactatattattgtaatcgtgaagtctagtatttattaaaaaaaaaaaaagctagtatctatcactttaaaaaaaacatagaagcttttctttctctgtgtgtatagtagtaaaacaaaagaagatacagactggagtcatgtttccttaagcctatgagtaatagacttttatgtagtttaacaaaaaaaaatggtaacatgtatttggaaaaagtctattcttttactttgcaacacgtagtctaaagagcgagcttaagccaaaaacaatgggaagaaaactagcaaaaaaaaagagcaaaataacaaaaattagatgatcaataaaatattggaattacatgtacgcgtaaacgtcgtatattttccttcgtgccatttcaccttcccattatctcattgacttttcttatcccatatacggtaggagcaaaaccatgtatgactagaattatacgcgttaaacaattctagaatttcttacctaaaactaataaattccgtatttactcttctaattacgttaactctttacttaaatgacaatttaatgggttttttttttattatcttcctttacataaataagctttgttgaaaacataaaaatattgatgtaactttaatttaaaccattgatttataaaaacaaaaacaactttttatacagctaagcaaggtttgtgaataaatcatctttggtaaagtctcaatgagatatggaacccacatgagggaggtgagattacgattttttttaaaatattttagagagagagagaaggaaagagacttccacatgaagacagggtaaggaatggtaaaatacagctagcaaaagaagtgtttctcacacctaactctttataataataagagagaagcatcacccccattgctctccattactcattttttttcccaatcaatcactcttcacttctccccactccttactccttttttttttgcctttctaagcaatctctctcttcttcttatattctcatatttgattccttttctctctcatacgatctgcacaccactactaagaacaacagaggtttgatttcctcctcctccttcttcatttttggttttctttggaaattcttgaaattgtaatgtttttttttggaatcttgatgagtttttgcataaatcaagaagtgtcggtggaggcatttatttcacaccaattgttctgaattcagttttgttttaacactctttttttttttgtaactgaaaaatttgtgttttcttcttggttttcacacaagaattctagaagattgatagataaaatcaagaatgcttaattaacggtgacttttgacttttataaccttatagtctactgtgatttgaatttgtacatagaatggtcctctttatttacttatcaaaaaaaaaaaaaaaaatcaaaaaaggtgggccaaagaatgtttatttttcaaaattttgatttttaaggtggttccaaaatttggttcaaaattttcaaaacttattcagaaacttcctctgttcaaactcttgtcattttcctctataatatcattaaccccatctctcattatttattccagctagagagacttgcaataattgtaaaacatgattggaacaagcttccccgaggatcttgattgtggcaacttctttgacaacatggatgatctcatggactttcccggtggagatatcgatgtcggtttcggcataggtgactccgactctttccctaccatctggaccactcatcacgacacgtggcctgccgcttctgatcctctcttctcttccaacaccaactctgattcatcacctgagctctatgttccggttagttctacgccctcttcgtaacgtatgatttcaaacattaaaccacaagtttcgtgagtaataataaatgaaattttgtcattatgggtggcttttagttaagtcaagtttgtttttttcccgctcattatttgtcttacattgtttggttagttttatgctaacttacgcactctgctttgttctgtttttgcctttgttaccatatcacaaagtttctgtttttatagttaaatgaagtcttttttttttggcgcttaattgtttccctatctaacaatgtttctttgattggggtgaaattgcagtttgaggacattgttaaggtggaaagacctccaagctttgtagaggaaacattggttgagaagaaggaagattcgttttcgacaaacactgattcatcatcttctcatagccaattcaggagctcaagtccagtgtcggttctcgagagcagctcctcctcgtctcaaaccaccaacacaacctcccttgttctccctggaaagcacggtcgtccacgcacaaaacgccctcgtccacctgtccaggataaagatagagtcaaagacaatgtgtgcggtggtgactcgcgcctcatcattagaataccgaaacagtttctctctgatcacaacaagatgatcaacaagaagaagaagaagaaggccaagattacttcttcctcttcttcgtccgggattgatcttgaagtcaatggaaacaacgtcgattcgtattcttcagagcaatatccgcttaggaaatgtatgcactgtgaggtcaccaagactccacagtggaggcttggtccaatgggtccaaagacactttgcaatgcgtgcggtgtacgttacaaatcagggaggcttttcccggagtaccgtccagctgctagtccaacatttactccagctcttcactcaaactcacacaagaaagtggctgaaatgagaaacaagagatgcagtgatggtagctacataaccgaagagaatgatctgcaagggctgattccgaacaatgcctacattggcgtagactaaaacatagagaagatgattcgatttccatgcgttgaagtgattagatatgccaggagtaggaaagagtcagtgagaagaaaagtttttagctttagaagagatgaaggaagagagcaatcaattggagggattaaaagttagatgagaattgattgtgtttgtattattttgtatttgtagtgtgaatgggcaaaaaactcttgaaacagaggaaaagtaagttgaggaagagcagaagattttgaagacattagagaatcattaggtgttgagtattacattaaatcttcctcttcttcttttgttctttcaattctttgtatttttattgtgaggattctctttttttttctttttttttttgtagttgatttgtttagctaaaggattctttttttttgtttttgttaaaatccaatgttataaattgttaattattaaatggttttcttaccattgaaactagacattgctaattacatttttgtttttgttttgccgacaagctaaatacatgtctaacatgacatagtaatattactggctgattcaagtctaaaatagattaaaaaggtttctagtttatgaaagtttttatggttaagttagagttagtggcgagtttaaatcagtgttttatgatacaagcaataatgtaaaattaaatggagatgagagatagagtaacaaccactatatctttttctaacaaggacttcacaaactagcttttatgtaaatccacccatctatgatgccaatttaaagtaagagtgtttcttaatttaactacctttctttcaaaactcactcattttctttttctttcataattattgaaactaattttttcagcatattaaatttgctgaacaatgataaaacaatatgaacgaatgattttagtatttaactttcgtcctcatgtagccatgttgttattttcaaaccataaagaggacttaagagtcgtcagataaaacaatgatattttcgtattcgtcgatgcactaataaccaactcgattggacaacatatcttacttcattcacgattttgatgatttcaccgaacaattttttctttctttctcttttgtcttttaattatgtcattttcttactggatatgttcactggtcgagttgggtcttggcctaacacataagatatatttatgatagacatatcttttttttttatctttttttgagttcaaagtagacttacatatgtcaaaatccgagactcccctaactcatgaaaaaagtgagacgaattcaactactttgccgaatttacctgtcttagaaaatcaatcaaacccttgagttgtttgcttgatcataccttctcttctccttgtcactttcactcaatacaattgacacaaatcatcactcgggaatcaagacccaacacttttgtcttggttgtcaggggctgggttaaatactactaggcccagtatcagcccacgtaatgttcttctttactgttttgtctatgctctagtttttgtttatacattttctttgtattcctcattctcctaacaaccctattgcctgcctattggtatcagaatagaccaccactgcacgagaaaaaacctaaacttgatcgcgaggaaaaaattgtgtaactaaagtggtcgtggagcggtggaggtaaaacattactacatagtactgttacaaaacaatatcttgtaataattaaaataaaagataaagtagtaaaaatattatttttttgtcacatcattacaattttcctaatttatgtttagaccattgctgtttggcatactaaaggtataagaaagacacgccacagagatccagtggtatacaatttttatgctttggaatcaacttatttgctacaatgacaaactaccaaagtttatttaattactttacaaaaagaattatttggataatccaaaatcaaagaggggaaagttggatttacatttccgattaacattttaacgtaaaaaggaaaaatgtgaaacataaagtgggcaactggacattcacggcaacagatcaaaaacccttttttaaatcaactacttagtaaaagaggaataaattaacagattatcacacacactgattgataaattaggagcaaattggttttaacaattcaaaagaaataaacaaagcactaagttagttttggtgctgacgagagtggacggcaaaaaaaacagaagatcactattaagaaagttaaagttaatagtgcaaaatattaatgtagggaaaaaaatgactacaataatgttcaaagttaaaataaaggacattttgttggcaagaagaaaaacattagaaacaaaaacagaacaaggcaaagctgcaaagtcaagttgagtcggtgaaagagaacaacaaccaacctttaccccactgccatcctccctagttttgaacatgtgcactttcttcgttatttaccatcacttttgtgttgtcatattcatcttcttctattcagagaagacatttagccaaaatttatgtaatttccgagattaagaactggttttcctttgtttgtcacttcaaaccagtgatcaacaatgaaaacagtaaatgttacagtggtctataccaagattctaaaagttgaaaagtggaagagggcatgctaatttgaatgaatacccaatatttaagattctagaagctcctttttatctatatatatcaactaaatagtcggcatgaagctctcaaatacttggtccacctatttatagagtacacaacttttttggaaacagctaattggaaaactctgtattatttagggtttggtactagttccttttgttgtgcaactatcaataaataacatataccttctattgataaatccaaatccaaactctaaagtgagtcgctgaaaatgaaagtagtaaaattttgtggcctctcatctcactgtattcatatttcgtttgttgagtgccgactctactatccacctattatgagattcttatgttaaaacttacaaaatatatttacctagattttgtctttgtccatactcttccatgtctcgggatcagaacaaaacaactagtttacgtgcttttttggaaggtcttatagtagtaataccaacagagctacagataatggattaaatacatgtaaccaacaaatgttatattacttttataaaataattataaatcaatgaaaaaaattccttatgaatcgctaaattttcaagaactcaaaaccttattcggttttcataatgagcaatgatgaatacatgttatacgtcgaattattattttggattctcaagccggccctttgctatcttattttctcctttacaacattttttaaccccattgtcaaagagtcggctttgagcccatgattgtaatgaatggatagcttgaatattgcgaccacactaataattcccgtcaaatatttgtttaacttaatgtatgacacatgtattttacgagcaaataaattcaaaaaatttaagcattagcgaaaacattgtttctccgctccacaagacactaaaacataaataatgaattaaatcagtcattctacagaaaattaatcaccgtagtcggttgccatcattccaaaaccttaaaaaaaacccatgtaaaatgatcattaacaacaacaacaacaacaaccaaaccaacaaaaattaaagtaaaaacagagtccaaagcctcgtcacatctgcccataaatacccttcaccgactcaccatcttaccacatcaattctctcatatctctctctcactttcgaatatatcttaagataacagagacacatactcttaagtttggtgaagaataagaagacaatgacgaaggaagtggttggtgataagagatctttctccgggaaagactatcaagacccaccacctgaacctctattcgacgctactgagcttgggaagtggtctttctacagagctctcatcgctgagttcatagccactctccttttcctctatgtcactattatgactgtcatcggttacaagagccagaccgatccagccctgaatcctgaccagtgtacaggcgttggcgtccttggtatcgcatgggcctttggtggcatgatcttcatcctcgtctactgcaccgccggcatctctggtctgatctctctctttctctttttacatcgctcatttgtaataaaattcaaacgtagtttggtttggtgttaaagctcacataaatgttttggttcaacgtattttaatgaaacaggtgggcatattaatccggcagtgacttttgggctgttgttggctcggaaagtgacgttggtgagagcagtgatgtacatggtggctcagtgcctcggtgccatttgtggtgtggctttggtcaaggccttccagtctgcttacttcacccgctacggtggtggcgcaaatggtctctctgacggttacagcatcggcaccggtgttgcagccgagatcattggtacattcgtcttagtctacaccgtcttctctgccactgatcccaagaggagtgcgcgtgactctcacgttcctgtaagcctattattttccccttaagattatttattttaaaagaatgtgacatgattatgttacaacagagagaggtttagtcatggttagataatttagaaattcatcgcattaatggaaacagtagcatacccgtgtcctatacggcgctctacttatcataaagatttagccgtagaaattgtatgcttgttgacaattttgtttttactaaaatcaaaatttaaattcgaaattcatatttagaatcgaattaagaaaaaataaaatagaccgtacaatatatcacggatatattgcgactgtagcttctagattcgtcattataataaaatgcataaaggacatcgatgatcttaaacttttttttgtctttcatgtctctctccataacatatgtcctttatttggacatggtcccaactccatttgtaaccacgtatactactcccaaacataactatatgaatattattctggactgtactatttgtctcgtgattagtaacatttcattattttttgttgttggtggtgatggtgtggtgattgaaggtattggctccattgccaattggatttgcagtgttcatcgttcacttagctacaatcccaatcacgggcactggtatcaaccctgcaagaagtctcggagctgcaatcatctacaacaaggacaaagcttgggaccatcatgtacgttatactatatcatatattttacttcttcgtttttgatattaccaaggttttcaatttattagtgttttctataattactacagtggatattctgggtgggtccgtttgctggtgcagccatcgcagctttctaccatcagtttgtgttgagggctggtgcgattaaggcgctcgggtctttcaggagccagcctcacgtttaactttgatatgctcttccctgagtacatcaaagagagaaaaagagaagataataagagaggcttgtaattttatcttgtgtagacggttggagccaagtgacgtgtagtactagtatctaatttctagctttggtgaggagagatattttgaagtgtcgcttgcgggccaactttgaattgctacttctatgattaaatctatgtctctactccttgactattaagattgctctatttattagtactaaatattccttatatatgatcaacgtaagtcccgagtatttctttaaattacacatgaaagtataaatttacatgtgaaagtggaatagtgtggttccacatcaatgagattatcagattaccttccaagtttcaatcgaactatgttgtggttccttgtagtttggaaagtaatctcatttgatgttattggcatagtgtagtgagtggattggacggtgatggaaaagactcatcgagaggtcaaataaagtggccatcaacctcttcataaagaaagcttttacaacttttgtgtttcatgcgcatttttgaaacacatcatgacgaaaataagtttagtttcgcagaaatctatggagaaatctaatctctagatttcaaactagcatcatgttcaaaagtaaggttttagaccatctttataaaaattttataactaacaaaatgatttaaaatcttttatataagagatttttgttagttataagacatgtctcttaacataaaaaaattattttaaaaaatcattaataataatatttttaatcatctttcatatgaaatacaagaaatcatcatcatacacattttacttttcgtttccagtattacgaaagataatttttgtaaccaatttctttttttttttttcttttttcttttcttttcttttttaaccaaattgttattatgcagaatatatgtataaactataaagtactgtgtggaagctcttttggcccaataattgatcagtagttcattaatgcttctacatgaagatgtatgaggttcgagtcccaactactggaatttattaggaaatttgcagattgatggaggcaagtgtgcaggacatctacaacgatatacaattatatccgtttgccaaaatttctacgcaaagaagatattgaatgtgtctatatgctttaataaatttaatttgtagtcacactaatacagtaaaaccacaccacaacacaatcaatcaaccaaagcaatcatctacaactccgattacttattattacgatgtaaataacaaatgaaacccaatgttcataaaacaagggatttctggattcacctcgcaagaatcgacgttctatgcagaggatgaatctcggaatgttttcagagagaaaggaataacaacaacttcaacgataacatgaaaatgacgatgacacttgatatttattagcttcagctctacgcacacttgatttgaatcacaaccgtccattgatcttctaatcacagccgtccacgtggccttactcaatatcctgtatcaaatcctccctccttaagcaaccatgacctcatggttgaatgtaggatacttctgcaacaggtcaaacaagaactcccaagttgcctccgcctcatcctcattcgtccattgaaccagaacctttgtagctgcacgaccgtggcgattcactagcttcctcttcagaatacgcgcaggttccttaagcaacacatccaacaacaccgaaggcaattgcttaccaactgaagactctcccacccacaacttcagttgagaaacatggaaaactggatgaatgcgagaaatgtcaggcagagctagtttgtaagccacctttccacatgtatccagaatcttataaggtccataatacttaggcgccagtttctgattcgatctcatcaccacagaaccttgacgatggggctgaagtttcacaaagacaaagtcaccaatctgaaagcttctatcagatctcttcttgttagcagactgcaacatcctgtgctgagctcgtaagagatgaaacttcaaaatcaataacatcttctcccgctcttgtaagttctgagccaccacagccactttggactcgcccggaacataaggcaaatgctgcggagggggttgaccataaacagcttcataaggtgacatgttagctgaagaatgaaagcttgtattgtaccaaaactcagcgagaggcaaccatctgctccacaaacccggtctgtcactagtcatacatcgtaaatatgtctccaaacacctattcaccacctctgtctgtccatcactttgagggtgatatgcgcttgagtaattgagagccacaccctgtaatgtgaacaattctctccaaaactcacttaaaaacactgaatccctgtcactgacaatagaattaggcaacccatgaagcttgaatatattatccatgaatgcttgtgctactgtcaaggcagaataaggatgactcaatgcaatgaaatgagcagctttagttaaacgatcaaccaccaccaagatcacagatttcccaaaagaaataggcagaccatcaataaaatccatagatatgtcagaccaaatcgcattaggaataggtaatggctgaagcaaacccggagatgctgtagtatcatacttacactgctggcacacagaacagctccggatgtaagcttgaatatctttagacatccccttccaataaaacagactcttcacacgctgatgggtagcatcacgacctgagtggccccccacacctgaacaatgtaaccatcccaaaatagaatctttcaaagctacaacatttggtacaaccagcttgttcttacggtgcaacaacccttgtgaccaactcatcttctttatcgaatctgcacttctctgaagagcttcaatctgtttctgaaccacagcatcagaagcatacccatctttgagcctctgaagcagatcacactccaatactgacaatgccatatgcaaaatctcagaaccttcaacccgtgacaacgcgtcggccaccaaattctccttaccctccttgtattggatctcatagtcaaattccaaaagttttggaagccactgctgctgaatgggtgtattaagacgctgctccagtaaatacttcaaacttctttgatctgttatgatcacaaaatggtcatgtaacaaatagtgcctccatttctgaatggcaaagaccactgccaaaagctccttctcatagatcgataggtgaagttgtttgccttgtaaatgcctgctaatataagccagtggatggccattctgcatcaaaaaggcactgataccctgaccacaaacatctgtttcaactacaaagggttgatcaaaacggggcaaagctaatactggggttgtacacaatgcatgtttcagattctaaaacgccacagtagcatcgggagaccacaaaaatgcatccttcttcgttagcaaggttaatggtctggcaatagctccaaaattcttaacaaaacggcggtaataattagccaagcccagaaaaccccgtaattgcttcaaattagtaggtgcaggccattccttcacagctaaaacttttgatggatcggtagacagtccgtctctgtcaataaaatgacccaagtactcgactcttgatgttgcaaacgcacagttactccgtttggcaaataatttatgctccctcattacttccaataccagttttaagtgctgcaaatgctccttctttgatttgctatagataaggatatcatcaaaaaacaccaagacaaacttccttagaaacttttgaaacactgaattcatcaacccttgaaaagtagctagtgcattggtcaatccaaagggcatcaccaaatactcgaaatgaccactatgagtcttgaaagcagtcttgggaatatccttctccaccattctcacttgatgataacccgctcttagatcaaacttcgagaagatcactgccccacccaactcatccataagatcttcaataagaggaatagggaaacaattcttcactgtaattccattcacctttcggtagtccacacacaatctccaagagccgtctttcttcttcactaaaaccacaggggaggcaaatgaacttgaactaggctggatgataccgctctctaacatatctttgacaatcttatcaatctcatctttttgatgattagcataacgatatggtcgcatgttcaccggattagtgccctcaatcaaaggaattggatgatcatgatgtgtccgagaaggaggcagccctttaggttcagcaaacacatccttatactcatcaagtaattgagaaatagcagaagtagtacttggtggtgacacctctgttgttaaagaagacaactgcaacacctctccctcatcctcatcagcgtctgcaacacacaacatagacagctgaacttcggagtctctcagtttgttcaatttgtcagccttgatagcacgcaccgacgaaggctgaataccatgtatcatcacccgtttcttatcccatttaaactgcattgtcaacaatgtgaaatcccatgtaataggacctagaggtttcaaccaatgtacacccaaaactgcatcaattcctttcaaaggaattaccataaagtcagctacaaaagtcgtgttatgaatctcccacttaaaattctgtattctcgctatcaccttcagattgtaaccatcagccacccgtactcttgcattatcactaggtaggagtgagcaacccaacttctttgccatttgaggatccataaaattgtgagtggaacccgaatcaaccaacataaaaatggatctcttctgacttgtacccttaactcgcatagtgttgtaagttgagataccctccatagcatgagttgagatatgagctacttccccaactaactccttatgctcttcttctgcatccaagaacacttcctcagcatcttccatttccaaaacaaacaattgtgttttcttgtgaatcttataatgttcagatgtgtattgttcatcacaaaaataacacaatcctttagctctcctagcactcatctcttcagtagataagaaccgccttggctgattttgttgtgtgtctcttggtttttcctgaaacgctggtttattgccctgctgctccatgtctttcttaaaggagaactggccctttgaagtagccttattgttcttccaagaagtcgcattgttctgcacaggatgagcagtttcatagagacgtcccaacatcaaacactgccgcaccgtttggggttgaaacattcggatatgcatctgtgtctcaatccttaacccaaccaaatacgcactcactaaataatcctccgtcatccttactcgagtccggatcgcctcaaactttgcgtgatagtcatcaatgctagcagctgtttcctgcaacttcttcagctcagcaataggatcctctccaaccatctcaaacctctccctgatcctagctttgtacacaccccactcaggaacctgcacttcatcctcaatcatattctggtgccaagtagcagccagaccatccaaatgaatagaaactacagacactcgcatctcttcaggtataggatccaccgcaaaaaattgatcaaccttaaacaaccattccttaaccttctcaccactgaatctgggaaaatccaacttccctaaccttgttactcccgaatgattgttagcgtgaccttgccttctcatgtaatccacgtctgttgctgaagcggatgaagcacgagctgtttgatgagtctcacccagatttgactgcttagatggagacagcatgtggatcgcctcaaacatctccgagatatggcgctcgatcttcagattttgagcatcgatcttgctctcgatcttctccatctgtgactccatcgattcctctgcttctaacgccttctctcgacgagcttgagctaactcctgagctcgagtctcgatcaccatctccgagaaacgtctttgctctgatacctttaatacagtaaaaccacaccacaacacaatcaatcaaccaaagcaatcatcaacaactccgattacttattattacgatgtaaataacaaatgaaatccaatgttcataaaacaagggatttctggattcacctcgcaagaatcgacgttctatgcagaggatgaatctcggaatgttttcagagagaaaggaataacaacaacttcaacgataacatgaaaatacgatgacacttgatatttattagcttcagctctacgcacacttaatttgaatcacagccgtccattgatcttctaatcacagccgtccacgtggccttactcaatatcctgtatcacacacattattctcctgcttgttctgattttttttttcttttttcttttctagataagatttcaattcacaaatttctttttcctcacgtaaaaaaaagaagaaaaaggtcggtctacttgtggctcactcagtggttcgaacctgggtttagattttgacttgaccataacgaaaactaactctaatgattaaaaaggcttcttttattgtgctccgattccaaaatttcacggaaaatagaagcgtcgagttcctcctctccctcaggttgtcaatggccgctaggttacttgctttgagacgcgctttgtctcttttcagcaaccaacaacatcgttttcctttgtctcaaggtttcatctctctccttctcaactttgtcatctttaagaaaaattaaagagttattgaaaatcgggcactagagttaaactggtctcttaatctgtgtaatttatacttgccttgatgtttcttttgatgaatttggttgagattcatgtaaatttgtggtttttatgtttgaatttacactagaagaggattttggggagattttggttttagggttgtttttgtagcttttagagatttggggcattagtgatgatgagtactcgtattctcatgtgtatatcatctaatatcgtctttgctctgttacattttggagttagagaagtgcttctacgaaacctgaagttatgaatgctcacataagtgctttgtcttcaacatatctctatgcattaagcagtagctgtgaacattggcatttcagctagacgctggttaagttttcaagtttggttatatatttcctgactaagatgtgttagcattagtctacggtttgatgcaaacattatcctaggaggttcctatgatgtcctgttatggtacagactgttttagcttcgtgcaactacaactactgttaaattgatctttcttgattatctttttttttttgaaaatagtctcaacagagcagttgtcgctatcaaactcactcttcagcagaagtcatgtttatggaagattatttcagagacagttatctgtaatccgtgaggcaaatgaagcttctgtaaccaatgtctgcaactcgtcaaactctgctactgaatcggccaaagttccctcccctgcgacgccctctgaggaaatgatggtgaagtacaagtcccagttaaaaataaacccgaggcatgacttcatgatggtcttcacttgcaaggtctgtgatacaagatctatgaagatggcgagccgagaatcatatgaaaacggcgttgtggtggtacgatgtggagggtgtgataatctacatttgattgcagaccgtcgtggttggtttggagaaccaggaagcgtggaggacttccttgcttctcaaggggaagaattcaagaaaggatccatggattctcttaacctaactcctgaagatttagctggaggaaagatttctactgaataaggagtgatcttctttgcttttgctacttaaccattatggaacagaacttcaccttatgttccagtattataattgtttcttgtagttcactgtttggtaacatttaaatgcagaagatgtttaatacaattatgtgtttggaatgttccatataggttgagatgttccattgatttaagacagaaacaaaatctcaagagaaacaaaataagaatctcaagattgatcagttttaggtgttcaacttctcaatgatctttgcaagggctgaatatgtgccaatgactgaacatactgctcctactgtcataattaagatacagattgtcacctgcaaacaaaccacagattgttatatcgatttcagtttgaggaatttcgatattcggtttggttatcagtaagtgagcaggccatacctgagtaggggttacttttttccttaagatgctcaagaaacaagctggcggtagtatcagcgtctgtgtccagaaactttgtcaggctaagcaaattcactatgaaactgcaatatgagaatttgctttacataaccagaaaaggatgaaacaaatgtgtaacttacaatgagcattgtcaagaatgatccaatcagtgacatgacaaggcctgcaagaattctgagtgtcaaaagaagtgacacttattttctttacatgtatatttttcgtttgtccttaccgaagaagggaatcgcaagaccaacgagcagagtagagatggctaatgcacttctaatggcgattgcgtagaaacgtgacttcccatagtttgatggtattaactcctcaagactcattgcaactggagataatgtcaaagcatatgtgctttctttctattaaggccacacaattttcagtttatattatgaataagcttatgacaaaattacagagataaatgaaaagtctctgaatatttcttgataaaggatatttggtaaatggattaacaacctgcaaaaaaggcaaggaaaaaaactcttagatgacctcacctggctagctaccaaatttagtgaaaatcatcccaactttcatgtaataagcagaggaagggtgaaaaaaaaaaacttactgtagtccacaaagcaatcttagatgcaaccaaatcttgaggcaagttaagagtaaactgtgattctgttgattctccaaacatgctatatcccataacagcaacacccgcatacataagagtacaaattccaaaactgtgaaaaaaaaataaaaattgatactgtcagtaaaagatagaaatgtagagagttcctaagatgtgtaatgtctttatatttaagcttacgatgccaagagaacagcagaaaattgagatggtttggccattgaagtgtaaatattagggaaaacaccatgtcctgagtaacaataaccatagagtcctacagaaaccggtaatgttgcgaggtttagtggagttcctttgctgtgaataccaacatcatcaaccaaaccaacccaaaacaagcacaaaaccaccaacactgatgcaatcacccctccagctgcaagatcaaggttaagatattcacatatatgaaaaaagaatctttaaaaggtccttttagattgaatgttttatacctgaaatgtaacttagtacgctgagatctcgaagccaaacggttgggagaacagcgagggtggtaagcagagcaaatagacgaggcgcatctaagtgaaaccctccaatacttagactagcatttggaaacattgatgaaagattatcaccttccaatattatgtattcaacactcatagcctgcatgcaaaatgaacttgtgtcaaactttgtgtaactttaccataacttgtatcaaactttgtgtaactttaccatatcataggaacattcagaatttctctctagacaaatatttcaatgtgtagttgatgaatttcaacattttcttatactaaaaaccaaatatttcatttatgaaacaagagagagggaaacaatatggaccgtgggcaaaggtgttgtctactccacatgtggtccattgttttgacttgagattcattttaggtacttattttgaaactttcaaaaatgtattttgtctttatctatataatataacgaaaattattggaggaattgcaagttgttcttacatataactccatatagagtattacctgcaatcaaaagaaagataattgtaaaatattgtcacaagtgatatataataaccctcaaattaacaatgtatagatgagtagattttctttacttacggagaccaggatgcggccggtggaaccaaaagcggcatggccaatatcaggataggtctggacatcggggtggctgtcgaggcagtaccgcagaagcaaaccggtgtaaaaacaaagaataccaaatgcaaagagaatgataagtcccaaccatcctccttccttcacagcatatggtgttgacaatattccaaccccacataaaacattcactcctgcacatgtatctcatcactcagagaattttaactagttaaggtttacatagtgtcagtgaacagagcagacttgtcagttatttttctgttattcacaagttttgatactattgtctcttagttaataacttttgttttaaaaaggactaaagtgttttatttttttgctggacaaaatgtaagaatagttttggtgttacatatgtattagatctcttatttaattagtctaacttcaagtgatcacaccgaaaaaatagtttgacagtgccatcatagagattaccaagtagttgtgatgaaactcaccattaagaacagcctgtccaaaggagctatcattggagattcccatatcatgagacaccaccatggatgacgatggtttcgacggaagcaaagaatgagtgctaagtttatgttttggtgcttcttcatcttctaggagaggctttgtaacacaaggtaatgattctggagtatgtcttcttgtcagtgtcgaagacatgaatgagcttcctcttctcgacatagaagaattagcaagaaaacccaaatttggtgatggtacacttccaaacatatcaatcgattgcctgaaacattaacatgagtaattaagtaaacacaaatgacaaagaagcattaacattaacgttagaaatttgagaatcatgatacctataactcttaggccatgccgttgagtatgggctagctttagacagatgatgttggttttgattgtaagcgtcagaagtatcagaaagagttccatcgtcgtcttcatcgtcggacaagtgttttctctcgtcatctccatcatcactctcgatgtagaggctctggtcagaagtggagtgattcattctctcacaatggatccaatccggtttatgaatgctattaaggttatagagaatctttaaattacacaagaaacaaacaaaaaattgtatcagagaaagtaggagtctaggggagtgaaagggcaaaacagaggacaactagatgagtaaagagccgttaaaacgtgagtcattcatatataccagagttaaccatggttaggtcaagtttgtaactatagtacaatgaatcgattcattatccttttataaactaattgaaaatatgagaaataatggagattttgatatgtattaaaataaatctattagttttaaattttacaaaaaatatatcataaaaaataatcaataaattatcattttattctctatatgaaagagcagaaatggtagtacataaaatgtccaaatttcttcccaaataacttattattataataatgaaatgaaacattatatactattattaactattaagttttgaaaagtaaaaattaaataaaaacattatattttttattttgttataatttgtttctttcactagaggtagttatactaagaaacttgtacttataaaagattcacacataaagtagagcttcatatttttagtatacacatgaactcaattttcacatccactttaaaacatgacttcttataagacttagacattcatattttaaatcttttatgttaaaaagaaaagaaaaaagggctttatgttcatcaagaaaatgtacatgtgttattttaagaaactaaatgtcataggagaggtttctcacctcttgactcggagacggaagtttgaatacggactatgaagaatattttctcaaaaagataaactgtaaaattttcgaaatcgattgtatagagttagtctccatgatgaaatctccagagaattgataacatgttttttccaactttctcgatgaatttgatttttttccgagttaagctttcaaatatttttcgctcttgtaatctctatgccaattagtttgccaaaatttctagatttttaagttataaaatttttgatttaaaatttatttttcctgattggtagcgcaatcaaagaataaatttctatttaatatgtggttaaaaagaaagaaaagaaaacaatttagtgaaaggaaactctatcggagagggaagaaccacgtccacatggtgtgtggatctgtttttctgatcatttggaattttgctatgttagaatggcaatgcatcaaccgcatcaggaaaccacgactcaagaacatgcccacatttactctttatattcgccgcttccagctatatataaattattctcacatgcatgctttcttatttccctatggtattttgaattattttttgaatagatttatcatgtgcttaattgtttgagagtatgaattcacacttgcatgatctatgatggttcatgtttacctgttaatagaagataagaagctt

SEQ ID NO: 1362 - DNA, 103785 bp, Arabidopsis thaliana
gaattccaaattctgatcaagatagaaattttttatattgtttttcgaattaattgtttttcatatcactacaaaacaaaaatattatattaattaaagtataaaaaatggtactaatttaaattactcaaaataaatgatacacatatacatggtgttatatcaattacaataattgacactattattgaattgtttgacattgatttaataaaatcggtacaaattcacattaatttgcatctttttcaaaatattattacaacaacatttaaatcactatgttcttaatcgtcttttcgtaataataattaaattttgaggtttttcgtttttttagataagaaaaaaataatgtaaaaaaaattgacgagatcatattttggttgatcacaagtgaggaaaatgaagttattatgtaaagaaggattctataatcgattgaccaacattcctccaaagaaatatattttattttataaaaaaatctaataaataattggaaataaaatcatcattcaccaaactttatactgttttacaaatctacgttttagtcaatttcttccccatacttgacctcatgaagcaatgaacacaaatctatgtttcgattttaccatggaagagggtcttagtgatatgaatttaaatgtcgggataaaatataagattataaaactataaaggtttattttgaaatacagcacacacaagaaaaaaggcccatcaacctcgcagtcctaattagataaatacacgtcaacttctctgggaacaaaaaaactgatattttctgattcgtcgtttcctttctactttcttcttcgtcaggttttcaaaactgagaaaaatgaatggcgagggaaaattggagactggtggaactagcgccgccgccacaccaaaagaggagaaggaagaagaagaagtagtttcccagagagtagtgtacatgtggggttacttacccggagcttcaccgcaacggtctcctctgatgtcaccagtcgaagtaaagattcctccggcagtcgaaagttcatggaaagatgtctctggtggtggatgcggtttcgcaatggctactgcaggtgatagaatgttttcaattgaaaagttcttcacatttcgaatcaatttcataaaatgttatctgatttgaaatcatgagtaattttttgaagttgaatgatatggtttttgttaaaacagagtcagggaagctaattacatggggttctacagatgatctaggtcaaagctacgtcacatctgggaaacacggggttagattttcttaacttaagtgtgaaattttgattttcttttctttgtgaaatttgagttttagttagtttcgattttattggtttataggagactccagagccatttcctcttcctccagaggtttgtgtacagaaagctgaagctggatgggctcattgtgtggcagtaacaggtaacattttcatgagcttacagagacatttgtgtccaagttcatagctttaattgtcttattgaatacagagaatcaacaagtttatacatggggatggagggaatgtatacccactgggagagtcttcggacaagtagatggagattcttgtgaaagaaacatatcgttctcgacagagcaaggtcaaattttctttgattctttcttgtaaatctatcttcttttttaacattgaggatgaatgtgaaggatggtgactctttttgcagtgagttctagttctcaagggaaaaaatctagtggtggaacgtcttctcaagttgaaggtagaggtggaggggagccaacaaagaaaaggaggatttcaccgtcaaagcaagctgctgaaaattcatcacagtctgacaacattgacctctcggcattgccttgccttgtatcgttggccccaggagttaggattgttagtgttgctgctggtggtcgtcatactctagcattatcaggtgagatttttagcttttcacacaccatgtcactaatgaggtacattggttatcaattatgaaaaaaatatcagtggcggtatccattaagctaaagagcttttggtgtgctataataatcacttgatgcatcctaattttttttctgaagtccagatattggacaggtgtggggttggggttatggaggagaaggacagcttggattgggctctcgtgtacgtctagtctcctctcctcatcctattccatgcattgagccttcttcttatggaaaagccaccagttctggtgtaaacatgagttcagtagtgcaatgcggccgagttcttggaagttatgtaaaaaaaattgcatgtggagggcgacacagtgctgtgattacaggtattgttctcaccatattgcttttgtggttagtcatttattttatgattgtttaaatccaaatcactgaaaccaacgcatttcaaccttagataaatctttatactctgtcatcaggatttaggattttgaaatatgatctcatttccgcactatgccttggttaaggttcacttgttagccttctcggggtcctttatataactatgaacagaccccaataattctcgaccctttaacctggaaaagattgacaatttgacatatcttatctgaggatttatcacaagaacaatacttgctttgcatataatacgaatgagtttttttgtggacagatactggagcgctccttacatttggttgggggctttatggacaggtgagcacgatcgatccctggctttatttattacagtatatgcttgaaacttgaatgagttaagattcttgcttccagctgaacacacatgttgaggaaagctaatcatcatagtgttgaactaattctcaaaatgtttttttatatataccaaaacatagattcaacacaggattcaggtttgataaaacatagaattagggaaaaatgctagtctgcatttaaaataagactggaaaagataattgaaactttcatttgttatacatccgcagctaatattttcactttctgttgggtatgtggaagtaattgattttttttatttttgttgctctgtgaagtgtggccaaggaagtacagatgatgaactaagtcctacatgtgtgtcgtctttgttgggaatccgaatagaagaagtggctgcaggtctatggcacacgacctgcgcttcatcggatggtgatgtttatgcgtttggtggaaaccaatttggccagttaggtactggttgtgatcaagctgaggtaaaaaatcttgaactatattgtttccctggctattctagtaaatgctaatctgattatttctagaggccctgccactaaacttgaagtcatttgatctttcagactcttccaaaactattggaggctccaaatttggaaaacgtaaacgtcaaaaccatctcctgcggggctcgccacacagctgtaatcacaggtaacccatttaaccaaagactagattcagtttcatgttagctaggaaagtgattcatcttaaaacttaaaaaaactgctctgtgtttttgtttgttgtagatgaagggagagtattctgctggggatggaacaaatacggacaggtaaaaagagaaagaccatatggagtttctgaattgttattgtcgttccattgaatgacgtagtttgtgtcttgtctgaaacagttgggtataggagatgtgattgacaggaatgcacctgcagaggttagaatcaaagattgcttccccaaaaacattgcatgcggttggtggcatactctgcttctaggccaaccaactctatgaacacatccgaatttttgttagggtttaattagagcaaatgccagatttttcattctttttttttgttcttttgtcaagctttgacctttttctacatacacgtagacctttagtatcgcattgtacatacacaagtcagttttcatttgttaattgtatgagaaaatgaatgtttagcttttattcatccaacttagtattatgcatgaagtatgaacatactatcctatctccataaaagaaatatgtaaatatacgataacgagttaacttattaaaaaaacattaaccaaacatactatcctaacttaaaaataagaataaaagatgagacttgtatttgtatataagcataagtagtataaagttaacccaacatttccggctacaaataaaagtataaaacataaccattcaccaaatgaaattccttggagaaaaacaaggctccatgggccatgtatactcttcttcttcttcttagtcgtcctctagatgctcatacgttcttcatcaacttcttcttcttcactttattatcctcttatatgtgtgtcatagctgtttcagtaaaagacagcaactcaagccgattgaatatatctaaaaactagtaatatgtagtataaaaaaaagattagaagaagaagaagaagattaacgacgataggattggttaagaatgattccagtggaagagagtgctcgcagtacgtgctcttgggttttttgtagctcgccacatgcagagatggtgacaggaccagtgtaacctaaattccgcaacttccgttctatacactcacggatctgaccagcaatccagcatcatacccactaggatccggaaagctgtccatgtcccaccataccgacgttttagcctccgcctcctccttgcttagcgccttcttcggcagcattatcaaaattggacatataatctcaataatcttcgatacgtagcagttaaggcatttagggtttctttcaacttttaactatatacacgaaacttataggcatagccgcataggcctatttatttctattatatatgttctttttttttgccttaatacagttgacaatgtttaattttttgtaacattaattacaataattagataatcttgtaaagatgaatagaagataattcatattttcactaatagtagaaaatattttacttttatattttggtttaatgaaattatcaagttttgtaacatctgttttaccaaaatttctaaaaaaataagagttacacagctagtcagtagatcctttaatcctcccaaaatcgcctcttcatctcagggcttagtttatcgacgatcctgtgagatctcgtataggtaaatatgactttctcttctcttcacggtaacgactaacgagcacgaatctaatccgtttccttgacttgtggtgcatatgattttatttctggagtggttttgtgcgatttgtctgtattgatttgttttggcctacgtaatttgggtcttcgtttctagggttgtggattagggttatgcgtttaaaaccttttcagtgatgattgttattttcctaaatgtttattttctttagttgtgagctttgtcttaatctggacttgcctacaagaatttacattactgccgtgacatgttctcacaatagatgcatgttgttgtgattttctctgctttttctcttgactatgttctctacaggaaaagggaagttagtagtgcatcaagatgaaagctcttattcttgttggaggttttggcactcgcttgagaccattgactctcagtctcccaaagccgcttgtcgatttcgctaataaacctatgattctacatcaggtactatgttctttaattaattgattttgtaattgtggttcttcttgctatagtgtcatggtcttatttttgtattttgttgtttatgagctatatgctcttttaagtgatgggaaatgttgttgcagatagaggcactaaaggcaattggagtggatgaagtcgtcttggccattaactacgagccagaggtaaaaagacttcaagtctttaaaactttcctttggaaagctatatttgatttttttaatagaagatcttaaaatattgttcaatgttgaataatcattcagcaactgctagtgatgtccaaattctcaaacgacgttgaggcaactctcgggatcaagatcacctgctcacaagagactgagcctttaggtacagctggtcctttggctttagccagggacaaactggttgatggctctggccaaccattctttgtccttaacagcgatgttattagcgactacccgcttgaagagatgattgcttttcacaatgctcatggaggagaggcctctataatggtgacaaaggtaaattatttttgatgaaacctttaagcatttgtgttcatgttttttttactcattatgatataattggtttaaaaggtagatgagccttcgaaatatggagttgttgttatggaagaagccacagggagagtggaaagattcgtcgaaaaaccgaaactatttgttggtaacaagatcaatgctgggatttatcttctaaatccttcagttcttgatcggattgagctaagaccaacatcaatagagaaagagatcttccctcaaatcgcagaagcggaaaagctctatgcaatgctacttcccggattctggatggacattggtcaaccacgagactacattactggtctaagactttacttagactctctgaggaagaaatctccttcaaagttagccactggtccacacattttgggaaatgttcttgtggatgaaaccgcagagattggtgaaggatgtttgattggccctaacgttgctataggccctggctgtgttgttgagtccggggttagactatcgcactgcacggtaatgcgtggggtacacgtgaagagatatgcgtgtatctcgagtagtatcattgggtggcactcgacggtcggacaatgggctcgggtcgagaacatgtccatacttgggaaaaatgtttacgtgtgcgatgagatatattgtaatggaggggttgtgttgcataacaaagagatcaaatcagacatcttgaaaccagatatagtgatgtgatgacaatttggttgatttgtccgtatttttcatttttttgtgcgaatacgatttctaatttaaagtcatgaaaaagtaaaattttcaatgttttataagagtctagctcctagtaagcctttcgacaagtttcctaagaatatcaaagacgctcttgagattgaaggttatattagtgatgtgtcaatcttgacatatgatgctgggaatatatgttgtttgaagttagatctaattaatttatgtgtgtctcttgagttaaaagatgtttgatctaagtgaaatcatgagaagaggtcgtgatcttgttcctcctttttgtacgtgccatggccttggtcgtgattctgaatttttcttaggtacattgctgacaattgaaggtcaggatgtagcaaatcaatgtatcatgcgatttggattacttaagaagtaaaagagatatcagtctcagcgagcagataaaacttttgttcaaaatgatccacagagcagacgtacgatttaatctttcaattaatcatacaaatactaggaaatgagaaatcattagcagagattataaaacctagggcattgatgggaaagggattaaaacagcaaaacactaaacagagtttaagagaacaaaaaccaaagtcttttggacagaagagattataaaagtgaaaaccacacgccctagcatagccttccccgcggtaagctcccaagcagtgggaggagccctgggcacccttctccacaatatggacaaggagtatcgtcgccctcgtcatcttcttcggatctgaaagtctcttgtttgacacgagatattaggctacgtaattggatccaataggctttcccaaaaccatacagtgtttacatacggaatttgcggcgcttctggtgaccagtcattagccacaactaagataacattgtaactcataaacatccaacaaactaagatgttcttcgaacttggtctctcctgggatgcttttggcgattaccatcagatttgtagatgtataatggggagcaggattttccactgaccaaaatgcaatttccactaacatcttgtttagtctctcactcttaccccctaaaaaaatgtatatatcagttatcaactaacatgtaaaattgcactgcacatacatatatatatatatatatatatataatatgtaataaaaaagaactagggtttaagtaaaggacaatcacttttgggttcgaagtcgattacatcatccagactgtcaggtttcttctcaccataagcagtgattgacacctcaccatgataacctacaaatcacagagatcgagatctctgggcatggtggtttcgacggagatcgagaaaacagaaaattagatttagaagtaagaggcctatcaatgttttacatttaagcacagtaaacatttaaagcccagcctagcccattaagaggtaaatctaatttgctacgaattcggttgttaattattaaaccatcggtttagttcatcaaacgcaaaccaaagccaataaccgaataatttctcgagaaaaaataatgactttccggtgaagatttttttttacgacggcttctcctgacaacggaaggtgttgagaaagtggcggaatttgattttgtttcctctcctctcctatctaaacaaggtctgttttcgtgagatccagatattcaatttggattcaaaatcgtgaattgggttttggattgatttctgttactggtctgtgtgctttgatctgaatgttgtttcattctctagttgtcagatttactgatgatgggaataagcaaaacggagatcaatttgcggagattgctttccgctgcacctaaccagcaaaatcagtcgaagcttatgcatgtacgtttcttttgatcttcattatatgtaaactattagtctcgtgtttatgttgatgtatgaaacaaaaaatctgcagtatgttgctacattgagggaacaattagaacaactctccgaagaaaaaacccctgaaggccttcccaggtttacttactctcttgttgattcaccattgccattaaaaagattcctgctttttggtgtctctttctaggatcaagggttagagatttgaactggattgcttcgtattatagttgttgttctaaaagtacatgttttttggtgaaatacccttgcaaccattatgagaatgtgcttattttctcctttgatctctttgtccagagttacaaaggctaaggttaatgagtactatgagaagattgaagctgttgcttccaagatagcttctcaagaggtaagtcacctgaactagaaagggacacttcttttcacttgtctagctaggacattaggctcttgttgatatgatactttgttagttacttccccaatttttactagatgtattggtctcaggaattagtttcaggaacgcacattttggttggttcctgcgtagaaccattgtttagctgcaagaattttcaagttttacttctgtaacttataccaaatttttgatttttgctaaatttacagcctgagacagaggtatctgatgaaccctttgcaaaagattcgactagtggaagctcaccaaaaatagaagatgagcctcgaagccccacttcgccacagctgagaagaagaatcgtgtacgtggaatactagattcacatccttctcaagttgtagtaaattctttcttttagtacttatcaacttccttgattgagttagccctgcaagttccaaggagcaaagctttgatgctgctgatgctgattcatcaaaaccaataaaactagacaccgcagctcaagcgcacattgacaagcacaggtagatgcattgatcaccaagaagaactaggaactcatttctatctatgcactttcgttagtagagagaaaaatttatcgcaaagagtagagctttattgattttaatataagttcaattttgccacttcatgccaagttggtgattcatttgatgacagaaagcttcaagaggatctaaccgatgaaatggtggtacttgcaagacaactcaaggagagaagtcaagcgattagtcaatctgtgcaaaatacagaaaaggtgagatgctaaccatttcctcacaaaaccaattattcttacttttttaatcaacaactatgtaacaagagaagaatctatattggttcatatatccttttaaccggcttcattgctcctaacatttttctttctttcttttcttgtggattcattaacaaaagatacttgactctaccgaggaggccattgagcaaagcctagcgagcacaggacacgcgacaacaagagcgacaaagatatattcacaaagctcaaagacaagttgcttccagtggctcttgatcttcgccatgatctgtgtgttcataatggttgttctgttgatccgggtcacatagaaattgttcagattgtaataccaaattagtgaaatccaaaaaacatttcagtctctttatcatacagtttgtgaaagttcttttgacttttgtaaattctgagtttttgatatgtgaaactatacttctaaaagatatgccagaaatcagtacaatttgtttgtgaagaggaattgagaaatgaagaattgtaatttaaccggtttggtttgaagaccggtatgatttggttagtatagtttgtcttcttcgtacacttaaaagttaaaaccctaaggaaaggccaaaacccagagactgagagaatccattttcttttaatcgccatgggtttcgctttgtgcattcgtagatcagcttctactttagcttccgtgtgtggtcgtgtggctcgagctcaagccgtctccgctatcgttaatcgctcgtctcttgttcccaagccatctctgcttcggcccttcgtctctcgtggctttccttattcgacggccactgagccgttaaagtccgatcagacgcttatacaagtgattgactctgagatcaaggattctttcgaagcagatgatcacgatgcggtaataactgatctttatcacttgattcctgggaaaataaacgaatctgtgggatttgtttttttcttggtttttgatagagaattgtagaagcagtgttgaaaattggactgaatctgtgagtttgcttactctgtggaagccataagctttagtgggaactcatggttgaatctaactggagactttctatgccttaaatcgcatttctttcagaatttgttgagtaaaagttcatacatttcggaatttgatcatgaacctgttttgattctgagctcacacaaattgcatgaacctgttttggttataagcttatgagagactacatggttcttctggttatatatttcaggatgaagagacgatagactctagtgactttcctttcaaaatcgaagataatcctggacacaggactgtgacattgactagagaatacaatggagagcagattaaagtagaagtaagcatgcctggtcttgccatggatgaaaatgaagatgatgtggatgacgatgaagatggtgatggtcgtcatgagaaatcgaatgaatcaagcattccacttgttgtcactgtgaccaagaagagtggacttagcctagagtttagctgcactgctttccctgatgagattgtcattgatggtttgtctgtgaaccgtccagatgattcttctgaagaacagttgacttatgatgggccagattttcagtaagcaacatactgtatatcccctctgttttaaccatatgataaccccaagaaaaaactcatatgttgtttctttcttgtgctttgcagggagttggatgagaatatgcgcaagtcgttccacaagtttctagagacgagaggaatcaaagcaagcgcaacggatttcttgtatgagtacatgatgaagaaagatagcagagagtacttactatggttgaagaagctcaaaacctttgtccaagaatgaaggagacacgcttaagtagagtaagagctagattgttttatgtttgcagatttcatttgtaatgacttttgagttcacaatggggttttgaatgtgaaatgccgatttgtatctttgtctagaccacaaattagaaaaaatataacttattctgcatggagaaatgatacaaatagttgtggtaaatcaaaggttgtggacatgtatggagcttttttgacatgaagagaagctgctaaacatttcactattatcaaagaccacttaagtaatgagatcttcttatgatggtacaaacctcaaggaacactatatcctatgtaaaagggggaaaaaacttcaatcataattgtaaaacataatatgacatcagcagagaaagagagaactaaattccattctcaacagcctctgtcctttgtaagacaggaagatccttatgggtgtaaacgattccattgtctccatccacaacttgtccctttcctctcattatcctgtcattcatcaccacaaccatttaaacttcacagcttttgacaaatcagtgaactatggaagagagagaaacaaaataactcaattgtagtaccatcttgttgtcaataatccttcaactccaactggaccacgggcatgaatcctgcttgtgcttattcccacctatacataagaacaaatcacattggccatttattcattgacacttctccatttgtttggtttatatatgtgatattattggtaactctctctcttccctacctcagcaccaagtccgaacctaaaaccatcagagaatcttgtgcttgcattgtggaaaacagcagcactgtcgagaacacgcaaatattagaagaattagttttcccatatatccaactacaaacattctatggactggaaaatcaacagcagaaaatgttttagtatatatggttattacctgtccacttggcggaggaatatttctgctacttcactatcttccgtcactatgcaatcagtgtgtgcactgctctcataagataagacaaaggagtgaccacactttcagcacatgcatggaatacagagcggtaggtcctttgaaaaatttgaaatcagcagtaattttaccttccatgttggtgaatatgatctatagcaccatatacgtcttctacaatttcaacggtgcaggccttggaactgtactcgtggtgaaatgattttgtttccggaatattcagttttgcacttgctcttggcccaccatacaaagtgacgcctgcaatttgacacgtacacttcagacaagtctctttgaaaacggtcaacaaacaaaacactatcttaatttcagtgtttatggtttgaaatactctagtttagtattaaatataaaacaacagttgtaaggaaatccagattggaagatagatccaaataataaaaaaaaagaattattttcccaagctactatactcacctttggtttgcagaacataaataagatcatcgagaaaaccattctgctccaaatctttatgtacaagaagggtttcctgttaggaccaaataaaaagagaaggtgaagtgagacaaaaagtactaagtgagaaccaaaaacgaaatcacttcgcataagtgaacagtagtgaaagagacaagaatctctaaccatcgcattacaggctgctggatagtccaactttgcatcggaaacaatgcgctttgccatgtccagtttaccagacttatcaacatatacatgacagattccatctggaaacacccaaaaaataagccatgttctctctaggccaatccaacttaagaacttaatggaactgaacttataaacataccagcatggcctagcactgggattttcgtcgagttttttatttgagaaacaagcttgttgctgcctcttgggatcacaagatcaataacgtcatcaagctgtaccaaaaatgtaaatggtgggttccagtataagtgaaaaaagctaatcacttctggggacttgccattcatatgtatctatctgcttaccttgagcaaatcaggaatctcctctcttgaggtcacaagtcctatgagtttacctccaacagtctccggaattgcatcagtgatcacctttaattttcccatgtatttcaaaaattagccagacgaattttgggaagcaagcaaatgactagattgaagtttacaccaatctatgaaaaatgagatcgatgtaccttgtgtaagatagcatttgatcgacgagcctcctttccacccttcagcagaagaccatttccactccggattgcaagcgaagctatctgttttatttattgatagagcatggtgttcagcgatcagaactcacatctaagagtataaaggacaatgacacatgacatacctgaacaagtgcatcaggccgggattcaaaaacaatcagaagaacacctattggtgatgaggtcttctctaaaataagatcatctgcaacctgttacattataaatgtcaaggataatatgaattagacaaaaaatgtcatattaagaggaggaggttttacatcatatgaggatatctcttccctgtatttaaaatctagtttggaatttggtggtaaagtattgtcgtcagattacctgagttttctttaatacacggcctattggatcttccatttcggctagctggcgaacggaagctgcaaggcttgagatctatcaagcacaaaacagtgtaaaaagagaaataaatacaccatatgaagacaaaaaaaatggtacaataaattaaatcacgcagtgaatatactgtcttaccttcccaggcttcataactaagcgagctaccaaagactcttcatatccagcttcttgtgctgcagcaacatctaaatcattctcagctttaattgttttctcatttacttcaagggcattggcaatgtcgtgtagaatttgtttcctatcttctgaagataaggcctgtaagcaaattgcatacaagttgagtacactggcataacaagaaacaatatctgaatttgagttcacttgcaatcaaagccttaacattacctgaagctttcttgagctttcccttgcagcaactgccatgtcacgagaagtagtatctacgaccggagcccataaatgagcatcttgatggaacagggtaccaacacgcagtcctctaaggactttacttatattctcagctgcatatccacttcatgaaaatagcaaaaaaaaaaaaaaatcactcttccatccaacattatatgttgttagcttattgatcagggccttctatattctgaaatttcaagggaagacaggattctaaatattcagggaacaagctacgtggagagaaaaagatgtggtaaagtagagaacttcaacagtgctacaatcttgagcttacaatatcgctcatttttttaattcccatactttacattgcagcagaggaagaaaaagaattatctgtttcaaagttggagactaaattttttacaacatagagttatgcagtataattacagattatgagtacggaagggccttttacctggttatgataacaggaacgccaccataagctgcattaacagcagctttaacttttgcagtcataccccctcgtcctaatttggacttttcgccaaaagtaatctcgtcctggtgtttttctttaatgaatgtgtgtattaattttgaggtagaatcacttggagggccagtgtaaaggccctcaacatcacttagaagaatcaaaagatcagctttcagctctagcgacagaagagcggctaagctgtcattatcccaaaatataccagtagaatcctgtatacgttgaagtacagtgaagctgtaagttagtagactaaaagattcagaggaactaggaaattacttgattctagtttcatcatgtacagtcaataagtatcgctttacaatttctcacatctccaaagttagtagaactctatgtcaaagagcaaaagaaaggcaatcaacaaaccttgtagggggctctgcgagtgcttatagcatcattctcattgaaaactggaataaccctcatcctcagcatcgctttgacagtttcactaagttgcttcctgaaatccttatctctaaaactgctatcggtcacaagcatttgagcaaccgtcacatccaactaccacacaaaaagacgaaaaaagcaacacatcaatatttgaaatgcttgccaataatcaagacacaaccaaaaaaaaaaagcatcgcatcacctggtcaaacatagtctcatagtaagccatgagactgctctgcccaacaccagcacaagccttcccatcaagttccatttgtggcttctgtaaatctgcaaaactgaaaatccgaagagaacaaaaatcagcacagaaacactaaaaacaaaaaaaactttaaacttgttccaataatataacctgctgttgactaattgtctgtatcgaagcctttgtcgaccaagaccaacggcaccagatgacaccaaaatgacctcaaatccatctgagtttaactccgcaagctgatattatattacacaagtccttcaaaaaccattttttcgattctgtttttaaagcaagaacatatattgagtatatcaaaatacctgttcacagatagctcctaaacgtccaagagccaatcttccacctttcccagtaacaactgcagtcccaacctgtaaacaataacaaaaaatcgatcaaatagagataagggtagtgagaaaaatcgaaaatttaggattgaaagaaacaaaattgtcattgtttttcaacattactccagatttctccgccgccaaaaaacaaatgttaaaaaacttaagaaagcaatcattgaaaaagtacggattaatacaaataccaattgacatcaaccaacaacacagacgaagctccgatgaaaaaaaagtcaaacccaggaatgtttttgaagacaatcatcaatcaacaaaaaaaattcacagagaatttcaaaccttgacgacgatacgcttaacgtctttggcgaacgcgcgtgaacgatcgatctccgtcatagtttgtgtctatcgaaaacacgagagaacgagtcaacttagtcggactcagttgaaggaagaagcggacgtggagaatattggataatccggtgtggagagattctactgtgaggaagcgaacgggtttttaagagcgtaggacaacttgtcaaaatagtcaaataagtccttaatctttgtaatcatcaagtaataatacccaagttgttaaaactaacatttaagtcctaatcatagtggtttatgttaaagattccaattatcaatagataacgtctatagttttttttttgtggatttgagaattgtctgcattttgtcttgtgtgattattttgttgtcggttgttcttagcaaatgattgccaactaccatgtaaacaatttattttgtgttacttatgactaaaatacaaagattataatgtatatggtattgtgcctatatagaaatgtatcagaaatctgttgtggttatttatttgatattttttgtctgtaaagtgtttattatataccttaattattcttagtatcaaaaattcaaaaactcatcgcaatagcactaatttcaaactaaaatttgtggcaaaattgtttttaattctttgtaaaatcatttgcactttactcagtaaaatttgttaaggttagaagttttaacaaattatatggccgaattgtaaaatagttataagttaagattcattttgtatttttctgaaccttttataaaatacttttttttttggataagaaccttttataaaatacttagatcatctccattggtaatctctcaaaagagtttctcactactaatataataaaaataataaaaagagaagagagagagagtgtagaaagtttctcaagtgagaaactatgagatactctctacaagccatcattatatttctcttatctcaattggttcaattttttcattaaaataaaaatttaattatataataaaaatttagtaaaatactaatattttttttgtttgagaaaccaaaaggtttctccttgatggagatgcctttaggtttactttatattattattcatgtttttaactaaatttttccaaccacatggcgccacgtgatgacgtgtggtggtgcaggctaaaagaatcagggtgtggcgcagtggattaactctatggtggtggggtattttgggtaatttaaaaattggcggctgagagagcttcgtgaacgtgaacaacacaaaggtttttggacaacaaagcaagtttacttggcaatatctccatgaaacttatcaatatattcctaattcatacgcggcgccacaacatttctttatcatcattagttttttaatttgttatcgttaagtccaaatttcatatgattttgacacaatatgtgacatttgctctatttagtaataataacaatcgtccatatatttacaaggaaatgtttattttatagatatggagaatttcagtgtatttagagacgagcacttgtgttttgtcttttgttttcatcagtttattcttaattttaattttctatagtcattggtagatcccacggtaatcactaaaaggtcagttgcctcccaaagttttttatttataaatctttttaaaggtccaagggtccatctaaatgcctcgagtgtcgagtctaattagtctttcgcacaagtttcagttatttatttagttctctttaaaatattacgtaacgcttactagttttgtttcctagtaatctatatgtgcgggtaatgatgaagtattcatttatatatacaaaaatctataatcatgtaatccatatgttttttagattttagcactagaaatctgagtcttcggccaagtgtccgactaattcaaagatgaatctgttatttgatgaagagttttctgcacatcaaataacttgaatctattatttgatgaagagtctaccacagtccacagatatttcatctaaatgatcaaatggttcacacataatatttatatacataggcaagctacacgaattagtcttagatctaatactatcggtaccacacacatagtgaaatcatgtatcccatatttatacttaactttttcttaatcaattcgtttttcttagtaatcatgtatcggactcatgacgacagtctcttataaagttgttactttcgctaatactgaatccaattacttgtagtagtgtataacacatgtaaatcttagacacgcatgttttttttcgttttttttttttttttttatataactaacatgttgtggttgatagtaattcacaaaaaacatatcttcagaagttttcttctatatgaaaagttatgggacacacgcgtcttcctctataattctagcccaaaaaatttcgcttgtgaggctaagagccaaacagtataagcctatataacaattgtccaaactcatgtcaattatcaatatacgtacgtctttcaagctccaactcttgtccaatctccatcactttttaacaggatccgttatctagattacgtacgctacgaataaacaatttcacacggcagtaaatgattataatcggtaatattcttcttctgctagtcgtttgccatgataccatttttgtcaccaaccaaaaatgatggcaaatgatgtactactaaaaactatgtgaaaatgatttaacaatagttttttacaattaaaatgaatatttaaacaatttagatactataaacctttataaagaagaagcaattctttctcttactactagttttgaaattcttgtataaatgctgaatatattggatcacgttccttaaccacaaagagaattcgaagaacgtagtgtcgtaatctggcccatggtttcttctatggatcatgcaaaattaacaatttggccgacgtgcaaaacaaaaaaagaaagcaaacgaatatttatgtgtacgattatgattatctatatatgtattttaactattattgtatatattcattcgtggggtcgaatggtcacttccaagaatttatgccacatttcaagatatatgttcagccgcatggccgacatcatcgttatagtttgatatcttataagggttcacgatccaaatttttggtacatgacaaactgacgataataatcaaattagtatacgaattttcgctatgtggatttaaattagggttcaagtgcaaagatgttgtaagtatagttaatcgaaatcagagaatctaaattactttaaattaatgtctgatcaatatatgccgcacattctattttctataacataaggaattttattattatttcaaagtaagatgagatactttgtcaacccatgcacacaaaatatgaaatatcttatcttttctttcttttctatttttagcaaaagaaagaaagaaagggaaaaaaaaaagaataatatcttttgtgcactacactatcataagagttcagccaatatgcaacacgagccatttggattttggtaggatggtttcaatggagttactaattaatttccgtataatggaattaactatatagcgtttctcgactcaatagtgacctccgaatttttataaaacaataataataattaaaggcaaattttgattggtactgtttgaattaaattgttaaaaatgtattttgaagaaaaagaggtcatcacgacgagcttccaaaagtggaaaagtctagtgccgtcacgttcagagactatataatacaagcaaacaagaagttacacttatttctttttccttttctgcagttttcttcacgaactggaaaatctcgtagccgtttagatattttccttgcatccttttcacgagagttttaaaaaacttgaacaacaccggctaaaaaaggtttctcttttgtttggaacgactctattagaaaaacgtttgattgttctaaaaggttggttaaaattaaaactcttgacataataagtcttctattttgttttattttaatatacgtggtgacaagacgacgcatatagaagaagaaaatccaaagaatcattatcactgtgctattaaaaaaatttcatcgattaaaagttaatagagacatgtcgacaagaaataaaagttaatgtagacataagtgagctatagaccgacaggaaaataaaagaaaaacagttaatacattttttttatttatttatcaaacagttaatacattattaaagttaattcagtcatcgtgaaaaatgctttgagtgataatcaaaacgagatttagcttaatacaaaccaactactatagaagaaagaaacagaaccctttattaaacataaaaataaagataccattcgtgctacatcaggaaaagtattcgacaataattgaatggagacactgcccattatgtttgatatgcatatgttctcgagatgttgtgaagttctaaaaaatcgaatagagatatgcagatgttttttaaaagatttatattccaataatgggctttagctgccctctttcctttgcaataatgggcttttactctaatttgtagtagtttttttttctataccactaacttgtagattatttcaagtaagagacataaacaaatacagtataaccacgtttgtaaattttggttaaattctgcttagcaaaatgccccccaaataaaattaaatactataaacaccaagtttacaagccaaaaccaactacactactacagtatttttaattttaaagaatccacaacatacaccattaatatcataatctcaaacccaactttaatgacttttgattgccacttaaaacatctctacaatacctcattttacatgctccaattccccattaccaactataatcttactccatctcttattcaccacttacatttttccaaatcacattctcaccaaaaaaaaactgatttcattataaaaactctcaacatttttttccaaatataatcaaaatagttttcaaaagtagtcttgactttcaacattacttttttttttttttaacatcttcattttattgatattgtactttcaacattccttttcctccaaggctttcaaacaagataatttgtcttcttttttttttaatttatttaaaatctttttttaatgatgtataattggagcctcctttaaattagggcccaaacggtggcttcttttagattataacccagggccggcgcaacccttcttcttaacaaaaaccttttgattccaattgttcttctctcttcttcttcttcttcttcttcttcttcttcgccgcttcttctctctcgaattcaccccatctcaagtaagcttctcctatttccttgttataccaaacaaacaccatcttcaagtcaattgattttgttaccctaattgttcccgtccccgtcttgtaatataatcgaaaaatcgaaactttctgttttagagacatggattttgtgaaccctaattgttaacgaatcgttgatatctgtgacgtatataaaccctaatttcgttttcatgtttctttatctacgcaggtgtacgttagcctcctccctctaatggcgactcgtaagttttctgcagagcttacttatgatattgttgtgtttactcttctgtgtatttgaccttaatgggatttgtgggtaatacgcaggtcttcagtttgagaacaactgcgaagttggtgtcttttccaaactcactaatgcctattgcttagtcgctataggaggctctgagaacttttacaggtaccttttttttttttctctgtaaagttttcagtattgtttttgcttcttctatttcacttttttgatgtttttggtttgatgatttgtgtagtgcttttgagtcggagttagcagatgttatccctattgttaagacctctattggaggaacacgaattattgggcgtctttgtgctggttagctttctcaactagctgttatattttcttgcttcaaatcatcgtgattatttcattactttagcgtagtgaatgtggttttgtgtttcttcgtataggaaacaagaatgggcttcttgtacctcatacaacaactgaccaaggtaattttatacttctttcctcagatcgtttctcataacaattaagaattgattgtttaataccagcatgatccagttgtctgagatagagattgtagagtttttggtgaatatcttttatgtaacttgcctgaagcatctactctgcgcctctgcccatacctgtttcatttcagtttatgagtggactttttataactgaataagcttttggtgaagatgattttcctccttaacttgttgatgattttgtaatgttgcaatatttattgagtctcttgttcttttatattagaaatctatataggttttaggtctgtaattggttgcatctcctgagtcctgcttatttttttatgtttactcgtccagagcttcaacacttaaggaacagtctacctgatcaagttgtggtccagcgaattgatgaacgtctgtctgctcttggaaattgcattgcctgcaatgactatgtagctcttgcccacaccgatcttgataaggtaaagattcatgtcatactttatttttctaatgaaaccttttcaaaaacatatactcttttcatgactggcaagaaatggtgaaagaataagtgcgcatttttacaaaagttagcagaaatgtaattaagcctttgtaatcaccatgaatcttatatcttctgatgatgatgataacgataacagagttgtacgtatggcgtttggtttgatgcctctggttcttgtgtttttattttgctttgataggaaaccgaggaaataatagcggatgtacttggcgttgaagttttccgtcagacaattgcaggcaacattctcgtgggcagttactgtgccctatccaacaaaggtggaatggtaagagaatgaaaaacataacttcccttcggaaatggatggcattggcattggtctctcattagaatttgaatgtcttttctcaaataggtccatcctcacacctcagtggaagacttggaagaactctcaacacttcttcaagtccctctcgttgcaggaaccgtgaaccgtggtagtgaagttatcgctgcgggtatgaccgttaatgattggacctctttctgcggttcagacacaactgcgactgagctctctgtcatagacagcatcttcaagctaagggaagcccaacccagctctatcgtcgatgagatgaggaagtcattgatcgatacctatgtttaaattttgtttgtttggatgacacacacatcccaacatcgccaatgtgtcaatgtcagaaaattttcatactctactgtttgcaagaattagctgttttattttatttttgtgtggtttttaacagtttaaaggaaatctgttgatgtctctttgaatctttctgagtaagtgataagaaaattctccttaatactacacacattttcaattttcaatttggggtccacattaggttcaaattttagtggagaagaaaccattggtgaatggataacggttttgttcggtacaaatccgaattctgcaattatatgtgtgtagataaagttaacacctttttcgtttagatagtttgaagattaaactgaaagttaggacctttcatttccaatctctaaacccatttctctacgattagagaagctgacatcaaaattgaaacttgggaaatttttggatttgttcttcttctatggcaactggtaaattttctgtttctctataactgatttatgactttttctgactttgtgtgttcattcttttacgttttctgtttgtttgccgggaaacaaaatgaagaagacgatggtgaattgtcagctcgttaccagaacacgttggatgcattgtcgtctttgatcacaaaacgtggccgtttagctagtaacaaccaatctcaccgattccgtttgctctttcattatctcaaggttacaaatcacttaagcttttttgtgtgtcgtgccaaaatttacgaggtttttgaaagattcatgaatctcttaaaaggttcttgagcttgaagatgcagtttcacaaatgaaaatcattcatgtggccggaactaaaggaaaggtacagactttaaagttccttgagattatgcaatgaagattttcaagttttgtgatcgttttgaagggatcaacatgtacatttgcggagtctattcttcgttgttacggtcttcgaactggtctcttcacatctcctcacttaatcgatgtccgagagagattccgtcttaacgggtaagcttctgaaaacatacactcatctcaacgattttatcaaagaaaatgttcaaaaacataatttcttgcttcagcattgagataagccaggagaaatttgtgaactacttttggtgttgctttcataagctcaaggtgaggagtaaaaacagaacattcatatagatacctttccggtttttctgtctctctcatttcgttatatggttccacattaaagcgcaggagaaaaccagcaatgaggttccaatgcctacttatttctgcttccttgctttattagctttcaagattttcacaacagaacaggttcttaaatctcttttctactaaggtaaacttaactcatgtgatttaattagacatatatgtcattgatggtatgtgcaggttgatgttgttatactagaagttggcttaggtgggagattcgatgcgactaatgtggtaagaaaagtcatttttcgtcagattaagatttgttttaccaggttttgtcactaacaaagcatatgttaatatagattcagaaacctgtcgtctgtggtatttcttctctagggtatgaccatatggagattcttggttagtctcttttgcgccattttcccaaaaatggatccagtgtgtgtgttttaatcactcggttttatatatctaggatacacacttgctgaaattgctgcagagaaagccggtatcttcaaggtgcagactaaaagcttccaagttattcgagtttcagtttccttcttaattgttctctctgttgtagagtggagttcctgcttttacagtggctcaacctgatgaagcaatgcgtgtactcaatgaaaaagcttcaaaattggaggtaaggcttcacaaaacaaccaaatcattagatggttgagatgacataaggttatctatgaattagtacttgttgtgaaggtgaatcttcaggtggtggaaccgttggactcaagccagagactcgggcttcaaggcgaacatcaatatctaaacgctggtcttgctgttgcgttgtgctctacatttcttaaagagattggtattgaggacaagaatggtttggatcagacagtaagttgaattaaaaaaaacattcttgagttgtgaatttcttctgttaacaagtaacggtattttcttacatgaaacagaacggtttacccgaaaaattcatctctggattgtcaaatgcttatttgatgggacgagctatgatagtgcctgattcagaactccctgaagagattgtgtattaccttgatggagctcatagtcctgaaagcatggaagcttgcgctatatggttttcaaaacagatcaaacaaaaccaagaaagaaaccagaaaagatcagagcaggtaaagatttttaaaattgtgtcttaaagatttcaaaaaattctgaaaaagttttgctaatgttggtatgtaatatgatgcagatactcttgttcaattgtatgtctgttcgtgacccgagtttgcttcttccgcgattaaggagtaaatgcattgatcaaggtgtttttaactgtttatgtcatgatagaaactttataaagatgttacaagaaatatcatttgagagttttttcaaattctcaggagttgatttcaagagagccgtttttgtgccaaacgtatcagtgtacaaccaagtgggatcttcgacaaacgttggcacacgtgtcgagtcgatgtcgtggcagttcggtcttcagaggatttgggagagtttagctcgaggtgaagcaaaatctaattcaaaaagtgattctaaaggcaaagaagaagagaagagtttcgttttctcgtcacttcctgtggctgttgactggctccgggacaatgctcgccaaagtaaacaagttcgttttcaggtaaattcagtgtgttactttttacgtataatgttggtttcaggtgacaacaaagcggcctaagtgggattttgttatattttgggtgttaggtgttggtaactggttcattacatttggtgggtgatctcttgagatttatcaagaaatgaatatgtttctgccatgtattcttggccaatctttgcctgtaatgactatatatctcacaacatgatttaacaaaagaaaagaaaagatatttcgacatgatttagcaaaacacagaacacgtgctgaataaaactagcaagggtccaacaaaatcttacaagatacaacgttttcaattgtgtaacaccgaagacaccgattttaaagtactagtggccaagctttcaaagagtagatgtagcaatggaaaaggaatctcaccagtcaccagaaaaagaaacaaggagaaagaaataaaaaagaagaggtgaatcacgtggcggtaaaacgttcgttgcatccaaaacgctgtcgtttttaaagtgtttagtgttgccgtgtaggtgtggcgttggaaccaagcgtatacaacaaagtcttgaagcagagaaagaaaaaagaaagacgagaggcacacaaaaagagatacaaaaccaaaactttcaagcaaagcaattcaatttcaatcaaaaaccaaatcgaagatctttgaaagtttcctttttttccgaaatctgagcttgggtattgttggataagcttctcggagattgagattgaggattttgataggtgaggagattgaaagatttggatttttgggcggcaaaaatggtgatgcagacggaagctagggttggtgtgagctcaggacatggcgtagcttcgtcttctcatcgtttaacgcaggaccagagatcacatatcgaatcggcgtcgcagctcttagccggaggactcgctggtgcttttagcaagacttgtactgctcctctatctcgtctcaccattctcttccaggttcgtcatttcatcgagcgagaagaagaaaaattcaaccttttgtttcattacaacccaatttgttggtttattgaactaagaccaattcaaaatttcaagttcaatgtgtaatgggataatcaaacaatttggggatctgtggaaatgagaaagctgaattgagctctgcgtaaagatagaaaatctattagtgtttgattataccaaatcttcttagctgcacttgtttctaactctgaatgcttaaaaagggaaattttgtgttaaagctgagttttttttggacagcttcttgattgtatacactatgttgtatttaggtgcaaggtatgcacacaaatgctgcagctttaagaaagccaagcatattacacgaggcttcacggatattgaatgaagaaggattgaaagctttttggaaagggaatctagttactattgctcaccggcttccatattcttctgttaatttctacgcatatgaacactacaagaaggtctgagaatctaaactaaattcttagtgtgacattactctccactgagcctatttctgattttggacttttttactcgattatttacagttcatgtatatggttactgggatggaaaatcacaaggagggtataagttcaaacctttttgtacattttgtagccggtggtttggctggaatcacagctgcttctgccacttatccacttgatcttgttagaactcgtcttgctgctcaggttggagtttttgaacataagtatttgtctatttgatatgaactttgttacacagccttgttttctaattttacttgttgagatttcataactgaagcattgttgcattagctgtctgttgacattattctttgcatcaatggtagacaaaagtaatctactactcgggtatctggcatactctgcgctctattacaaccgatgaaggtatcttgggcctctacaagggactaggaacaacgcttgtggtattttccacagaaagatgtatacatcataaatgttgtatcctttcactttcctaactatcctgactaaggttttgttttttgaaacagggtgttgggcctagtattgccattagcttttctgtgtatgaatcattgagatcttattggaggtcaactaggtaataagtcgatctcgatattacagttttgcagtttaactatgccacttatcatttataattactcctaaaatgatttgttggttttcattttcttaaggccccatgattcccctatcatggtcagtctagcttgtggaagtctttcaggaatagcatcttcaacaggtaagttatcttagctattcgttggccttttgctttcttgtttgccatgagactcactgtttgactgtaatttgtcattctatgccttgctcataaacactgattgacttagcatgagcatcaatcagtttcgtattgctgacaagcatcacatcaatagtctcaaactcaaaattctctgtactatgctttcaattcacaatagctgaacatggtgcattctaagttccacttttgctacagaatgataaatctgttgctccttctcatatgtatgcttctgtctttagcaaatagatatgattaccatgatcttttctagttgatttttctctgcaagcatttaacacagtctaatgtgaggaatttacttctataaaggtagttactcatatagtgtctcatttacttaatcaaacacaaacaatgtttacctatatcactccatttgtggataatatctcttttggcccttatatgagtttcacgtcgggtcttattgttcacggctggtctcatgctgcattcataggcaagtagaaccacttcatagcattgatgcattggtcaaatttcatataatgtcatatctaatgtgagaaaaacaaaactgcagctacgtttccattggatctggtgagaagaaggaagcagctggaaggaataggcgggcgagcggtagtgtacaagacaggtttgttaggcacattaaagcgtattgttcaaacggaaggagcgagaggcctgtacagaggaattcttccagagtactacaaagtggtacctggtgtagggatttgcttcatgacctacgagacactcaagctttacttcaaggatctttcttcgaatctataacggtttaaaaggttggtagatttgtttaggtctatttttggtgagaggaaaaaaactgtaaaaaccaaacagcggaaaatgataatgtatacgaaatgtagaattatatatgtagttgttggatgtagcttatacgagattaacatttgtattggtacaatccttttccattgttacatggcttatacgaaatgtagaatcattatgtatatgtagtgttggttaatacgtatatcaattgagggcccaatatacgaagtgaacattgtacagtcctagttaatgacccatataaatggtggagaaatttcggatggtaatgggcttgagtatccgagaaagccttttaacaaggagcttcaacctcaagtatcccacatcggaaagctaagagactttgatagaggaattgatagtataaatacacttcactctgtagggagtttaaaatcacgcagccatgtggtaagcacaaagcgaactattctttcgccttttactaaagaataccgtgtgctctccacgctaagtggcatacgcctatttttggagggctctcactttacagtgggacccaacatctaccctagtgtaaactttttatgtgtggctaacggtctatcaatgggctcaaggcaccaaagctcataaaatgtggctatatatgtttggcaatatcttcttaatttcttaaatgtggctatgtttctctctccaatattttgagaattacccttatgttattatgtattaacgatctatcgaatgatatatccttttcttctttttatgtcgcgttgattccacaacttgcaaatcctttgtttcgttttttggctgttgtttcttttgaatcacaacttgcaagttgcgaagacaacctatagagtcaaccctttgttgttgatgaatattattagttattacatcaatatatggaatctatctttgaccttatcaatcttctggtccttcagatacttatattctccagttgaagtaaagcttataacaacagttacgttatagagatgtaatattcatcaataacggtatatatcgatccgctaattcgtttaagacttccatctaaaacgtttttgtttacatattaaaacgtcatttttggtgtttccttttctttcatgatttcataagctaaaaaagaaatgttgttgttggccatattataagtttctttatttttcatcgaagatcctgatttaattattcatatatctttctgccaatcaacttaaattgtttttcaactaatactagaggccttctataaaaatttatccccattcatataaaacaaaactatactaaaaaaagctattactttgaattataaatcttatctccaaatctaagctaattaatgtacaaggttgattactagtcctacaaactataatattatagaacatttatttgttaagatgaatgaatatattgattcctttgaaacaggacacggttatagaactatatataatgttctagaacgacaaaagttatttacaaatactttggaaagcattttgcatattatttgcctcataaaccttcgttgactttagtgtgggcacgaaattaggtcactcacgggaattgtttcgaggattctacttcatttgatacgatcaccacttttagtagcgtacgtaccgcgtaacgatttcgacaagttttctcctttttcatatataggaaaatatataaaattagtttggctttacaaaagacagaaaatgaaccatatgggcatatgtattcttattttaatatttttttatcgatatgggtattgcttgaagcctgaaactccttgcgagtttttgatgaattgatctttttttttttttccacttgatgatcaatagatcttattttaaaatttgaggatggtcgtctttggttgaaaccaaaactgagtaatgttgttgtcacatttggagccttgtcgattgagaaaaaaatgctatatatattaatttggtactgaccgttacattgctcagcggttcagccgtttatttattcctctaacatttttaaataagctatttataaagaaatttataggatcgggcaaggagacttctgctaaaatcgtcgaagatgttgaagaatttttagtgccatacaaatttagggttaacgaaactacactcaatccgaaaaacaagctatagaaccgatcttagaaaggatctccaactgttttcagattaaaaaacaaaaatgtctctaactatatcatagccaaaataattactttttaatctttccatatttcatatttttcttaaaaacaaaaacaaaacatatatattcatgcacatatgatagataatatcaagaaatttttaataaataaagtcagatataatagatgtgacaaataatctaaaagaccgatcacatgtagtcaaagttttcaactataaatatgcagagatgacagttataagagtcgcacaaaaaactgcaaatcttcacgtgtcttctcttttgtttcatcacatgttctctcctttcttcacctctctctacaaatttaatcctttctcttttcggcatccctaggcccctttggccttttcttaaatacatctctcagaaacaaaaagtttgtatacatacatttccacctacacatctttggcatggacaagaacaagaacaagaaaaagattgtttccgcttcatcttcgtcctcatctctttcgtcattcgatcatatatttgggccaagagtctcttcttcgtcttcttcatcggccactggattgttcaaatccatcttcccaccaccctctgcagtacgtcatctcaagatttcaacatttgtgggatacgttaatcattgtaaacatctgcatgttacatatacatggtgtttaggagctcttacttaatatatatatatatatatatatatatatatatatatatatatatatatatatataacaattaagttgaactactctctaactttctcttattgtgaactaaaaggatcagttggggaggcaagtggactttgcaagtcaaggtggacatgtgaagtatcaatctccaagtaattaaactttctcgagttatttttcgttaaagattcgttatacgttagaactagtctatgctctttttagcattaagaccttaattagtgtgtctatagaatgttattttcactaattctaactcagttcaaaacgtagtctttttctgtcatattgaaacttatataccttaatttgtgggcttacaataatacgtagatgcgaaaggagaaagaagcaataaaaaggagaaaaagagttactataatgaggaaacagaaccaccatgccacttgagctcatccctttactatggaggccaagagacttattcctcaacaacgactaccacccatgatactgtaagtcatagtcgcattatatattacatacatatataacacctacatgactaaacttatattctctactttcaagattttgcttttcatcatatttttttaatatatgcagtacaaaaaggatggagaggaaggcgattccaaacgcgcatcaagaggaaactggtgggaaggtaacttttaatatactccatcctctaacttattacttttattttgtgataaattctttcattatatttgtaaaccaaattatacttttattttcctacttggtgcaggttcgctttattactagcaatcctggtttacgagcacctgttaaggtacttataaatattacatggatttttttttctacgaaatatccaatgcttttcgcaaaaaatttacttagattaaaaggaaaaacgtaaattttattatttgtgaacattttgcaggtgcatgcatggtcttatctttatacgaaatctgaagggtcgctagataataaaaagaaagcaaaatttccaaatgtccttaattacaaatttaaaagagtttagtatattgtctaaaagaagaggggcttgttctttacatgttgattcattttgtttaacgacaaatgcaaacaacacgaagagaagtctcttcctgatgaaattaatgtttggctcctttttagtcaattaatgtttgtctaatagtgtatgtaagggaaaaaatgatatgtataacagtgtctactacaatgtacttagcttactttaataaataatggatacaaatattttgctcttagtaatattatgtttcgatcatcatcttcccgatcgaaaccgagttatcggtgaggtcgtttcgaagtttccgaaatttctaatttctaatttcaatactatacttttttttcatctatcatttaacattctcctcaaaatatttgctaaattagaaatagaaaaaaacattattgccagaaccatagaaaaggaaactaaaccgtcgaacgaaaaaaagttaaatggaaattcgaacaattttttttttggcaaatagaaattcgaacatgaaaatgggaaattcgataatgtaaacaacacaacgtaaaatggaaaacctcaaatcgctccttctatatatacgtttccctgctcatcataattttcatcaagcaactcttaatttcctctgtctttcaaagttcaatctcttaatttttctttgcgatctttcgaaagtttccacaatggagatgttacttggtggacaagcaaccaatggagctcttcgttcaaagacgaagataatttgtactcttggaccggtttcaagatcggtggagatgattgagaagcttctcaaggctggtatgaacgtagcccggttcaatttctctcatggttctcactcttaccatcaagaaactctcgataatctccgaaccgccatggacaacactggtattctctccgccgtcatgctcgacacaaagggtcctgagatacgaaccgggtttctcaaagaaggcaaaccgatacagctaaaccaaggtcaagagatcaccatctcaattgattacatgatagaaggagattcaaacgttatctccatgagctacaagaaacttgcagaagacgtcaaacctggtgatgtgattctctgttcagacggcacaatctctttaactgtcttgtcctgtgacaagtctttcggtcttgttcgttgccgttgcgagaactctgcaattctaggagaaagaaaaaacgttaatcttcctggaattgtagttgatctcccaacacttactgagaaagataaagaagatatcatccaatggggagttccgaacaaaatcgacatcatcgctctttcttttgttcgtaaaggatctgacctaactgaagttaggaggttacttggagaacactcaaagaacatcatgctcatgtcaaaggtggagaatcaagaaggggtcatgaattgtgaaaagattctggagaattctgatgctttcatggtggctagaggagatcttggaatggagattccgatcgaaaagatgttccttgctcagaaaacaatgatcaagatggctaatgctcttgggaaaccagttgtcacagccacacagatgcttgaatccatgacagtatctcctcgtccgactagagctgaagccactgacgttgcaaacgctgttcttgacgggacagactgcgttatgcttagtggagaaaccgctgctggagctcaccctgaggctgccgtgctaacaatgtcaaggatctgtaaagaagcagaggatttcatcgattacgacattctccacaagaaaaccctaggaatggtttcgttaccgttatctccgatcgagagcttagctgcttcagttgtttcgacggcacagagtgtttttgcgtcggcgatcgttgttctcaccaaaggcggttacacggcggagcttgtggctaaatacaggccgagcgttccgattttgtcagtgattgtgccagagattgctcaagggaatgatatggagatgtcgtgctcagactcggtggctcatgcggcgagacgtggtttgatttaccgtaggattattccggtggtggcgacgggatcttcggctagggattcaaacaaagatgcaacggaggagatgattaatttggctatcggattcgcgaagacgaagggaatttgcaagaatggagattcgattgtggcgttgcacaagattgatggttcctctgttgttaagatagtgaccgtggagtaatcaagttttacgctagtcaataataaagtcattaaactttaatttcggttaagctttttggtttaaccattgtttttggtcacatgataataaagttttaaacagattcattatttgtttttggtcacatgataataaaattttaaacagattcattacaaattcgaataacacccaaagacactaataattttattaacattttaccattcctggtgtttatcttaaaagaagatggtcttttgactcttgtttgatctaataataagatatgagattgtgtatcgatcaatcaacaaatacattatataaaaacgaattgtgcttggttcttaactccttgagacaggacaacaacaacaacaacaacataaagaacgtgttgtgtgatacagacagaaagaatctaaatccaaattttttaacttaacattcaaccccggagataattggccaatgctttctttggaccaaacccgcaacgttctctaatgttcctcccagagagaaacggagctctttctcctcctcttcctccgttgatggggcttatcaacggcattggtgaataacttggagtcgatgcagagaaagatagagttctgtacggagttgacgtgcctgagaatgacacagagaacagcgatggagcagaaagtttctcccttagagagcctgaaccaccactagctgcttctttagacaacaatctcaacttgtctgaacaagaatcatcatcaccatcaccatcatctttgctgatgtcatccatgaacaacacttcctctatgcgtacaccaatgctatacgctaaactctctaatacccttgagtagctctcaagtatagactttcctacatcctgcaagaacagtttagatttcattctttcgtgttttaagtgtgtgatgtgaaaaagtcaatgaatcaaaccttgttgtattggatcttgcttgtgtctaaagctgtttgtctaagtcccgggaaacgttgcttgagacggatcaataagctttctgctctctccgcaaatatttcccttttgtcaccatcggtttgatgcatcatcatctccttcactatcatcccccatcttgtacttgtggatcgatacagagatatcagatgcctcgagtgagctcttctcctccaaacgtacattgatgcttctactcggttcgccatttctacaaccgcaagctcagatgaaagatctattgattctagcaagtgatccgcagagaagttatccgatgtgatgtttctatatagaaaatctccaagacaagatcttccgttctgcaaaataggaacaattcagctagaggaaattatattaagtttggctctgagattaagtttggctctgagattaagttgtttcttacctttggaagggcttcaaggtatgattgtggaacttccatttcagctaaagcaatgctgttgattgacatacaagctttcaagatttggttggtgaattcgcgagtatgatccagtttcttcctagtttgttcggtaagtccatcggatggcacacgcggcagcggaagccaccatttgtctccgtcttcacggaaagagttagaccttgcagattccgcagctacaatcccttgatcaacgtaccagaactctgtttctccaaaactatctaatatttcctaaagacgtcaaaaacagaactctattaagaactcacatttgaaacccctcatgagaacagaacaacaaggaaggatcagattcttacaataagcatattgtctagcttcctaagagcaggaagacaagtaaagagatctgatcttggtctgcagttcatcaccttaaaatccaccaaatcatcaatgaaacagaacacaatcactaaatgcttaagcttgaaaatgaaattacctcaatcttgtttccattggggaaattctgaaaggaaggtaccaattcaacaatgtgatcactaacagaaagaagaacttcgatttctcttctccacattaattttttctcactagggattggctctagcctccattgttgtcccaatattgcagctttcatcacattgaaatcaaaagttagactcataagtaaagtaagatatcaaagaaacatcaaactaaagtatggaacttcgaaataaaactaccatagagattggtaatggcattagaaatagccaaagcaggacaaactccttcaccagaaccagacatgtcttcaccaagcaacaacttcgccattctctctttcaacaactcaatctctacaaaaacaaatcaaaatgtcaaaactttaagtcgtcttcgagagagattgattattagctaatgttcacgattttcacaaacctgaagtctctgttccaactctcttaaacccaaaatcatcgatctttgtcggagttttcttcttcattttaccagaactcttcctccatgaaccttgtcctaacggccatccaagaatctgcgatttcgtcggaggtgatgaaacagatctctcagctacagaagacctcccggagctcgatccaacaccagaacttgagctgctaagacttgaatcagtcgttgactcagtcactgagtcaatcaaaccaatgatacgtttactagtctcaccaaatcttttcgatccctcaaacccgatacagctattatcctccattttcgctaacaaaaagaaataaagattgagtttttttagatacccagaaaaaaggaagcagagatcatagagaagaagaagaagaatagtaattattgtggtccatgaattcgagaaaaattctgattgttttaattgtttgtgttgttttttgttctgtcttcaaaaaatttgaatcttaacgtctctcttcgatttttataatattaaaaagaaatagtgagtcatcaaagtagccgttataatctgccacgtcagatttcggacaaaaagtgttccgtgatcttcccgcagtcttaagtccaaaaactcaaaaccaagagagtccattggaatttctccatttcatttgtttggtgagatattaattattcttttttataaatgtttccgttaaacttcttttgatcgcatagataattttctactgaataaagtatgttatcgtgatactgatttaaatattttaagaggtaacttctttggtttttttgcttaagagttgttgtgaatagatattattattatttgacggtatgttaacacatttacaaaactacattgattggtctatagatgcatatattccattttggataaattattgtcacgttcgtttcgcaaatttctgccacactgattatcacaattaagaatatgttcattttatagttgcgaacaatttgattaccgtgaatcgggttaattttgtagttcgtagtgataacgattcaacaatataaattttataatgttaaatctcttacaaattaaaatttgtaaaccgtttttgctaaaaattaccgttgaccaaccaattataaaaacaaacaaggtttagttgaatagttaataacaattgcaaaaaaaagaagaacataatgagttttgtaagcctattctaatttctatttagtatgatattttctttttgagtttacatgtttaagtccacaaaaatttgttattgaacttttttcaataggctttatattagttggagttggatttgagttatatattagaaactttttttctaaacttccgatgagagacctttggtttgtatccaacaatcttcctttcaaactaaagaccacgaactaatgcctcctcttcaacaaaattttggcactttcttattcgtgaaaattttgagataccttcttatcgtgtcatgcttgagaggttttcccacaccgatcatagtccaagccatagatctactttttcgacatatattctgataccatttaacgggttttctaaggccattccaactctcatttaatatgatattgtcctttttgggctcacatgttcaaacccgcaaagatttgttattggactccttccaaaaggcctcatactagttggagttgaatttagtttatatatcaaaaactcttttttcaaactttcgatgtggaacctttggtttgtatccaacacaacatatatcgaatatttctaactaaacattttattactcgaatgttgccagaaactaaaaaagcaaaaaactatcaaaattatatttttggatcgttttaaattagtataatttacaatgtcgtatagaagtgagatataagtcatgtaacaacaaaaataaaccgattggtctttgttttctggatactccgtacgaatctttccatttgattagagatccatttgattatttaatttggtatggtgactggtgaggtagtcttattaggcgtatattttatacacacaaaacaaaaatcatagttatttacgtaatttatttaaatttatggctatttataaagtagtctttctttcaactatatgtaaacggttatatcaatatcctttttagattagtaagtctatatgtttagtcaaccttccttcgtttaaataaatattccaataatatatatatatatatatacataccacatacgcacaaagtgaatggtcaacaaacaacatttcaaaacttacaaaataaggcttaaaaatcttctaataaagtgacagttaaaagattgatttacttccaaaactgtaaattaatatataatatatactccgaattgtatttcttaccaaacatatgaattttattattgcagaatatttgaatatgaaatttatgacttgttatatatgtatgtttagtcatacttctttaacaatgacaatttttgttcaaactttcttcatttagtatattcattcatatactttgaaggaaaaaatagatattttcataatttataatatatattcatatgtatgttcttgtcaatatatattattcataatttatttacacagactaaattcaatgcactaattaacgttacctaaactaatcacctctcttcttcggggttataaatagcgagcttataagttctacttaaccattccagcctaatttacatgaccatggcttccattaccaattctcatcttacattgttgtttctaatctcttctacttttattatttttacgttagcactagaattttcagatgttacagcagaagcaccagacggcttcttacctttagccaaaaagcatgttgtaattcgcaatactgtaaaaaatggagaagagttgaatatacattgcaaatccagtgaaaataatttggggcatatccatcttaaacatgggcatacttgggatttcagatttcttgttaacatatcaaaatctacaaaatttcgttgtcatttttggtggtatgcaggcaataagaaattttttaattactggtttgatatatttacagtatccagagatgataaaccatccggaagatatccagtttgtcaagaatgcatttgggatttaagcgattacggtcctgaaggctatatttatcgtataaatcgtgataaatcagagccttggtgttttccaatggacgatgaaccctaaaaaaaagaaaaaaatagtcttgttcaacatattttatctaataaatgttgtcattataatttattgaataaaataatgtcattaatactattcgagctctctttaattgaagtgtttatatccacaaatgcaaaaaaaaaaagaaaagaaaaagaaatatatatatatatatatatatatatatatatacgtttatgttgatgaatcatttgcaacctaagtttctaaccctatgtgccaactttttagaatgtcgttgttccaaatttcaaaagtctaatgaatctaagaaacatgatgagctaattaatcaatccaaattctaaaatcatcttcaacaagtcctcaaaccctcaaatttgagggtattttgaattctaacaagccctcatatccttattttttaagggtgtgaataatgcactattcacacccttaaagtctttcttatatttcattttactccttctaatttatatatcttacgtatagttatattcaattcaattatttcaaatataaccatataattcaaatacattgaaattaaaactgaaattattaagaaaaattctttctaatgcccttttcatgatgccacttttcaactctaccatttttttagccatttttatttttatcctttttaaaattttaatgaccattttacccttatttggaaatgttttaggttaacaaaatgaaatattaatatttttcgcctgaaatattaatatttttttgcctaaaatattccaaaacaaatttcccgacaaaattttttgaaaaaaaaaatttcctccaaaatgtttaaaaagatttacaaaggattttaaaagagtttaaaaagatttacaaaggattttaaaagagttttaaaatatttataagggattttaaaagggttttaaaaaatttacaagagattttaaaagggttttaaaagatttacaagagattttacaaggttttaaaagatttacaaatgctttttaaagattttaaaagggtataaaattgttttaaaaatattttaaaatatttacaaggggttttaaaagggttttaaaagatttacaatgaactttaaaagggatttcaaatatttacaagggattttaaagagttttaaaagatttacaaaagtttttaaattttttttaaagggtttaaaagtgttttaaaagatttacaaatgattttaaaagagttttaaaagatttacaagagatttttaaagggtttaaaaggattttaaaagggtttaaaagggttttaaaagatttttaaagaatttacaagaagaccctttaaaaactctcgtaaatctttttaaaaccttttaaaatcccttgtaaatcttttaaacccttttaaaatttcttgtaaatattttaaaaacccttttaaaattccatgtaaatcttttaaaacccttttaaaatctcttataaatctttttaaatccttttaaaattccttgtaaatattttagtacccttttaaaatccattgtaaatcttttaaaacccttttaaaatctcttgttaatctatttcccgcaaaaacaaatttgcaaggaattttaaaagcattttttggcggaaaaaaatatttgttacgaaaaacaatttggcgagatttttttttttggccggaaatagtttgacggaaatttttttttttggcgagaaaaataaatttggtgggaaaattttagtttccaattacgtgttcatattaaataaggataatttggtcattttgttcaagagaatgtatttttaaaaatggacaacataaagaggtattgtttaaaagtggtagtaaaaaaaggatagttttgtaaatctcccaattattaatataaaagatataatgtttcgaaacaaagtttatacaacaatgatttcacattaagcaatttaacacacattaaaattaacatttcaataataattatatacatgaacacacaagtttttttctgtttttttttctaatttatatataatttcgtagtaacatgtgaagttattgcttttctatatttgttcagacatatttttttttaaaatatatgttttctatttttttatgaagttttatcattatgggaaattattgttaatattgaggcctataatataaatacagataaattttagaaatagatttgagggtgtgttgttggagtaagatcatctccaagagatactgaaccccttcaaatataaagtttttatatatccaagagatactctaatacttcataatttagagtattgaatagtgatactccatactttaaatttgaagtatcatatttttttatttgcatttttaagttcctaaaattatatgtttcataaataagcatacaaattactttgtttatcattttagtccttaaatttttatatattcaaaatatttcacatatagcttataaatttaattgttacatataaaattaaatatatacctttcaaataaaattaaaatattaatattttaaaatataacatagaattaaaaacaaatattacacaacaaactattatattaaaaatttaatacaaaatcaagcaacataattataataaaattacatgaacacatatataatacacaaattacaatattacaacaatactaatatttaggtaaatttgagttagttataaaatttatatggttttaaaataattatgaacaatataaggagtataatgcaaaatacaaattttaaaaacttttaaaaacttcatatttgaagtatactcttggagaagaaacttcaaattttttttgcgggaaatagatttacaaggaattttaaaagtgttttaaaagatttacaagggattttaaaatggtttaaaaatgtttacaagagattttaaagggctttaaaagatttataaaggtttttaaagatttttaaaggatttaaaagagttcttaaagatttacaagagattttaaaagtgtttaacaagatttacaagagattttaaaaggttttaataaaatttacaagagttttaaaagggtattcttgtaaattctttaaaaatctttcaaaaatccttgtacatcttttaaaacccttttaaaatttcttgtaaatgttttaaaacccttttaaaatcccttgtaaacccttttaaaatcccttgtaaatcttttaaaacacttttaaacactttaatttttttttaaaaacttttgtaaatcttttaaagccctttaaaatcctttgtaaatattttaaaaccttttaaaattctttgtaaatgttttaaaacccttttaaaatcacttgtaaatattttaaaacccttttaaaatcccttgtaaatcttttaaaatccctttaaaatcccttgtaaatattttaaaatcccttgtaaatcttttaaaactcttttaaaatccctaataattctattacccgccaaaaaaaaaaattttgcggaaaaaatatttttgaaaaaaagttttagcgggaaaatttttgtttcgaattttggcgggaattatttttttcgaaaatcttttgcgggaaatttttttttttgaaaatttttggctggaaaattttagcgagaaatttattttgaaatattttaggcgaaaaatattaatatttcattttgttaacctaaaacaatttccaaataggggtaaaatggtcattaaaaaattaaagatggtagaaataaaaatggcaaataggaaaaggtagaattgataaagggtaccgtgcaaagggcattctgagcaattattcattttttaaaccaatgaaactcttttaaatcaatgatatttgtagagaaagttgccttgctcaacagtcttgcgttcttcagaatgtatgtagcctcttctttctcttcttccctttcccaacggtatcttgtccacacaaatgtctcgaggtgagacaacaaacattgaggaacattctttggttgattccatttcccgacaaccacaccatctttcctaaataaaggcgcttgctgatgagaccaaacacgagacaaatgcaattagtgtatatctcgttattagaccaaaactaatcgatcgtaaaatgttagctagctgaataataatgaaatgtcttacaccaatgagcttaaggattggtgtaatttagaggctctaagagctaaggagagtctgatccaagataagatggatcaaatttgaatacaagctggcatgaatttgaagtcctgaccacaccatccaatccgttgagcaccttaagtctctctttcaacttattgagcccttccgattcaatgggatttgtcgtgaaagtttccttcttcaaccgtcttccgttcttgagaatatatgtagctatttctttctcttcttctcttccccaatccaatcttctccacacaaatgtctctaattgtgacaacaaacattcagggacatcctttggctcattccatttgccgctaaccaaaccatctttatgaaaattctgacttcgctgagaccatagtgtatatatatagaaacattgtgataacaaagaactccgaaaggttaccttcaagggtgataaattcaataacagacgtgtgactgaagtgaaagatccaagaaacttctcaatggttatagatgtaacttcagcgatatttgcctcaaccaactccggcgcattcagctgaatgttcgctggaaataaaataatagagctgaatattttttttttttaatctagtaaaggaggaaaagagacaaaagatagggttttaattataaaataaaatgagggtaaaaaagacttaattgtttttgaaaaacatatttgactaatctacaagaaaaaggaatagatggacaaatttttttgtagatatcctttagatttaatttcccctactttatatttgaagtttgcatactctatatatgaagtatctcttatagatgctctaagtgaccctcaaacccttattttgaaggtttgccacctcttaaaatgagggtcgttgttggagatgatctaacaaactattgtttaaaaaaaaagttatatcttatctaataaaaatgttaccatcaaaattaattgaataaaataatacattcgtgtgttcaaatgtgtagtcgtttcctttctttgaagcgtttatatatcacacaagtcctctttgttttaatttctttgaagttcttatatatcacataagcaaattaaggtttctaactctaccagttgtttctgactggttttccaatttcatggagatgcttccgagtttgtctcaatccaagaaacatgacacccaacgtatcatccaaattctatataataaaaaaaaccgacaggcaacaacccccacgtttgaatcctgtagagtgacatttcaatcctattttcaactccaatagaaatcgatacgcttatatatgtttacttagtctttattttcttttgcaccttcaaagttttgatggttggtttctattttgcttgtgagtagttgagtactatatcacgccgtgtttctgctatcttgctctctcatttatgtctctgtagttctgtagttgttagtgatgacgattcaccaatataaaatttataatgttaatcttacaaattaaaatgtgttaaccgtttttgcttaaaattgccgttgaaccataaattatagaacaagcaagatttagttgattacaatatctttttttagataagtaagtctatatgtttagtcaacctttcttcgtttagatatattcatataattatttttatattcatataattacatgtgcatcgtatatatatataccccatacgcacacggtgaatggtcagtaaacaaaatttctctttttttttttttcttttttttttggttgtcaatcccaacaaacaaaatttctaaacctacaaaataaggcttaaaaatcttctaataaagtcacggtgattgggcctgttcttctcccaatcgccgcgactcaagttagcgactgaaaaaagcactggatttatctaattagtgtcgctaaagttaaagcagcgacagataaaaaaaaggcaacggcattaaattcgaaaaagagatgtcgccggtgaacgctggttttttcagcgacttcatctccatcgtttataaaactaaagttgtcgctggttttctctgccagctgtattatgagcctattcttttaattataaagcatttaaacctctatttttctggtcgctgtcgctaattgagcgattgaggaaagaacaggccctaaaagattgatttacttccaaaactgtaaattaatatataatatatactccgaatagtatttcttaccaaatatatgaattgtattacttaccaaatatatgaattgtatttcttatacaattccggtcaaaattaccatatatatgaattgtatttaacaatgactaatgtcatatttctttaacaatgacaattttggtcaaacttcctttttttttcttttcctgtcaaacttccttcattttcaagggaaaaaaaatagatattttcataatttataatatatactcatgttcttgccaatatatattattcataatttaaataacatagactaaattcaatgcacttaatgttacctaaattaatcacctttcttctacagtaataaatagcgagcttataaattctacctaaacattctagcctaatttacataatcatggcttccattactaattctcatcttatattattgtttataatctcttctacttttattgtttttacgttagcattagatttttcagatgttccagcagaagcaccagatggctttttacctttagccaaaaagcatgttgtaattcgcaatactgtagagaatggagaagggttgaatatacattgcaaatccagtgaggatgatttgggacatatccatcttaaacatgggcatacttgggatttcaggtttcatgttaacatgtcaaaatctacaaaatttcgttgccatttttggtggtatgcaggcggtaatgattttttcaattactggtttgatatatttaaaatatctagagatgacaaaccatcaggaaaatatcctgtttgcaaagaatgcatttgggagttaaaccgatacggttttgaaggctatatttgtcgtataaatcgtgataaatcagatctttggtgtttctcgatggacgataaaccttaataaaaagaaaaaaaatattattgttcaacatattttatctaataaatattgttattaaaattgattgaataaaataatgttattgatactattcgagctctctttaatcaaaatgtttatatccaaaaatgccaaaaaaaaaaatcgtttatgttgttgaatcctttgcaacctaagtttctaactctatgtgccaactttttagaatgtggttgttccaaattccaaaagtctaatgaatctaagaaacgtgatgagctaatgaatcaaattccaaaagtctctccactaacaaattattgattttaaaaaagaaagctataaaaatgttaccatcaaaattgattgaataaaataatacattcatgatgttcaaatgtgtagtagtttccgttctttgaagcgtttatatatcacacaagtcctctttgaattaacttgaaatatattttttctgaataaatctctttgaagtttttatatatcacataagcaaattaaggttcctaactctaacagttgtttctgactggtgttccaatttcatggagatgcttccgagttcctacatcacacactccattaggagtctcaatccaagaaagatgatagccaacgtatcatccaaattctattaaaaaaaaggcgacaggcaagaacccccacgtttacatcttgtagagtggcagttcaatcctattttcaactccaatagaaatcaatacgcttatatatgtttacccagtgtttattttcttttgcaaccttcaaagttttgatgggttgtttctattttgcttgtgagtagttgagtactctcttgctctctcatatatgtctctgtagttctgtagttgttagtgataacgattcaccaatataaaatttataatgttaatcttacaaattaaaatgtgttaaccgtttttgcttaaaattgccgttgaaccataaattataaaaacaaacaagatttagttgataacgattaccaaataaacaacatattactactctttcaatttacgtgatttctaaaattcatggctattagcctattactactctttcaattttataaatgtgcccggtcactgtctcctttgtttctcattctctggaatctaaacaacatcttttctttgactgtgtatttgatgatattgtgcattggttaggtcacctacgtctaaagccaggctcaatacaatctgtaaattgatcttcatagcccaagagataaatataatttaccaataatgtaaaattaaattagttatttaattctaagaaaactcgtggaatatgttgaaaatagatatgagaagattttgtttaaatacaaatacattagttactagttcagaatcgtatgctatgtagacttgcttctccagatgtttttgactaccaaatgttacaacttcatatcacatcaggttcccatatctaacgctaatatctacactggtcacttcttcagatcaactttcattaacaacataaaaatcatataaacacaatttttgacaaaatgcaagcaagaacaatgaagcagagcatgagctaaattggattcagtctatgtatgaataagttactcaagtcatcaagattgcatgcaattcatttatgttgtgtcatgtcatagtcatagattaaacacaaacaaaataccagactatatattcaaagttgaggtatttatttaaatatatagtcaactggtgacttaacttatttcaaatactaaaagaaaaaatattcaaatatacttacatgttagattctagattagctaaataaccttgaaattttattatttagataaataacaacgcggaaatattctaattgaagagtatttatatgtttcaacgctttgactaaagtagtttttataatcatgatattttattagttacgacattgagagataaatgatagcacttacgtgcgtgccatttcattcgatgaataaactagtagtatgctcaaatgtttgaaactaataacgtgttattttcaaaaaaatcccatgcgtaatttattgttaccctcgcgaatatattcatttttcacccaaacatgttaaattaatgtacgtatttttagtttaaaaaaactcagataaatatttatttcttagcttttttttagtaaaatattattttaattttatgagtcactgaatcattgtattattgcaggatatttgaatatgaaatttatgacttgttctatgtatgtttagtcaaagttctataacaatgacaattttggtcaaagttccttcatttagatgtattcattcatatattaaaaatactatatccttattggttgtaaaagaatagatactttcataatttatactcctagtcatgttcttgctaatatatatgattcataatttaaataacatagactaaattcaatgtagtcaatgttacctaaactagtcacctttcttctccggtaataaatagcgagcttatatgttttacatagccactccaaccaatttacagaaccatggcttccattactaattctcattatatattgttgtttcttatcttttttacttttattgtatttactttagcattagatttatcaaatgttgcagcagaagcaccagacggcttgttacctctgtccaaaaagcacgttttaattcgcaacactgttcagaacggacaagttttgaatatacattgcaaatccagtgaggatgatttggggcatatccgtcttaaacatggggatacttggggtttcagatttcgtgttaacatggcactaactacgagatttcgttgtcacttttggtggtatgcacgcgaccatctaggccattatagttactggtttgatatatttactgtatacagagacgataatccatttggaaaatatccaatttgcgatgaatgcgtttggaatatgtacgaattaagtgaaaactttatttgtcgtataaatcgtgatcaatctggatggtgttttaaaatggacagagaaaattaagaagaaaacacattatcgttcgatgtatcttatcctaatacaatcattaaaattgattgaataaaataaaatcgttgatactattcaagctctctttatttgaagtgtttatatccacaaaagcaaattttgtcgtttattttgatgaatctattgcaaactaagtttctaactctaccaaccttttggaatgtcgttgcagtttatcggatctaatttacagctatcatatgacaaataatgtctatgaaacgtgatgagcgaacgaatctatccacattctcaaaaaacactaggaaacaaccacatctactgtctatctgcactaagaaaactatacttattataaaagaaaaagctatatcttatctaataaatgttaccatcatatctaatttacatatattaggtacaatcaaaacttctaattggtgttagcctcaagtcgctactaccagaacttctaattgatcagttcagttgaacaaccatcaaacgagaacttagacttatgtaagcacttaacgattttgacaacgcgaaaactggaaatataaattaattagtacgtaactagttcagaattgtatgctatgtagacttaattaatgccggatttgtatagaacattgtacttcgagtccaacattggaccatccttgaaatgtctcagctttgtaccctgatgagatctttcagaattccaccaacgcatctcactatctcattcgtgaattaggattttaaaactcctttaagcaaaacatagttcaaatacttagcttgattagcttgttgccaaatgtatatactaaaagaaaatacatatacacgttttgtaataaataaatgtttcattaattgttgagcggaagaatggtgaaatcttacttatctttataaaaaaaacgtagaaaaattgaatatctaaaagcatataaattgtgataaacatcgatccaaccctagcagattttatttcttaccattattttgtctaaatgtatatattttctataagacttaaaacatcttgtttttcacacacttataatcctaactaaccaaaaacttcaagaaatttcaattcatttaaccaataagtattacaaaaaaaacaattctataattagacgaagaggaaccaaattaataaacgaataataacataagtaaatcgaatttcagtaactagccatacatcttttcgataataacctgaatgattgataacaattcgacaacatttgtataatagaaagtgaaaggagacttttgtatcggtccattatttttccattcatcttcgcatttgaacatatagtgtgagccatccactgcagaaagctgagctatggactcgagcccttcttcttgtgcttcttcataagccttttggaagaaagcagacgctaaacagtagtgctttccgcaaaaatagagtcgtcgagtcccaatcggaccactaaacttttggcgaactttgttgatttgtttggttgccttggtcaattggatttggcattgagaaatctgataataaattccaataagaaatcaatactttttacgtatgaacaatacataataattaaaggaattacaaacttactgcaataacaagcacatcatggaggtcgcgtgcggctaagatacgtatgtccgttccaatgtatttcaagcagaagttgacgtcatctgtatccttgcaaaatgcgtacatgtccttgatagacatcgcatctgcgactgtaaacgcaaagaacacgaatactaacaacgacgaaggcaaagttaagtgtttgatgagcattgaggccatactgagaagataccaatgtgtttgttatttttctttttgtaagtcaaaacatttcatttataatgacattgaaatctaagaacgttacttcataaatcacggaaagttatggctttgaatggaaatatatcaatttagtaataactaagaagagtaaaaatcgcaatggcagtaaatgtctggaataatttactaccacaacttggaaacgcatttgaatttcataaaagacttggccgacaaacacatggtgatgttgccctaaaatttgcattcttctactctatttcatcagatatcttagcataacgggcttctttttgtcgaagcccaaatcgaataagaagcccatctggaatttgctctctcccactttgatcaatcgttaactctaagaagtaggattaactaaaaccctagatttagtgggaaatccactatagtgtgtgagcactattacctacgattttctgttctcatttgcgttttttttttctggtcaaccatttgggtttttctttcaaattgtcgggcaggaattacggattttaataaaacttaggaataaataaataattaaaaaaaaaacagaaacaatattataataaatttatcttttgagctgtgtcctcaatgaaaccttaataaagagaaccctctctgcaacatttaatactcataacaaaacctatctctctctgtctttactcattgtcgttatggtcgcgccgcctatagccgccgcgtcgttagagctccctcctccgttccccgccgtcttcgaacaaccaatggagaaactcaccttccctaacgagttcccttacgagtttgcctcctcaacgttttcaacttctccggaagactcaacggagacagaagatgaaacaaccgacgacgaagatgacttcttagccgggttaactcgcagactcgctctctcgactcagcgcctctcttctccttccttcgtcaccgacaagtctcaggtttgttaaagcttctctctttttccaatttttcaaatgttctctcaatgtagactaaacactcacagattcttgctctgtttcttcagatgaaacccaaagtcacagagtcaactcagagtggactcggaagtcctaatggtccgttttctcaagttccttcaccgccgacatctccgtctcgtgaagaagactctttgaaagtgttatctgctgcagctggagaagtcgccaagatcaaaaaggccaattttgatgctaaacccatcagctacccaaaccctaaccctaattacttaaccagctttcctcaaaacgtggcatattataactgctactggttatgggagccgcattatcctcaatctcagatgggaatagttccaaatgcttggcatatacctccttctcccgttagagccttttacacccttccaaccgccgttaaatcgccgtcgactggtaccggcgttttccttccccggaaatactcaaacccttctgattccccgaagaagaaatcaggtaactttactcaattttccgttgatttcacattttgagtttctgaaatttgagaactttcgttcaattttgctaatctagaatcttaattggaaaaaaaatttggatttttcaggagatggatgtgttaaggttgttaaccagcaaaaacctaaaattgaagtgttaccggttcgctgtaaaccaaattcgaaagctggtctctctacaggacgcagcaaaatcgattacggtactacttcaaaacatcctctgtttttaatttcagttctagacaaaacagacatttgattgagtctattcgtttgttttatagtagctggtggtggatgtctgaagcatgaaaagcctcttctacaagaatggatgtactgagtttgaattaggttgtaggattcaggacttttggaagaagaaaatacagaaatggtcgtagttagtgggttgaatttatagtgttgattgtgatggttactggttatagtaaagaataattttgcggggttaagttggattgggatttatttatatttacttaggagaatagcaaaatcagtttctaataagcataattttttggccttgagagagttttgcatttcaattttcaggcatttgtgttttttcttacatttaaaatcttaatatctgattgaaaataaagatgattatattcaaaaaaggagttgtgtattgagtctttgagaagagtttactttgcaaaatgtcatggaaaggattttgtttaagtgaaacattgtagtaattattcttgtgggactggaatgtggaagtggaaaaaagaaaaaatggaaaaggaaaatagaggttacgctttgacgtgaagcgaggccaaagataatacactgaaatataaaacagatctttagtttatggcttagtcttggattcttaatgtggcttagtcttagtggcatatgctctttgttacgatttcagacctttgttgtgtaagttagtcttgctttcttagagctttgtatttcactgaaggtattaatgaaaattcagatagaagaaaagagaaaacagatcttttcatgtaaatcaccttagcttttactatcatatagtacatgtatttgtgtatatatataacacatatatgacattccggggttaagatattgagtctatatggtctaccctcctagtagtctaccttggagataagcacgaaatttggtatgattaggagtgttacctaagtttgccggtaccgtttaggtcattgaactttggttgcaagtttcttgcttgctttttcttttttgggattttccctttggaaaaagaagtctaagataagaaaacagaagagaaattaagagatacacaaggtaagccacaaataagaagattttgtttggattgggaggtaaaatcctcatacctttcgtgtttgattgagtcaaactttaatccatatctatatatcaaaatgtcggcatcttaagagtctgatgctcttgaaacattgatgttcttagaaattttgtaccaaattacaactagtgtttaaatgtcttttctattggaataaatgcgaataaatggttcgtattaatcatatgataatacgatggacctataattgtggatataacatagtttggagcttcttctttctcaagtttatgattgcatttaaggatcttacccacaatacttttttttaactaaaacgtacctaagacgatgacggtgtgcgtaaagcaaaagtcacaatcaatctcgctatataatgcttacctatttttatcatttttacgtaatcaattattatattttcgtgtgtttttttgggtcccgttaacaatcgaaatatggcatctgcaattatgttactgtggaatatcaacttcccctaatgcaacaacaacatatatggttgaggaccgttatcaaacaaaaatttttggttgcggtgcgtaacaaacttaataacaaaacacaaaacttatggaaagtgacccacatacattaatggaagtcatgaaagagatgatggatcatattacaattatttgttgcagagagatcactcacaagtcacaaagacacaaaaatatgacttatttcagatctatgatccaaaaaaataagaaaaggtgttagaatgtcccacatcgaaaatggagtgtatctagcctagtataaaataaacataaacctctgcactattatctaacatttctatttctttagaactactgaaggagatatatagaatgttacaaaaaaagtgacccacccaaacatagagagtagagagtcttccatttttctaaatttcatctcaatattcgatcatattcaaacaattttgtgaacttgacgaaattggggagatgaaagaattgatcttgggccgaccagtatattaacattatctacccaataagcacaactcatgcaaagaggctagttcttgacgaaagaatctagatgagttaaggtgaaaacatggatccattttggaagacttaaaagaacccaatccacctcaagattttggtttacaaactaagctcatgagttttcttctctcacaaaacttatcactgcacatcttttttatgcttggggtaatttccagggaaagaagcaaaacaacacaacacaacacacaattatccatgtgttagattagtggcagataacatcttctttttaattcaataatatgcattatacatttttcatcatgaattcatgacaacgactcggctacccacactttggctttcaatactactttgtatagttccattgtaactcttaattccgtttttttaaattatattgttacatattttgtgtatatacataccacgttgtcttttccatgtgatgattttagaaaaacgtgacattttccggtcttgcctaactatatattggtgaaaatatgtttcttatagtaaaggacagtcacttgcaataatctaatcagaaaggacaagaaatttcattttcacttgcgttagtctaatcagaaaggatcgtcatcatgaaactttatttaacatttgtttagtatattagtatgcaagtgtgagtttaaaactgtgagacaagagaaagaaaatttgttgcatgcaggtaaacaatcttggacaggaagttctcacaagtcaaagtcagcgagcaaacgattttattctcttttcacatgttgctatgacagctgtcaatttgtaattggatcatgagtgtcataattcataaatataagctatgctcatgtaaccgtaaacccttaacgacaaattaattaaacttctccaaaactcttttcctctaaaaaatctcccaaatacagaaaaaaaaacaaagtcagtaagaaaaatggaagagagaaaagggaggagaataatcatgttccctcttccatttccagggcacttcaaccccatgatcgagctcgctggaatattccaccaccgtggcttctccgtgacgatcctccacacttcctacaacttccccgatccttctcgccacccacacttcacttttcgaaccatctctcacaacaaagaaggagaagaagatcctctgtctcagtcagaaacttcgagtatggacctaatcgttctcgttcgtcggctgaaacaacgctacgccgaaccgtttcgtaagtctgtggcggcggaagtaggtggaggagagacggtgtgttgtttggtctccgacgctatatgggggaagaacacggaggttgtagcggaagagattggagttcgtagggtggtgttgaggacaggtggtgcgtcgtcgttttgtgcttttgccgctttccctctccttagggataagggttacctccctatacaaggtaaataagtacatttctctttctttattttttggttttaatgttaagatttttcctttaaaacgagttacttcaagtttgtaattaaaatttacatttatctttgaatacttttcacaatttataaacataatacgtacgtcatagtacgttggcaacattaatacgaatgatttaaactataggctaaccttgatagttggcttgaaattgattgtaagcaattatattcaaaaatgactagatatatgtttttagaagaaaaaataaaataactataaaacctgattaagtcgtaattgtacattgatcacgtatatttaaatttaagaaaatagtttaaactttgttttatagtttataaaaataatatgatccatataattgtaatattttcctagtataatatttaatttgcgggtgaattttgatataaatgaactaaaacaattgttgccatttgctaaaagataattataaagtcaacttgtttttttcccaattgtacttattaactaattattgatgacgtgaattcatattattgtattaaaattttgaaaattcgtaagttttattgcacacaggattagttttgctatcggttataggattcctggtaaaaaaatgtcttattattttctaagcaatattaaagatgaggtaatgagtaaaaattattatttttctccagattctagattagatgagccagtgacagagcttccacctttgaaagtgaaggatcttccggtaatggaaacgaatgagccggaggaactttaccgggtagttaacgacatggtggaaggagccaagtcttcttcaggagtcatatggaacacatttgaagatcttgaaagactatcacttatgaattgtagcagcaaattacaagttccatttttcccgatcggaccgtttcacaaatatagcgaagatcctacaccgaagacagagaacaaggaagataccgattggctcgacaagcaagacccacagtcggtggtctatgcgagtttcggaagccttgcagctatagaagagaaggagtttctcgagattgcttggggtctaagaaacagtgaacgaccgtttttgtgggtggttaggccggggtctgtcagggggaccgagtggctcgagtcattgcctttagggtttatggaaaacattggagataagggaaaaatcgtgaaatgggcgaatcagttagaggtattggcgcatcctgccattggagcgttttggacacattgtggatggaactcgacactagagagcatatgtgaaggtgttcctatgatatgtacgtcatgtttcacggaccagcatgtgaacgcgagatacatcgttgatgtatggcgagtcgggatgttgttagagagaagtaagatggaaaagaaggagattgaaaaggtgctaagaagtgtaatgatggagaagggagatggattgagggaaaggagtttgaagttgaaagagagagctgatttttgcttaagtaaagatgggtcttcttccaagtatttagacaaacttgtgagtcatgtcctgtcttttgattcttatgcttttgcaagttaagaaaacttatgaatgagtaacgtattctaagcactctccaaaagttccaaaaccattggatgttttgtttcttcaaataataatgttcttgagttaattgttttttttcagattaaagtcaaaatttattgaattttattttacgaatttaccgtttcatattatttctaatatttacttaggatccaataaattttgaccataataggttgataatattatgttgaatctgaatataccaaataacatttatttatttttccctaatgttttaaagtaatgtgtggaacaaacgtgtgtaccaagcggcgacgaaagttgaatgtgtgatgggtacaacttaaatggcccatgatcctatcataggattcctatgtaaagtcgacagctttcctagctgcatgtgagaagaaaaataagattttagctaggatttgtgacgatgctcgcggacagacagtgacttgagagagcctttgtttggccgaaagtgttcaacaacaaatccaatatatccttgaagtctagatcccacataattagaaaagaaaaagataagaagaagaaaatggaagagagaaaagtgaagagaattatcatgttccctctaccgtttacaggacacttcaaccctatgatcgagcttgctggaatattccacaaccgtggcttctccgtcacgatactccacacttctttcaacttcccggatccttctcgccatccacagtttacttttcgaactatcactcacaaaaacgaaggagaagaagaccctctctctcaatcagaaacttcttcgggtaaggacctcgtcgtccttattagtctgctgaaacaatactacaccgagccgtctcttgcagaggaagtaggcgaaggagggacggtgtgttgtttggtctccgacgctctatgggggaggaacacggagattgtagcgaaagagattggagtgtgtacaatggtgatgaggactagtggtgcggcaacgttttgtgcttatacagctttccctctccttatagataagggttaccttcctatacaaggtaatattgttttatgttaagatttgtttccttgcagcaaagttcgagtaaacatacacttatctttcaattttttgtttttctaagaaatacatatatttatagtttggtttcttttctttttcaactatatacagttatcggatttaaagccaaattagtatagtggcgacaataaacaaaagttggttagaaatttattgtaaacaatacaaaatagtagataataatattaaaaaatattaaatatgaacggttactttttttcctttccgataatgtatacatggaccatattaattttgcgatatacttaacggtaaatcatcaagtcaatttaagttggacttatttttattacaccacttgtcacttctctataaaacagttttttatataaaataattgcaattgggtagttataatacatgttattggattatataatccaaaattttcgcctcgaaggattagtttccgttttggtttaggattcctggttgaaaaaaaagtttcttaacatttttttagcaatattaaagatttgccacccactatttttaacttcaggttctagattagatgagctagtgacagagcttccacctttgaaagtgaaggatcttcctgtaataaaaacgaaagagcctgagggactaaaccgaatacttaacgacatggtggaaggagccaagttatcttccggagtcgtatggaacacatttgaagatcttgaaagacattcactcatggattgtcgcagcaagttacaagttccgttgttcccaatcggaccgtttcacaaacatagaaccgatcttccaccgaagccaaagaacaaggacaaggacgatgatgaaatattaaccgattggcttaacaagcaagctccgcagtctgtggtctatgtgagttttggaagccttgcagctatagaagagaatgagtttttcgaaattgcttggggtctaagaaacagcgaactaccattcttgtgggtggttaggcccgggatggtccggggaaccgagtggcttgagtcattgccttgtgggtttttggaaaatattggtcatcagggaaaaattgtgaaatgggtgaatcaactagagacattggcccatcctgcggttggagcgttttggacgcactgtggatggaactcaacaatagagagcatatgtgaaggtgttccaatgatatgtacgccgtgtttctcggaccagcatgtgaacgcgaggtacatcgttgatgtatggcgagtcgggatgatgttagagagatgtaagatggaaaggacggagattgagaaggtagtaacaagtgtaatgatggagaatggagctggattgacagagatgtgtttggagttgaaagagaaagctaatgtttgcttaagtgaagatgggtcttcttccaagtatctagacaaacttgtcagtcatgtcctgtcttttgattcctcggcttttgcaagttaaaataaattacaaggagcaaaatgtctaggcacttttcaaaatcataatgttggttgtttggtttatatgattttcgatgagatatttattattcatcactttatgattttgattaaattcaagatttattaaattttccttatattgtatgcatatgttgaatgttgatattacatattttcataatagttaaattcaaattttatttaattctatgtctacatttttttatcaacagttttatgtctacatttaactatcagttgtgggtatctaactcgatcaaggaatcattattggttggttaatgaatccaatgagctttccaccctaatagatcgataatcttacttttatgatgaatctaaaaaaaaaacaaataacatatttttgttcttactttttaaatataattggtgggtcaaatgtatgtgtaatcagtcaatctgttatgcaactatgctcatactatcaggcgacgactagttccgtattgggatttttaaaaccactgctgaaacaccaaataatacaacaaatcttatatatcctcacaatctctaataacaaaaacaaaagttcactctaaaacatttcagtgaggttttaccgggactgatcggatatgccgatagagtttataaaactttttaaaaaaaacaaaaaatggatgaaagaaagtgaggaaaataatcatgttcccttttactatttccgggacacttcaactcaatgatccaactagccagaatattccaccaccttggtcgtcacggttctccacacttctttcaactccccatatccttctcactaccaactcttcacttttcgaaccatccgtcacaacaacgaaggaggagaagatcctctgagtcaaccagaggcttctagtatggatcttgttgcctttatgtttttaaacgcgtactcttcaaacctttgaatgtttatcatttttagtaaagagtagtgttggttgatacttgttacgattctacatccattatagtgacttgtgagttatgcaagaggatatggataatggaccattatacctagggttgatgggaaacatagccaagataaaacctaaaaccaaagtcaatgtatgtgaatgttataatcaattttaacccgttttatttattatttctaactgaatctgatctatatcaaataaaactgaagttaggactaagaaaaggtattttgacgataggaccaaccctctctaaccaaaaactgtaagtatgaaactgaaagagatctctaagaaatacgaagataggtagtaatttctcatattttggactttttgtgaatcgagtttcagcataaccttattatcattgtacatatatatatatacaatgagtaatctcatgatcataataaaaaaaaaagagtaatctcatgataactgataagtgaaagttttcatttacctatatgtgtattagtgttatcatcgtatatccctaatgaaattcaattgtttgtatgttattatcgtatgaataaactaatttaaaactgaactgaagttttaaataaattgaatggttgtgagaaaaaaaaactgaacataactggattcctacaaaaggaggtgatttgtcaaaagaaaatgctacgagataactagtaagcagaaagttggagttttctattccatattggaactggaagcttaagataatatatgtcgatgtaggtttgtagttttcagtactaattttaaattgttattgttgtcttatgtagctaattgaacaaaaatatcggatattcagatttatatgaaggcggattcggcgccggacaaacacgtgagagaaagacaaaaaccacgtgcggaagaaagtaaccttgttatgggcgataatggtctatgggaacacatcagttcctgcccagctgcgctcgtgtcagctccattaaccatccgcaatcagcgaaacaatggtcggaacttttgatttcgattttgttttttttagtcttccaatcagtttcttttctcttatctgaacttcagagtttaaacgttcatctttaaatagtgattcacttgatctcgaatgtcactgtgcttatatactatcatggtaatggtagtaacaaattggcctaacttcaaaaaatatatataaaaaaatagcctaacttctatttggtggttgaacatgttaatcatacattttaatcgaaaagttgtaatcatatgtttctaatgataacatatgaaaattgtaacgtttgtttaacatataatataatgaagtcacatatggttttagacaatgaactatcagaccttacctgtatagaatctttataatatcaggtttagatttagtttcggattttccatattatttgttttagttgttcttatatcatgaactgatttgattctactcaagagtaatgcagacaaattgcacatcggcaaaaagattcctaacagcgtgcatgtcatgattattcaacaatcattaatcataccaatattaataatgcgaaaaacataatatatagacgatacattgctcttgtggaaaaatcacaaatattgttaagatcgtatattatagttgaactcacttgatgaatgatgaagacgacttatggacacacatgcatttatgtatagaaaaaaaagatttgatttcttaatgtaaccgtaacggcaagcaaatcaaaattgaagggaaatatagtaatagtcggtctgagtatacgccgtcagccacgttcggccgacaattcatttcccaaacaaagtgtcgtctcttcattatccatttctcgtcgtttttctacaaattaattttcttttggttttccttctcttagagaatacagtttgcaagttatacttcttttcacgttatcgttatatcattaggcgttacttaaagcaagatagtatttttttcttacttacttttttctcgttattttaaaatgtagatatatttgtatttagtcttgaaaatcgtaattttgattttttttagtacaatatgtgcttatgtcaattaattaatttaaatttaaaccgatattcattgacccttatgcagcattgaatgagaaaaagtgaaaaacattgtacttagaagtcaaaaggagacgcatgatcgatcttgtgaaatcaatccttatacagaaagaaaggattaatgaaagtaaagtttactatttcgtttctttttaacaaataaatatattatgagccagtttaagctaagcaactcaaaaatgaataaagatttcacaatgacttttttttttttttggacaaaactttttgtgattgataaataaataaaatcattgttttcgtcgagatatccaaaatcaagtaacgttggtcctaataattattattactgcgatctaaacatataactgcatcaattaattgagggaaaacaaaaagacatgtaatccattgataatcaattaaagaccaaaaaaacgttttaagtaataaggcctattcttttaacctttcaatctgcgttcaaagcggcgccgtatattgaacacgattaataattcattgaactgcaccaaaggacaaagttctcttttaccatttaaaagcctaatagtatgagttttttaattcaagaatatattattaagcaggaaagacaaacctcaaatttatttgttcatgcacgacaaaaagaaaatgtatgtctttacttttagtggaatttttacattatttctacacccaaaaatatattttttaatacatatattcaattgttattacttattagatagcaaagggagacatgaagcgtgcgaacacgacaatacacaaatagtatcaaatcggctttggtcggttggtcatctctctgtatttctctaatacatgttcatatatataaatcaccaacccatgagcttatgttattcaatctctcgtaatatatatattgaataccctttcatcttctaaatttattgtaaccaacgaaagaaaaagtttcgattacctatctttttccggcaataacatttctcttctaagattttgctaaaagagttaaaaatgagaacactttgtcctaatttcgatagagaagacggtttagagacggtattggaagttccgatgccggaggagttgttctgttcggacaacaacaagagcggcgcttggcgtagcgtcaaatctagtttgctccggtcaccgccggataacagtagcagccttgccacactattcggcggtcgtgactctcagattcagatgcttcttggaatcgttggagctccgtcgatacctctccctatttcttccgatcaggccaagattgatcatcccatctccaatctcattaaaaaccaatctattgtaagttattatactaatcttgcgtttgatttagggtttcatatgctagcgtctaaacaattgtatcacagatttacttgagcaacaagtttctgattttgcttttgatctgtttttgggtatcaataggaatcagccatggcgaagtacatagtaaagcaatacactgcagccgctggaggagagatggctttggatgccgtggagagcatgtacgcgatgggaaaggtgaagatgggagtgactgagttttgtgcagcgaaaaccctaaatgggaagaggaagaagaagatggtgaggataagaaacgtcaataacaacaacggaaacggaggagagatgggaggttttgtgttatggaagaaaggttcgagtcaatggagtttagagcttgtggtttcgggttgtaaagttagtgctggttgtgatggtaacgtggattggagacaaagcccttggctcgcacattctcatgcttctaatgaaccttctggacctcttagaaggttccttcaagggcttgatcctaaaaccacagcaaatttatttgcgggatccgtttgcgtgggtgaaaaggcggttaacaacgaagaatgctttgtgcttaagctcgaaacgcagccttcgggacttaaatctagaagcaagagcggtatggagacagtgaagcataccgtgtggggatgttttggtcaaagaacaggacttttggttcaattagaggatacttatctagtacggatcaagaccggtctggaagatgaagatatggtcttgtgggaaacgacgtctgagacattgatccaagattataagagcattgatgggattcagatcgctcacagaggaaaaacacgtgtctcattgttgaggcttgatgagagcttagagagccattcaaagactacaatggaagagagttgggagattgaagaagtgggttttaatgtgaagggtttgtcttcagatttcttcttgcctcctggtgacttgtgtattaaggaagaagaagaaaccgggtttagtttcggagattatactagtcctatgctgcttccattgaaggttagtaccacttcatggaaaatcaagtcctcaaaagtcacagctattgaagattttggtgaatttgagggataaaaaagtgaagacgtttcaagatatttttattgtaaattgatcttcattttgtatatatatggaaaattatggagaaaagtgcttgtaaataacattataaagaatagaaaagcaagcctttttccttcttctctctcatttatgtactcttacatttttcctcttatctagcttcgtcttgtacttgtcacttatagtgtgctctgtttaaaaacagagtaaccaaaaaaaaaacagcaaaagaaacagagtaataacaacctctttaaaccacaaaccaaagccttttagcccatgttaagacactccatgggcctaagcccaactgcttacatttttaaccgaaccgaatttaaccagatagctattagcctattagagttcttcttaatccaagaaccaaaacttcacagtagaagaaccaaaaaaatttgttacatgaaaatatatacaagaagccgctaattcggagagtctcttcccgataacttaatataaatggtgtttgaaggaaaaaaaaaagaagccgctaatttcatttgaagtttgaaacaacaaccaatgacgatatttatgatctaggattttatataataagagacacgatacatactctgttttctatctttcttccaccaaatccgaatcaaaatgtcagaaacaacaacatccataagtaccagtctggtacttattcatcatctatatgcgtcaaagcgcaaagaatcaaaagaaaaaaaaggggttgatgaatctcaagccctacttttgagtttcagcttcttgcacagaagaaatcttgtctaggcatcattccagtaaacttgattcgaggatcattataattgtaattatccatcttcaaactctgttctgcttctctgacaacagcattgtcaaggccactctttatccatgcaatgttgttcaaatcggttgctatagatattagttcttggttgaaaaccgcagaaggctcttcataatccacaaactcaggtcccaacaccgagttacgtgagaacttagtttcagctggaagagtagagcagccgtgaccacattttgacgggatttgaggttcatcacaaagagattgtagaaatttaccagccaatgaatcgggtttagctgcttgaatcaacggtccctcacatggaactatattgtagtctctgtaaccatttttctggctggttgggttatagatactgaatgcaccaacgcgagccacggggcgaaacacgttattttctgttggaacgttactcactaccggtggagcttgttcttgttgttcttgaggttcttgaggttcattagctgcctcttccattacaacatcactcacttgtggaggctttggcggggaggaattgatatctccttgaggcaactgttgttttgaggatggaggattagttgtttcatcgacattttcgtttttgacggaagcggtagtaactgaattagccatccattgaccattattccatagatctgcgtatttacgtctaagagttgagttccaatggttcttgatagcgttatctgttcttccagttaacagtttcgcaatcactgcccatttgtttccgtgaaccgcgtgagcagaaattatcatacgatcttcctcatctgcaagcagatcaaacaagaccaaatgaaaaaaaaaaaaatcaatctttcaagccaaatccaaaagaatccaaaaagtggataacaacaataaactaagtttcgaaatctcttctccaacatttctataggcttcaattaacaataaaatcggtgcagtgacataacacactgtgaaccctcaatctaggtttcattatccttttttctcagtgaattacaaacaatcttttcttcttcttactctatggccaaagtaatcaagaaaataaagaaggacaaagattgagataaagtaaagcaaacattttcacaaaactgcataagaaaaacatgaccaaagtcacaataaaacagtcaaacattgttctcattcacttcacaatcttctaaccacagtagaatcagaattacacaaaacaaaggaaaacccagtaatttgacacacaagtcaaaaaattcatttgaagacgagaacaaacaaaacaaaccactcaagaatttgtaatgaagatcgagaaaatcactctgaacatttgcaagaagaacagtaaaatcaaatcaaacgaaacctcaaaaacccaaaacccaaaagcaaagaatctgaatttagatgtaacaaaatcaagagggttttaaagtttgtttaccagagaaaggtttacgcttgagacaagggtcaagctgattacaccaacgcaatcgacaagatttaccagaacgaccagggattccacgagcgatcaaactccaattcctcggtcctagtttcctcacaagcttcgtaagaaccgcgtcttcctccgtagaccaaggtcctttgactttactcctaatccctcctcctccgccgccgcaaccaccaccgccgcttgaatctccagcagctaactcagcaagctccgcctcaatcgcagcactgatcccttcatcggaatctccagatgctaaaggtaacggctccgattgatgagtttctccttccatttacacaaaaaaagtttcgatttttttttctttttggccaaaattaattaaaagaaaaaaaatgaaatttggtttgtaccagctttcctaactgcaaaagcttagtgggaggtttaataagaggaaggcttcacgttcttttcgggttcggttttttgttaatttaccattttacccctcttctgggttcgttttttcttcagctcctgttaaattactattatacccttatccttcattgaattttcccccaaattttattcataacgcctagtctgttatgactcataatagctcaccttttttccactttccactatattttggttatgactcatatttttgttataatttaaaattaggagaaaaaaccattcatttccacgaaattacgtacttgataagtttggtagatctggggtttttgttagtttgaacataaaatgataaagttagagaggatttgtatgtattagcgtgtagttataaagattatctgacatcgaaaatagtaagtgttgaatcaagttgaaagtgattgataaaaattcaatactgtatatattttatattaacatatcagtcaccagattagatgatcatgctttagaaaatgtctataatctgagagaagactacttaaaaagacaaaagtattttaaggcccaccattaagttagcttaatcgaaccaaggcccaacgaggcttttggactttactgatgtgaaaatttttaaataataaaattgattaaggcccgccattatgcttaatcgaaataaagcctaacgaggccttttgggctttacagatgcgatattaaattaaatttgtcaggtttggtagcagtattaaattataggaagttttgagttttgactcccaaaaaattacaaagtgatagaaagctcgtatagaataactaacttatcaaagagacaaagatgattatttggactttaactgttaagaaattattgtcaattgatcatcacgcaatctttctgtttccatcagtctctcatgactctagtttctattgacttgtttttctttagtttctcaattttggccaaattatttattttccaacattggtttatgcaattgtcttgaattgcatgtatatgtatacatctttataatttcaaacaatttgatacatactatcgaagaagataaaaatgtagtgtgttcttggtccttttttcaagttcaagatacttgatccatcaaaaccatcattagtagtcaaactcttacttgcgctctacctcgttgtattcatcaaaactctctagctatgtaagcttcaccatcaaattttaaatactacttaatcataatcagccttccaaaccactcacacttaatacccttgatataagtcatgacgtacctcgtggtatatcacgaggaaaatgaacacgacgtgtgatggagacgtctggtagacgcagtctcagtgacgacaaaattgacaacgacggtgaggcaatttatgctttctgtttccgggacctttctcactaatacttcttaaaaataaaacgattaaataatatagtttggatataatcttttgcttaacatttttttttttttattattatccatacttttgtaattttagtttgggaaaaaagccgaaaaaaccctcatttatttttaatttggccgtttaatacctgtatttttaaaattggaagaaaaatacataaattaattttgattgtctactaaaaccctggtcttttaaatattggatatttcctgctcccgagttaacgactgttagttttggtaacggaacttctaactgcggttaaaacataactctcggtatttccacatatatattcaatctctaataactatctgacgaattaattttcttagtctgttggtaagaagtggggtgaaatttcacccatatccgggttcgaacccaacagtatattttttgacgtttttttctttcttttttttgtcttaatttaattgaagaaggaagaatggaggtggtggtggtggagaggacgacggagatggcagagcaatgggtattctcaaccaccagatctgaaaactttttctatgcataacctcgacgagaaacttatgtgtagattttgagatttgatttgatatttctagggcttttactttcttctctgtagatacatgtttaggatttgtatccaaattggaatttattaaaattcaaattggatttgttttccaatccgaatttgttgcttatgttgtgttgtagatctagataatttcttattttcatatcggaaaaaatgttgagagatgaaagatagattttgaaactatgattcttctgtttattgattaaaaagtttgtcaactacaacataaagtgaaaaagggagattaaacaattgtgaacaaaacaacatcaaaagcttaaagaaaattacagcgaagtgagaaaagagagtttggtgaagaagaagaagtcaagttaaaaagaagaaaaaacgagaaaaaaaaaacgtcttttgctggtggtaggacttgaactcgggtataaaaaataaacctacatctaaccacctgactgagacaacataattagtagattattaaaagagattgtatatatatgtggaaataccatgagttatgttttaaccacagttagtggttccgttaccaacactaatagtcgttaactcgggagcaagaaatatccaacatttaaaagaccagagttttactagacaatcaaaattaacttatgtatttttcttccaattttaaaagtacaagtattaaacggccaaattaaaaataaataagggtttttccggcttttttcccattttagtttgggattgttcattattgtgaacgaaagttacgtaatatatacaagtcatttgttgaaattagacctaagagaaaacgacactagcatgagtcatacatactcttgccctgaaattaggactatggaattgggaaagacaacgacattgtcttctatttattggacactaagttaatgttgccacgtgccattaataccttcttatcaactcttgacacttgcgtttaggttcgaatcattttgaaaaaagaagagtaaatgcttattctaaatatataaggcgaaattccacaaccaaaatagactgattatgtaaactaagcctctacgtgaagtaatatatactatgttgaatcaatcttgaaccctgacatgttgatattgtagcaaaattgtggactcgtccacatggattctcgtgtaaattataatattataacttgatttattcatatagtaattaaactatttaagttgatatctttgtttgaaagtaaataacgtaatggtccccgtcgaattcatatatactagcttttgaatgatacatttaatatagtcataccgtttcggacaaagtttttccctcactccttttctaactaacacacatttaggtacatatatagctgcatgtaaatccatatttatacatataatatacaagatataaacagttatatacggtggtcagtatttctcagcttctattttcctgtctaatgactgttattcaattagttgacttgaatataaacctctcttttttattcgatgtctaaaaagttgtcttgccaaattaataaagagataaacctgattgaagaggaaaatgtgcagtgacgcaatgccttgtaattgaacacgacttgagaattggaagcgggaagcatagatgcaaagcaagtaggtccataagagttggtgccttcttattcaacttgtccttatttcttttccccactcaaaactcttcgacatggatgtgctcatagcaaaagtataaacatatatccagtttcttagtatacatttgaaatatgtaattaaaaaatccaagttaattaatgtacagcaaaatcaaactattttaaatatcatataattaactgaacaaataacttagcttgagtcaatatttcatcaaaaattctgttataaagaataataattataattggttatgtttagcagaagttaataaaatctgaagtttaaaagaacttgttagcgtgtaccaacaattcaagtgttaaaccaatatacttacggatcggatgtatataagatttttttttgttaatggtgtatgcatatatattaaaggttatataaatattgagttgtgatggttgtgagtacgaaataagggaatggagagaacgacaaagaggtgtgcggaactggggttggtgtccaacaaagaagagacatctaatattatgttctctacgttgggatcttttctaagtgacccacttttgttttgctgtcttatatgtatatctcactttcattatttcatctatctacgactacaaaccatgcatccccattttgccctaccatatgctctacatccatacgtgcgtctccaaatacatacactttatcatattcatatatacatattattcatattgcattttcaatatgtatgtgtatatatatgtgttataatttataacatatatatgtgagaaaaatgatagcaacacaaaggattcaacacatatttacgtggtttactgataaatatattggctaagtacacggacaaatgaatcgatttcattactagctagagacaaaaggatgagcaaaatcatgtgagcctagacccaaagagaaagaaaacctaagccaaaattgtggtccataaacagaataactttagcagactctcgagctaagctatatgtcatcgaattcagtgtgtgttcagtataacaacaacggaatgcaagaaacaccatgttctaaatatgactaaattttgataaatgagtagcatgtaagaaatacatttgtttaaatgaaaacaaattatagtatttcccaattatacatttttcgaaatttatttgtatcatatgatcagtttacttcattttaatttatcgtacttatgcaattatcaccgaaatacgattaatgatgtattaatatgcttaagcaaaagaatgtcaaaattataacaatttatggatttctcatgattgttttcaggttcacgctatgaccagatgctttacaagtttatttccctaacccgtatgggttggcatgatgataaattgataattagggctagttaatggtgatgatgacacaaaggaattactaccttttattatcagtaaacaatttttaggccctttaatctatgcctagaaggtccatttagaatgaaaaacaatttgactgattaaaaaaagaatatcgtttacctgccaaagtaaaaaagtacttagtagtcacaaaagcacaaacacaaatcatgtgattgagaagactgccacaatcttagttacaattttcaaatcctcattctattccaactttcacggctcttcaaaataaatatttctgaataataaaacttttcattcttactatatagaaacagttatacgtagatatatatgatgtaactcgagtcatgttcgaacagatggaaaagccaaagattatccttgtctggtatgaaattgaatacctcccttatgtagaatagactctccatgtgcactgatttattatagattctttgttttcccacctatatataaataaattatttgattttaaacaagaaaatatttgaaaatttaatcttatagagggaaacacagtaggccacatgctcatgctctttttctctcctttttcttctcctggccaagccaagcagtgatgacatgtttaaagattgctcacgttttggaaatttttgaaatatatacataaatatttaggaaatcattatctctgatagttacagtaaaccactcggtggattgattcatttggaaacacataacatcatggatttattacatacgccaataataatacagagttctagacttttggttactgattcgcctaattgttatttttagaaaataaaggatacaatgtgttgctttgcatgtgatgttttttgaaggaaaaaaatggaaaacatgtgatgtctatatatgagcctaatttaattattgagatgcataatgagcatctttgatagtattacgaaaacaatgatacgaactatgtatatatacaatgtggatatgtaagacgatggagaagcattggatccattaatataataattctttattagggtgtcaatcatatgaccatatctttgacttgaatctgatcctatgattgcatatgtggctatgtagtattagaagaaaatgatttatccttggaactattactcgcatttttcttagaaacaaagaaaatataatgaaacatttgttgcataattaatttcaaaaacctaaacaaatatttgaagtgtctataggaaatgtttggtgccaaaagcgaaggggaacatgggatggaccacaaaaaaaaataaactttcgaataaaataagttaagaacaaataaaaaaaaaaaaaaaacgacaaaaagataattaatagtgccacccaacttgtggggaatatctaagatgggatagtttgtctgggttgtttgagaaatgtcattaaaaaaaaattcaagtgatttgattttctttaaaaggtttttaagaagaaaagagagagagagagagagagagaaatagtgtagctaatattaggaccatattgaaaattgaaaacttatattaaaccacaaatgggttaataattagttgattaccatcatagtgttttaaagcaaataaaaaattgaactagctctgattttgaaaacaattgatattaattagagaaaattgctatccaataacgtataataatcacgtggacagaaaataaagccaatgcataatgttttgatctcgtggtcagtgtgcacaagacatagtttagttctaccacagtttactttctcttaaagaagtatcattgtaatggtgacaaaacaaaacatttttttttatgtgttaagctatattttcataattcaaattttgttagatgtatgtgcacgagttgttgaaacttatgtgacccacgtaattaatttcaccgccaatgaaagcacttgatatatgtatcaaatggtatcaacgacaaaactttaacgtcttgtgatttgaaatgacagaaaatccatcctacattttggtttgtgtagttgaaacaatgggataatggctgataatatatctttagttttagttttacacagtcatatgttcataaatctatacatgtataagcttcatatgttcataatactatacatgtataagcttcaagtttggtggttatagtagttgccgaaatgatcatataacggtgcaagataatagtaataacggtataaaatataaatcatgtgattaagaccacaagatttcgtctaaagtatagacgtcttttttactccaagtcaaatataaagtaaaattctcaatgtggacataataaactaaaaataaaaagtttaaagatgagaaggtggaaattaaaaaaaaaaaaaaaaaagaagagaaaaagtgtgttttatatttttatttaacaagaagaggatcatggtcatcttttatatcaaaggccttcgagaaaattaaaacaccattgctcccaccttgaaagagagagagttcttcacagcaactagagaaaggatccaaagggatcgcattgatcctaattaagctgatttattccccaataattgttttttttttccttctcaatcgaaagatggaagaaaaacaaattccaaacattttgcttacttttccggatcatgcgatctctttggattcattctttggtagcttccactccggtcaaagggtttcatgaccggagacatcaacggcgggaggctcttcaatgagtagatccagtcatatcaacaagcaaaaagtaagaaaatttgttatatacatgtaagtttcaaagatttaaggatacatttcaagtagacaagaacatggtcttgttccctttttttaaccctcacatcttattatttgcaccttttttggcattgatttgcttctttgctatggttttacattgatttgcttatagaaattatatttaaaattaagcttttttactatcctgtaagcatgaaaacaaaatatacaccttggacataatatgtcatcgtaatcattttttttgtctataaagaaattatgaaaagtatatgtatcaactttataattcaaaattacgtttcatcaaagttactccaaaatcacgatctatgaagtgcttggatcccgtaaatgagatcaggttcatttcgtcttgaaattgattaagaggaatattagcgttaactataaccatggaaaatgggtgaaactgaatgagttcgaataaaaccaaaactttttgctgatcagagatttgttttctaaaagaaaacgattcgaatatttcctatataagttagtaaatgatgactgtctaatttgagtatacatacggtgtgtaaattgttagcgtaatttctaaggctacgctacacttgctgtattctagatagaaatatgtgaccattgatatattaaatctcttctagagttattcgatgctttgtgaaagtgtaaagagacttccaatacaaagattggcatccttttattggaaaattgctaacttttaactgtaaagtaattaaatagataatgatattcactggtcaagctttcttctctccattgatccctattaaaaggatttcagccacttaatttttttctaccgtgggtcaacctttaattagatctaagatcaatgtcaaatgtatgcaaaagatgtttaatgctttattgttgaatgtctttgttataacacaaaaaaaatctctttcacatttttctttgctctcgtttattcgcatagcattggattatcctctgctttgtgaagaaaagttggacaatagaaatcaagtgatcaatgaaataaacttatgttcaacaactatgccttctttaggtatttgaacctacattgttttcactaataacttaaggtatcttcttttcccaccaactcccatgaactggttattacaatgtacaatgaatacaatttaccactctcatgacctgattattatatcttacccacaccaatcagtgagactatatacattccttacaataaaaaaaactatgcaaggcgccacacttcattctctttttggtgagtgtttaattaggcatagatatatgcaataccaatcgcttgaatctttaacttagtgaatgtttctctgaagtaacatcttcacactatatatatgcgctacttctgatggaatgtgcaggtctggtatttgacttatatatctacatctattatttattctctccggtttttcatggtgtctttctataagatcttataataaacctctcttttttttgttgtcaaattctaaaagcatagccatctcttcatttattttgttttctctggatgagaaagatcaaaaatagtttgggcaaatatcatatgtttttaaatatgcatgtatctgaaaaataaaaatgtctgtagaataaaaataagaatgtaagtaaaatactaaaatcaatcttctaaatagaaacagaaatcttataacaatctttaaatatatgtttaattataattaagaatttcatattcacaacctgccaagtatatcagagtggcgcagcggaagcgtggtgggcccataacccacaggtcccaagatcgaaacttggctctgatattaaaatgcataaatttttttagttagttttacatttagataaaaacacataattctttatagtaaagaactaaagattaatgttttgtactttatgtactattccatatcaacatatatttgtattagtcttgggaaagcaaaaaaatttgaaagacttttttttccaagtatgaaagatttagttaaaaattttaatcagtaacagaattcaagagtaatgtttattacataattatatactttagaaacctgctccagttttgaataaaataaaataagaaaatatttgttcgaaactccaaatccagctgaattagttttgcatgtttttgcacgaaaaaaaagaaagaatatatagtttacgtatgaccatattttatgttttaattttaagaatttccatccatataatgtaaacccgtatattttgggatctactatcatgtaggctgtagtctctagctatagccaagaaaaaaaaatgacagatagattgacaatcgttataagaaaaaaaaaagattaatactcttaatcatacacaacccaaataaatattaaaaagatacttacgtaaatgatatgaaacttatttagataaatgatcaaatagaatcttaatctaataattagtaaaaagtcaaatacacatgtgaacgcgatggagatatctatatttgttgtgggaatgacttaagtcgactgtcgacgtcggaaaacaaaatttcagagtcatgactgaaagaaaattgaaaattccatcataatgttaagaaaaaaatgtaataaagtttttgcatgagtgttgattttccttttgtttctacaaagtcaagccacgtacattgcgtaaaggctgattttgatttataaattcattttagacttttcaatactcaactttctataaaaatatatactttattgttatctcaataacattgtgaaagctgtgtgttaccgttattagactcagtcattcgcttcgtcacttgtacaataaaatgtcgtcactcatagacatattaaatcctcatgtgatttttttgttagcctatcttttttttttttaataataaaacagcctgttttagttgcaccttcatgtgcgttttaccgactgaattggcgagataagcttcggattatagcaacaaagaggagatgtgattcgagtcgattgatatagatacgaatctatttgttacaatagtaaaaaaaaatataaaaatatttcattttcaagaaataatgtcataagaagtcaaaggaagatattgtcattatggttagtcaaataaaaaaattgtaagccagcagttacgttcatacctgctttccgttgacttttataataactacactagtcttttgaaatactccattacctaattgcatttgttccaaaaatataccactactagtcttaataaattgtaattagactaggaaataatttttatttgaccaaaattatattaagaaatttggatttttcttaataataatcagttgatagtaagattttatggattggaataattgatttcctttccaaaaataaacaatcatgagatcctttcataattattttacactcaagattcttttctattaggggagaacaaataaaaaataaaagtgtttcctttttttttttttttttttcaaaaataaaagtgtttccttcatatataaatacatataaaacttgcgttacccattttataggatctcgtgcaaataattcatacatacagacgtatcgatcttgctgacccatcaattaaattttgacccaaaaggtcaaattcactataagaaaaacagaattcatttcatcaaaattccatttcacactttttctgtctgttacgattcttgcttgatttctttctaaacaaagcaaaagttgtctttttggagttgtgagcaactaattctctgaaattgaggaagagaaagcgagaaggtttttttggagtcagagacagaagaagaatttaacagattcttgtcggaaacatggatacgagtgaagcaaggaaccgtaaagttgttgcagttgaacaattcgatctcgaagtccctgagactgctcatcagattagcagcggttcgtttcttatcctctatctttggatttttgtttttgtttttattgtccttgttttttgtttgttgctgctcttttttggtgaatctacttgtcgtttattgcataatctcgagcttttcttgaaaaaaactcatttattattggggggtttgtgctccttttttcattaagcttttcttgagaaataatacacagacagagaatggaaagggtcgtttagctttgtttgtcttctttgttagattgaatgatactttgttacttgcttttaccctataagctgctgaaatatgacacatcaaagaattgaactgatgttactttccaaatcatgttgtctccgatgatgtttgcggtgccctatagtggaaaatgttgtctttgatgattcaagaatgtgaacattcaataactttaagtttcttgatcagtttttgtcttccccaaagttttaagctatgaaaactctgtttttttttttgttttctgttactctgaatttacattgagatgaaaaatgagtggctgaggaatatagaaataattgacaaataatatatactctgttttagtgttgcatgtgtgtgaaagcttaagtgttgaagaacttgtacagattcatggtttcaggtagcttttgttctaacgaccggtataaacagtgcctatgtgttgggatattccgggacagtcatggttcctttgggttggattggtggtgtggttggtctcattcttgctaccgcaatctctctttacgcaaacactcttatcgccaaacttcatgagtttggtggcaaaagacacattcgttatagagatcttgcaggcttcatctatggtaaattcttcatcactctctcgcaatatcaaaatacatttcaagttttacattttaacgagaattgtatttgcttgattgattcaggtaaaaagatgtatcgtgttacatggggattgcaatatgtcaatcttttcatgattaattgtggcttcatcatacttgctggttcagccttaaaggtacaataaccgaaacaaaccgttttgttgcgaaaatccgaaagttagctcatatggctctgcttttgcattttgtgcaggctgtttatgtactttttagagatgatagtctcatgaaactgcctcacttcatcgccatcgcgggtgttgtatgcgcgattttcgcaatcggtattcctcatttatcagctcttggaatctggctaggagtttcaacaatcctcagcataatctacattattgttgcaatagttctatcagctaaagatggtaaacttttatgttaaatcaaacctcgaaaatgatttcatataaccacaaaaaaactactcaccattttgtgtgtttttgtttctggtttaataggagtaaacaagcctgaaagagattacaacatacaaggatcatcaataaacaaactctttaccataacaggagcagctgcaaatctagttttcgcattcaacacgggaatgctcccggaaatacaggtcagtgtcatcgatctattattcatgctcgatcaaatctttctctgttttgtgagtgacactaatcttttgtgcaaatgattaggccacggtgaagcaaccggtcgttaaaaacatgatgaaggctctgtattttcaattcactgttggtgttttacctatgtacgcggttacattcatcggatattgggcttacgggtcctcgacatcgacttatctcttaaacagcgtcagtggacctgtttgggtcaaagcactcgctaacatttcagcttttctccaatctgttatctctttacatgtaagtctctatccagaccacaatgatgagtctttgagtcttaatcctaagcttaaccgttttaattcttgtgtttttaacgtagatttttgcaagtccgacttatgagtatatggacacaaagtatggagtcaaaggaagtccattggcaatgaagaatctgttgtttagaacagtagcaagaggaagctacattgcggtgagcactcttctctctgcgcttttaccgtttctcggagatttcatgagccttaccggagcgataagcacgttccctctcacattcatattagcgaatcacatgtatcttgttgctatgaatgatgagcttagtcttgtgcaaaagctatggcattggctcaatgtttgcttctttggattaatgtctcttgctgctgctattgctgctgttagactcatctctgttgactccaagaacttccatgtttttgctgatgtttgattaaaatgtcttcgacatttttaacgatgtaatctttataccaattagaaaaaatttgtaatccttttgttgttacttttattatttcaaatgaaagaaattttttataacataatatatatatttatttttcggttcaacacaaattttttttttaacaaaacaattcaagagataaatagatataaaaaaaagtaaagtgaaattaatcaagtagtcatattcttaagcaaagccatattcattaagaaaataaataatcattttcttatgcagagccatatttgggccaagccgtataaacgtttgggccaacttgtttgagatagcatataagcccaatagagttttgttgctgagcttatttgtgaatccatataaagtcttgacctaataacgaaagctagggttttttctctgtgaaatcgctcgccggcataaaagagagtcagaagaggaagaagagagttacaaggattgaaaatgaagggacgtcaaggagagagagttaggtaattagggtttcgaacacatatttctctctattttctcagctgaatctccgattcgaattagttcgttagtgctttacattagtctgatgacatctttgttttgctgttttgcagattgtatgttcgtggaacagtcctcggttacaagaggtactttcaattttcagtctttctctgtatgttcttagatttttcagagttcaatgttgcgtttatggttggagattgtagtgtttagtttcattattcttaagttatttggatttgaatattcatctatcgttttggatatcaatataagatctcgataaaagtttgtaactttgccacaactgatagatttcaatgataatgctctcagatttgtaatcttattccatggtttctgatttatggttgtgcaaagtgatgcatttttgctattgcttcctttaagattagcttttaagcagttggttgatagtttgattgcttatataaagcggattaaagattgattactaacgattaagtaatgtttcaggtccaagtcgaaccaataccctaacacttctctcgtccagattgaaggtgtgaacactcaagaggaggttaattggtacaagggtaagcgtttggcttacatctacaaggcaaagacaaagaagaacggttctcactaccgttgcatttggggcaaagtcactaggcctcatggtaacagtggtgttgtccgttctaagttcacttcaaacctaccacccaagtcaatggtactttatcttcttgagacataatcatggttaattggattttttcctccagactaatcatttttgatctgctgtgtttactctcagggagctagagtcagagtcttcatgtaccctagcaacatatgaggtaataacaaactcacttcagttttatttttgatgcaatagtcccatttattgctttcatttcagttgaattgaacaccactgattctgtaacttgagatttaagattagttgtttcatttttcttctctaatggcgaaaccttgtcaacaaggctatatctatttgaaaggttgtgcattgtagttaagagcaattagattataatcctttaagtataatagattgtccaagatttatatacttaagtgaacatggatcctgattcgatttcctaatgcaggaggctagatttcaacaagtatcggaaggaatcgccattatcatttctcaggagctgtagttttatctattcacttttattctagactctctgttggttttgattttatcttgagacgaagtaaaacattttttttcttgagatcatatactatcgagtattaatggaacttgagaaaagctatgatcccagtcattttccttatttagatttctcttactctattcccttaaccttttctccaatttgagtgttgatgaaagaaatcatttctccttcatgctataactagcaagtagccaatgtagactttttcttgcaactaaatcaatttattcttggaatattaattctagttggtatattaagtaacttcgttatactgattccatttattaatgattaatatgatgcaaaaagttacaatttacacagttaatcaatcaaataaaccatttatttggcaccacccgccaaaaaaaaaagaagtaccagatatttggtgccgacataagaaaaaaaaagagagccaaagtacacaagttacaatcccacactcactgtgtccttaaacacaatcctcgagattctattccttgcttgcatcattttcttcttccgtgtattttggagtttcgttcgaggacagatcttgatttgactcagctcaacttgaggtaacaaaaatctttcctttgtgattaattttcctacgatctcacaaaggtttcgcctttctctttgattacaagtttttaaaactgattcttccttgtaattggaattgcaagcgaagaagaagaagaaacaaatggctttgcgtttaggtgtttctataggggcagctttgggttcctctcattgggacgacggacaacgagtacgacaacgtgacttctccgcttctgtgaatttcaccgcaccggttacgagccggaggagcttaaggggtagtagaaccggtgtgaggattcttagggtttcaaatgaaggacgcgaatcgtacctcgatatgtggaagaacgctgttgatcgcgagaagaaagagaaggcctttgaaaaaattgcagagaatgttgtagctgttgatggtgagaaggagaaaggaggagacttggagaagaagagcgatgagtttcagaagatcctcgaggtttccgttgaggaaagagatcggattcagcgaatgcaggtcgttgatcgtgccgctgccgcaatctccgcagctagagctattctcgcctctaacaattccggcgacggcaaagaaggattcccaaatgaagacaacactgtcacaagtgaagtcacagagacaccgaaaaatgctaaacttggtacaaatcttctacttgttagcacaatccaaagttaatgatagtattagtcaccttacttggctatgttattggaaattttattaggaatgtggagcagaacagtgtatgtgccacggtcagaaacttcagggactgagacaccaggaccagatttttggtcatggacacctcctcaaggtagtgaaattagttctgtggacttgcaggctgtggaaaagcctgctgagtttccaactttgccaaatcctgtattggagaaagataaatcagcggattctctttcgataccatatgagagtatgctttcttctgaaagacatagctttactatcccgccttttgagtctttgattgaggttcgaaaagaggctgagacgaagcctagctccgagactttatcgacagaacatgaccttgatctcatatcttcagcaaacgcggaagaagtagctcgtgttcttgatagtttggatgaatcttcaacgcatggagttagcgaagatggattgaagtggtggaagcaaacgggtgtggagaaaagacctgatggtgtggtttgcaggtggacaatgatacgtggggttactgctgatggtgttgttgagtggcaagataagtattgggaggcttctgatgattttgggttcaaggaacttggttctgagaaatcaggacgtgatgccactggaaacgtgtggcgtgagttctggagagagtcaatgagccaggttagtgtaaagtagttgccgtagtaaatctaacgcactatagactatttgagacttaatttgaattgtctattacaggagaatggtgttgtgcatatggagaaaactgcagacaaatggggaaagagtggacaaggtgatgaatggcaagagaaatggtgggagcattacgatgctaccggaaaatcagaaaaatgggctcataagtggtgcagcattgaccgcaacacgcctcttgacgctggccacgctcatgtctggcacgagaggtattctcaaaatcctcttttcacataacgaaacactaataacataatcgaatctttatcctttaactttcagtccttaaaatatcaatcaatctctttaacacaagttagaatgtttgtcctttaacttttacaccttatattgttgaacatcaaatcagttcagtagcaaaacattgccttttcatactctttaaggtgctctattaacatttagaagcttagtctgcgagctttgttgaactgttatcaaaacagaactgacactagacaagctgtgaccaaataacagggaatgtagagtgtttctaaatatgtcttgattggttttgaccaggtggggagagaagtatgacgggcaaggcggaagcacaaagtacacagacaagtgggcggaacggtgggtaggtgacggttgggacaaatggggagacaaatgggacgagaactttaacccgagcgctcaaggagtgaaacaaggtgagacttggtgggaagggaagcacggcgacagatggaaccgaagctggggagaaggtcacaacggatcaggatgggttcacaaatacggaaaaagcagcagcggtgaacactgggacacacatgtaccacaagaaacttggtatgagaagttccctcactttggcttcttccactgttttgacaactctgttcagctccgagccgttaagaagccttctgatatgtcctagatatatcaaatactaagcataaaatatataaataagctgggacaatcaaagaattggcctacaatattagagtagtttgatcaagtgcaatgtatgtaatatttattatgacttctaatttgttctatgctttggtgtttcttaatgagtatggccaaagtttatttggtagttactaatataacacaaatctgattagaaaactggaacacattccattccaggagcataaagttatatgaacagataatctaaactctttatttggtaaagataagaagacaaatattttctgtaaccaataataatcttcagttacatttgtattaaattctaataaaaaaaatatacagaggacaagccaaagtggaaccccacccactgtcttctcaaagattaaaaaaaagaaaaggattttacccaaaatctccgatattcttattcctttgctgtatcatcttcttcttctacttcgtcctcatcatcgtcacatagatcctcctttttcgttaattggggagagatatacgtaacagctcttctctctacaaagaagttgacttttgcatccttacatctctcaaatctttctctggttaatctgtattcgtgtatttttgcagtttcttttgaggatcagatcgtgacagggtttagctcaaggagaggtattagatccgtactttgtgataaactttctcaaggtttacgatctcattctatctagatcggcttcgtatagatacaatcttgtttcaattagcaatggatcgattttgttattcgaatatttagaaaaaggaaagatttttccaaaggggtttcctcttataccattttttctgggttttttgaaatttagggtgagaaaaagaagaagaaggtgagaaaagtgaaggcaaggctttgaggatgtcttttacaggaactcaacagaaatgcaaggcttgtgagaagactgtttatgctgttgagcttctctctgctgatggagttggatatcacaagtcttgcttcaaatgcactcactgcaaaagcaggcttcaggtctgattctctcatctttgtattcatgttaacgatgctgctttaattagaggaatgagtttacgaattacccatcttcttgcttaaatgatgaattgaatgtctattgtaaccataagcagctcttgataaagtaaatgtctttttacagctgagtagttactcatcaatggaaggtgttttgtactgtaagcctcattttgagcagctctttaaggagagtggtagtttcaacaagaactttcagtcacgtatgtagttttgtttctgcttcgattcatgttttttttccgcttgcccttcttttggttattgatttaatcagtcttgcaactttgtttcctcacagctgcaaaatcggctgacaaatcaactcctgagctggtaaatgtttcttttctggtttggtcagatgctctttggatacattttctgattgaacttttctcttatatttccttcttggtttgttttcagacaaggacgcctagccgagttgctggcaggttctctggtacacaagagaaatgcgccacttgtagtaaaactgtgtatcctattgaaaaggttataactcgtttaatctttcattgctcttccttcactcatgcattttccattaactgaagctttggaatcacctttctgcactctaaggtctatgttggagtattactctaaaacacagttccatcatttgcaagaattctcctgtgttttctatttcatgttgaggatagatacataatcccctcagttaccgagaacttgcaaggaaaccaaatgttttgcacagatgcatagaccctggagatatcggttcttgttactttaatttgcatgttaaacctataaaggagacttaatatgaaaactctttatgggatttttaaaagctatttggtcacaaatatccgtctttttcgattctgaaatatgcaggtaacagtcgagagccagacatatcacaagtcctgcttcaagtgctcacatggaggttgcccaatttcaccttccaactacgcagctcttgaaggaatcctgtactgcaagcaccatttcgctcagctcttcaaggagaagggaagttacaaccacttaatcaaatccgcttccatcaaacgctctgcagccgcagcagtcgccgccggtgtaccagcagcctccgttcctgaatcttaaaatccaataatttctcctctctagtctaaaatttgaagttaatgccaaactgattcagtttgatttctctttgtgagagcgtgtgtgtaatctatgctttgatgttcttatttccattgatgtctcctaaaattctatgtttgtgtggtgatttggttatctataaaaagtctgaaactttccttataaatcttcaatttcgttttttctgtgtttctctagacagaagcctccaagtaatatagagggttttgactatactattcaacgccgtaagactgtggtcaaacatctgacacgtgtagtcacatcaacgtctaggttacgagtgatgtttacagttacaaacatacactgtagcacagaggaacattaactcctctaacagaatcctcccgcccattctctcacatagttcgtcttcaacctttagtctctcttgatcagaattctcagtctccgatttcactttctctctctaacttcgaagaaagaaagaaagaaaaagagaatgaagaaaatgcactctctctcctcttatctcctcctccttatctcgttaaccgccatagctacacctacgacaacctccgccacaacgatcggagtcacatactcgactccagcttcaatctccggcaccgtacaactctcaccggacagaatcgccgaaaaagtcgtttcaatgaacattccggcggtgagactcctcgattcaaatccggcgatgattcgtgccttcgcttacacaaacgtatctctcttcctctccgtaccaaatccactagttcctctcctcgcttcaaatcgttctctcgcgatgcgttgggtctatcgccatgtgcttcctttttatcctcgcaccaagatctcaatcatctccgtcggtaacgacgtgatttcgtattctccggacgtatctccgtttctcctccgtgcgatgcagaatgttcatctatctcttgtagatctgagaatctacaagatctctgtatcaacgacgttctctttcttcaacatcgtacccacggcatttccaccttcgtcggcgcagtttcaacaacctaacggagaagttatcatcagaccgattttgcaattcctcgaaagaacgaattcgtctttcttgatcaatctctatccctacaatatgtatcggtctagcttctcgattccgattggatttgctctttttgaagagttcccgttcaatttcagagatgatctgaccaccggagtaagataccggaatctttttgatatgatggttgatgctgtgattagctctatggctgttatgggtcatgagaatcttccggtgattgtggcggagactggttggcctagctctggaattgatgctagtgaagtagatgcgacgttgttgtatagtgagatgttcttgaaagctttgttgactcatctgagaagtggatgtggaacaccgttgaggaaagaaggtgtttcagaggtttatatctttgagcttgttgagaaagatgctaagcaagggattaggaattggggacttttgcatcataacatgactagtaagtacagcttcgacttctcggatggaggcaaagtcagaagattcaaagagattttggttggattctttgtgcaagtggtgatgctttacctgttgatgtagaagtgagaggtactgtctctgtttcctctgcttcttctttctttggaattagatcatttgtttggttgatgattggcttaggttatgataggttacggctatgtttgcagatattttgagactatcatttggtatgtggtaaacttcatgaacaactatgagtgtcttgatacaagaaaaactcttatctgtgatgattatagctcagggaatggcattttgggtctcacacatagaaactatagaagctgaagcaatagtgtagtgtgtgtgaatactgaaattgattgatgacatgtctgttcaatcgtttttaacagtaatcaggtgtataaaagagtcaaggtacattgaagatggagaagtagcaggacaccaagaatcatttgacatggcagcatgacccaataagcaagatcgttctcatcctttaccatgtcttgtgatctttgcttgtgttttgctatgtattgatgatttttgaacagactccaaaaatcctgtcttgtgtcagtttttaggtagatcatatggatggaccaatagtgcattcattacattttttttccaacatagctcttttgccacatatatggatctttgtgaatatctcttacgagttacgacctcttcaactgaatctcgctttctgatgcccaaaaatcagaaagttacaatgggtttgtgcacaaaactctactatagcgctatactgctattagttataccatactagatataataagtcaacgtcaatggtcagagaatcaatatccttagttgctctattaataagtatgtactaccagttccataagatcttcgacgaaccttacaaaatctggtatgtaatgtgaacttccttaaacatagttcaaatagaaaccaaattccataaatcaactaatacgttaaatgtgaatgcattttacatttttcctgggttacgttagccaacactactacaagagttgatcaacattataaaacctagattgaatagtcaaggcacgaaacttgtgcgtcttaccaaacaacattagtattaatttaaaatgtttgggaaaaacaaaagattcaagtattcaacctttgacatacacaaacaaaattgaatttatacgaaaaaaaaaaaacaatttcgtatgaaactcaatgaagaaagtttcattcaaaacataatgaagaaagtttcaaaatccacatctgatatgtgaagattgacgtatatttgatttgtggtttctatttctaatttgccatttcaataaaacgattggatatgcaaggataagtttgacttcaacatcttgcttcggtccggaccattttccatttctttttctcagaggtaaactagaatagttcttgaaagttatcataatataatagtaataataaaagtaaaagattgagacgttggcgggatgaaattcgtataaatagagatgtctataggtgaataacacaaacacatcttgttctttttgaagataaacggaaaaaaaaaatggttatacacaaatcaattaccccaatcgctctgatgttactattactactagcgatccatgcacatattcaagtcgttggttcaaccactgtaacctctgtctcactagccaatctgaaacatgaaacgtcttctgagatcaattttccagtttggcgtcgggagcttcgcggtggcggaggaggaggccgtggtggcggtggaggtcatggtggaggaggtggtgaggattttggtaacggatgtagaagcgatgttctacaaagtttcttgttcatggtttttataagttattggcttttagtgtaatataactgaatattgtatatagattttgattatgttttcagtgttactgtttgatttgctgtaatattggtttcactttttctttcatatccttttgtattgtgtattagggtttattctgtgtcttgcacggacgtttgtggattttattgttatatttgtcaatgcttatttaatatgtaaaattatgtaataaactaaaattatttatggtaaaccaaatagcttttttgtgtttagtagggattctagatctttctcaaagttttgaatttaaagatctcttggttcaaatccattgtggaaaggtttatgataaatgttggtaaagttatagccgtatgagaggctattgagagctattagccattaatcaaactaatgaaaatcaatttacaataaccaaaaactgaacaaatgatttttttttctaagttaacaaaaactaaaatgaaaaatatgtaacaaaatcttataatattccctgtcattccttagatattaatgaggaatcttatgacattccaaaaatgtatatttaataatctttataaatttaaaattattatttaaatcaaaaaatcaaagtggtgcagcggaagcgtgatgggcccataacccacaggtcacaggatcgaaacctgtctttgatataatcttttttttttggcagatatattttatacaaaaataaacaaccaaatgtaatgttaacttctacttgcatagccacacaaatataatttggtttgtatgtcattggtgatgtaaactgaaattgaagataatagaatctcataaccacacaaaaaatgaatgaacgcaaatcaaagcctctcaacacatctctttgcctcggtctctctctcgcccaattgcccatcaccagagcttaatcatatcttcttcagttactgccacgtgtcactctgaccgtgaacagcctttatctcttccaagtccacttgtgttcttgattattttgtcttcaccattctctctactcaaagctcttcttcttcgatcaaaaaacctcgagcttctaacaatggagaccagcatcgcgtgctactcacgtgggatccttcccccaagtgtctcttctcaacgatcctctacattggtctctcctccttcctactccacatcctccagcttcaaggttcgttatcctttgcacttatgcttatcttcagtgtaggatttgttcagtactagtgattactaattgtaataatttgataaaagcagcgtctaaaatcgagctcaatcttcggagattcactacgattagcaccaaaatcgcaacttaaagccacaaaagctaagagcaatggtgcttcaactgtgaccaaatgtgaaattggccaaagcttggttgagtaacacaaagactcaatctttattcaaattctgtattatgaagattccatctttcagttaaagtttcttacttttgaatgtataggaagagtttttggcacaagcaactcctgacaagggattgagaactttgctgatgtgtatgggagaagcattgagaacaatagcttttaaagttagaacagcttcttgcggtggaacagcttgtgttaattcctttggtgatgaacaactcgctgttgatatgcttgctgataagcttctctttgaggttttttgttacattttgaattaacttatgtcataagctttgtatcagaaaaatggttcattaggttttgatttgtgtattggttttataggctttgcaatactcgcatgtgtgcaagtatgcttgctctgaagaagtacctgagcttcaagacatgggaggtccagtggaaggttggttttacataaacttaactaacatttccgcttctttaaatcgcgcgaaaaatagttatcgaaagaatatgaaatttatttggacaggtgggtttagtgttgcgtttgatccattggatggatcaagcattgtggatacaaatttcactgtgggaaccatattcggtgtttggcctggagacaagttaaccggaatcactggaggagatcaagtggctgcagccatgggaatctacggtccacgaaccacttatgttttggctgttaagggctttccaggaactcatgagttcttgcttcttgatgaaggttttggtctagtcctgttttatcaagattccttctttggtaagcttttaaactaagctcaaaattttgcctcagggaaatggcagcatgtaaaggagacaacagagatcgcagaagggaaaatgttctcaccaggaaacttaagagccacattcgacaactccgaatacagcaaggttcttgctttggatcgatctaactttaatctttgctcaaatctaatcctcactctgaatgcttttcttgtgaaatcagctgattgattactacgtgaaagagaaatacacactgcgatacaccggaggaatggttcctgatgttaaccaggtttgttcttcttcaacactataacaggattttttctacttgtgactggaaacttgactttagtagtaacttgggtttttggcagattattgtgaaggagaaaggaatcttcacaaatgtgacttctcctacggctaaggcaaagttgaggctgttgtttgaagtggctcctcttggcctgctcatagagaatgctggtggattcagcagtgatggacacaagtccgtgcttgacaagaccatcatcaacctcgacgatagaactcaagttgcttatggctcaaagaacgagatcatccgcttcgaagaaaccctttatggaacatcaagactcaagaatgttcccattggagttaccgcttagaaactcattcaaaataagtgaatgcatgtttatttttccataaaccggataatctacttttcccttggtttataagagaagcaacaaaacttgtgatacaagttttttttaaaaattattagtttggtttggtgttaatcaaaattttaacaactaaaaacaaataatgaaatctgtctgaaactttattatcatatgatcaaaaacaatgtttaagccgaaattaaagttccatgacttattattattgaaccgaaaaaacttaaaccgaaataaaacttgattactcaacgctcactatcttcacaacagaggaaccatcaatcttgtgcaacgccacaatcgaatctccattcttgcaaattcccttcgtcttcgcgaatccgatagccaaattaatcatctcctccgttgcatctttgtttgaatccctagccgatgatcccgtcgccaccaccggaataatcccacggtaaatcaaaccacgtctcgccacatgagccaccgagtccgagcacgacatctctatatcattcccttgagcaatctcaggcacaatcaccgacaaaatcggaacgctcggcctgtatttagccacaagctccgccgtgtaaccgcctttggtgagaacgacgatagccgacgcaaaaacactctgtgccgtcgaaacaactgaagcagctaagctctcgatcggagataacggtaacgaaagcattcctagggttttcttgtggagaatgtcgtaatcgatgaaatcctctgcttctttacagatccttgacattgttagcacggcagcctcagggtgagctcctgcagcggtttctccactaagcataacgcaatctgtcccgtcaagaacagcgtttgcaacgtcagtggcttcagctctagtcggacgaggagatactgtcatggattcaagcatctgtgtggctgtgacaactggtttcccaagagcattagccatcttgatcattgttttctgagcaaggaacatcttttcgatctgaatctccattccaagatctcctctagccaccatgaaagcatcagaattctccagaatcttttcacaattcatgaccccttcttgattctccacctttgacatgagcatgatgttctttgagtgttctccaagtaacttcctaacttcagttaggtcagatcctttacgaacaaaagaaagagcgatgatgtcgattttgttcggaactccccattggatgatatcttctttatctttctcagtaagtgttgggagatcaactacaattccaggaagattaacgttttttctttctcctagaattgtagagttctcgcaacggcaacgaacaagaccgaaagacttgtcacaggacaagacagttaaagagattgtgccgtctgaacagagaatcacatcaccaggtttgacgtcctctgcaagtttcttgtagctcatggagataatgtttgaatctccttctatcttgtaatcaattgagatggtgatctcttgaccttggtttagctgtatcggtttgccttctttgagaaaaccggttcgtatctcaggaccctttgtatcgagcatgacggcgcagaggataccagtgttgttcatggcagttcggagattatcgagagtttcttgtggtaagagtgagaaccatgggagaaattgaaccgggctacgttcataccagccttgagaagcttctcaatcatctccaccgatcttgaaaccggtccaagagtacaaactatcttcgtctttgaacggagagctccattggttgctcggccaccaagtaacatctccattgtggaaactttcgaaagatacgcaaagaaaaattaagagattgaactttgaaagacagaggaaattaagagtttgcttgatgaaaattatgatgagcagagtcacgtatatatagaaggagcgatttgagattttccattttacgttgtgttgtttacattatcgaatttcccattttcatgttcgaatttctatttgccaaaaaaaaaattgttcgaattttccttttacatgtttgaaactttgaattcccattttgctttttccgtttgatggtttagtttgtttatttttaatggtttaggcaataattttttctattttgacattaacaaatatttttgaggaaaatgttaaatgatagatgaaaaatgtataattttgaaattataaattttttaaatgaagtaatgttatgacattaaaaaattaggaatttaacaaatattttcgagtaaatgttaaaagatggatgaaaaaagtatactgttgaaattataaaattttaaatgaagtaatgtttttacataaaaaaaaatagtaattttctatagtgttcgaaaattctcaaaatttattaaaattaatatgatctgactatggtcaaatctctacctcaaagtcaagcaaaaaaatatgatttgggccaaaattattaaaagcccaccctaatccaaatttcgagacgttctaacttgtaaattacgaattcctttttcccagatcgagcttcatcttcttacttctccctctaaagaaaacctttaagcagctctatcgatgacatcaacgcaacaaaaacgatgaagaaacctcatttcttgaagaatccagtgtttttcctatttctactcatcactgtttcttccctaactatactcatcttctcctttctcaaattaccggaaacacctctcgccgccggtaaccatctccgcaaactccgttacgagctcaccgatgaactcggtttattcgggaagatgatgatcgaaatgctaccagaagatctggttttcactgccttcgtaccgtcggaaaaatcattcagccgagatctagggctgaaattaaacactagccgtccaattaaatcccacgaagaagacgacgacggagataacacatacgccgtcgtatcgaggatcatgagtttcgcggtggttccttacaaagtagaagaagtagacatagggaacgacgaaacggcgtcgtatgagtcgttgagtggtttcacacttcagatttggagaaaaagaaatggtggtggattagtcgttaatggcgttgagactgagaagatgggattaaagagaggtaaaatcatcgtacatataatgaatggtgttgtaatggattctgatttcgcacaatctattgcttcttctactcctaaagacgaagatgatgatccatagagaagaagaagaagaagaagattattgttttgactaaacagaaaattattgacttaatcatccaatcagaatcagagttaaattgtttttctaccatatttttgtttttttacttttaatccctccactagcaaaactcaagtgggacccacagaatagcctaaggcagtttaccacgtcatcatggaatcaggaaaacgtcgacggttgtgagtatcacacgtggcattatggttttctcttactgtgcaccgtgctacaccagaaaagaattcgtcgtctgatctgcgagattatacgcctatagagaaaaaaggcgatgatgactaaagaagactgagtcgactcgcttttgacacagttgacttctgagacgtctttctcttcttcatcttcttcaatcatacgcttatctatttttggaaacttgaattcgtgattttagatgggaggaggagaagttagtaaagagatgggagcttgttcattagcgtatcgtcgtggagatcagaaattacgcaagttcgtgacggcgaggagtactaagtttcttctattttgctgcatcgctttcgtcttggtcacaatcgtttgccgatcttctcgtccttgggttaacagttcaatcgccgtcgcagatcggatctccggatcaaggtctgtacacacacacacgttctgaatcatctaccttactatatgagtctaaatttgatttggatctctaaatggtaacttttggtgaagaagactagattcttttttaggaaatgaaatttatggaaagtaaattttagataagtgcaattataactgcgattcgtttaacctttttttgtcttcattcatttcttaaattcataattaaactggagattctttggctttaccgatttggtatggtttgtgttgtttctcagctctatttataagcaaactgtgttcttaagctccttgctgttaatgaatctatgaatgcaaaagctacaatgattctgtgatttatatagacacttttgtatatcgaaaagcaaatgaattc

SEQ ID NO: 1363 - DNA, 95111 bp, Arabidopsis thaliana
gaattcgtgattttagatgggaggaggagaagttagtaaagagatgggagcttgttcattagcgtatcgtcgtggagatcagaaattacgcaagttcgtgacggcgaggagtactaagtttcttctattttgctgcatcgctttcgtcttggtcacaatcgtttgccgatcttctcgtccttgggttaacagttcaatcgccgtcgcagatcggatctccggatcaaggtctgtacacacacacacgttctgaatcatctaccttactatatgagtctaaatttgatttggatctctaaatggtaacttttggtgaagaagactagattcttttttaggaaatgaaatttatggaaagtaaattttagataagtgcaattataactgcgattcgtttaaccttttttgtcttcattcatttcttaaattcataattaaactggagattctttggctttaccgatttggtatggtttgtgttgtttctcagctctatttataagcaaactgtgttcttaagctccttgctgttaatgaatctatgaatgcaaaagctacaatgattctgtgatttatatagacacttttgtatatcgaaaagcaaatgaattcataatctttgctatgttaagctggtgatatacggtacatgtaggtatgtgcaaaggttaggagttatggagtaaatgtaatttataattaagtagttgatcttttgcttttggtttgactgcataattttgtgctttattgtctaatttgatgaatttctttatcacatcctgcaggaaaggttatacacttctgatgaacacatggaagagatatgatctcttaaagaagtctgtttcccactatgcatcatgttctaggcttgactctatccacattgtatggagtgaacctaaccctccatcagagtctctgaaagagtatcttcataatgttctgaagaaaaagactcgagatgggcatgaggttgagctgagatttgatataaacaaagaagacagtttgaacaacagatttaaagagattaaagacttgaaaacagatgctgtcttctcaatagatgatgatatcatatttccttgtcacacggtagattttgcattcaacgtttgggaaagtgctccggatacaatggtggggtttgtgccccgtgtgcattggcctgaaaaatcggtatgtcacttttttattgttggatatcttcaagaagcttctttatcaaataacagtaccaaaatagtaaaaatgcgttctttttaagttgtttgctattagggactctttcactgatctgaaaatcgtaggtctctcccattatttaaggaattaatcatctctctctctccatccagatggtctaatagctagtattaatattgaaagaactctctgtacatggtgtttgaattggttctgaaagttgacttcaattttctgcagaatgataaagccaattactacacctacagtggatggtggtctgtttggtggagtggtacatatagcatggtactctcaaaggcagccttcttccacaaaaaatacctcagcctttacacaaatagcatgccagcatcaatcagggaattcacaacaaagaacaggttccttatcactttcattacctatatgttgttttttgtattcctgaatgtgattaaagtgtaccccacctaagtgtgagattaatttaataacaggaactgtgaagatattgcaatgtcattcctcatcgcaaatgctacaaacgctcctgctatatgggttaaaggtaattctaaatcgcaggctactttgagaaccatgtattgccttgtgattctgataatctttgatgataaagagcatatcctcctcttttggcctgtttttgtaggtaaaatatatgaaatcggttcaactggaattagtagcataggagggcacacagaaaaaagaacacactgcgtaaaccggtttgtggcagaatttgggaaaatgccacttgtatacacttccatgaaagccgtggatagccgcaatttatggttctggtgattgctgcttttgcatggcagtacatttccgctgtctcttccactggttactactcttcacgttctagctatggacgggtttgacgccaagtaagacttaaaaacagaactgatcttacttttacggtaagaggaagatagagagcaaaagtttataatcggtggctaatggggttttctcgtagaagcttataaagagatatagtagtagcctagtgtatgttgtaccctcattgtaccatttgtaacatctgctgttgtgaaaatattgttttgtgctaaaaaaaatgagttacatatattcatacactgatcgttagatgcttccaaaaatttcagtagtgttacatctgttgatagtgtttgttaagtagttgtgtcaatatcttccattgcatcacaattggctccagaactctcccagaaatgtctttgcggcgtctaggctcgggtaatacggtggctccataaacacctgagtcagtgaatcataggactcgtgattcgccaccgttctatttgcattcgcctctgcattcccaatcatcgctgcaaccaacttctggtatccgaagaagaatctcttggctgcagactccacggcctgcattccctgaagcaaatgtatcttctcgtactctgttttcctcgagtaaagcttcatcgccgcctcttgcaacctcggacctccggtgggatccacctccacctcaagaacagctggcactttctgtctcagctctttggacatcttcgccatctctactaagccctttgacctaaaacaaaatgcgtcgtttggaaacgtcgatttgatttgtaactgtttcttcaccttcaagaaatcttcaggatccataagaatgtgtaaatcttcaatctctgatagaagcttccagattctctccaacaagtagacgtctgaagaagctttttcgaattttccctcttcgattctcgattcgattctatataaaagattcacagaaacgtaaatccacgattcaagaatctgatgactagtgtagagcatttgattctcttggttctcgatgtgatctgcgtaaggattgttcttgaggctatgtagctcctccgggagacaaacggcgtcgtattgaagatacggttttccggcgaggtttggttctcctaaaccgagcgtatacttacaccaacgcatctcattctcgatcgtagacaagatcttctgtccaacactctccgatgtacgacacgtggcgatctccgaaagcaaactcaacgagctccagccattgctgaccggagccgccgatacgttctcttcgtagttgtcttcatctccgcagatagccgccacgatttttatctggctggtagtgagggaatccaaccgtcggatccattcgcggcggttgatgtaaggacgtgtgtcagaagcaacggtgaggattaaccggaaagtgatctcaagagcttgaagagctggtttgagaacgggctcggagatccagtgagggaaatagagagaggaccagaggtttctaagttcaggcaaacggaggtaaagctcgtaagcagagcaagcggcggaagaagaggaggagattggagaagagacggaggagagcttacacggctcaggaatggtgacgtggagcttcggagataccatcttcctctgtaaatccaaatcagccatcttttttaaaaaaaaatacagagatttttgtttatttgatgaatatatttaagaatgagaggaaaaacgtttgcgatatatataggaaggataaagagagagatgtgaaggaaacggataggaaaaagaagggagacgtcattatgcggaaaattagagataaacaaagatcatagtttttgaaagtcaacgtacaacaacggctgtttcctgtcttttttgcatttttgtgtcggttttatttttctttctattattttggaataaatggaaactattttgtgtatactcgaatgcaatcagttatacgatacgttttccctaatggtggggaattattcaaaaatctttcttgatatagaaaattagaaatgttcttttttccttattcgaactataagtacttttggatattgtatcatttttacctacattaacataaagtttgttaataaacactggataactgattcgttggataagaattattaaaaaaaaaaaaaaaaaaattcaaataaacttatattctcaatttattgaaagcttatagttaccactgcataaatacatatacttatgaattagatttttgtttaaaataaggagtagaatcgataatgaatttaattggacactaaattaggaataaaataagagggcacatgaggtttggtcggaatccgttttggatggcgttttaggactttggggaagacagagagagaaagagtggaacgggtcctagcctagcctttgactttggtcttcctttttccgtatctcttaatcccgtttgtgtaaacttcaacattccgaatgttacgtttcaattataaaaatcaatctttttttttgtcggtgtcattttatttattacttacaatgaaaataatagtgctattgatttggtttatttaaaacatttaatttaatccctatcttcttcaatctttgaaagttatttgttcttatcgtatctacttaaagagaacagatctttgaaaattatatgcagctataccaaatttgtttacctagttaatagagaaattttcaaaattctatccaactaaactttatcaaattctttatattttaaaatatgttatgacaaaaaaaaaaaaaaaagtaagcatccaatctttagttttgaaaacctaaaaacgggtctatcccaactaataataatatctaggtttttgttattagttgactctcgaaccatatacttaatttgtatcgtagtttatagtagacattatagtgtagtcgacaccttagaagttagatctcgactatgattacttcaatatgaggagtagtttgaaaaacataaaaaggatgtgtaattggtttaagtttttagaaaagtaaaggcaaaataaaaattattgagttccttgtctctctaaccatacttgaaggcactaaacatattacagtaaacaattacttactgacaatagaagataaaacaattattaaagattaaaacaaaaataggagtattaatgttccttaaatcctggagaccttgactttggattgagagcaaataaaggaaatcattgcttagctgttgtttgtgatttgtgaacactaaacataagtcatcgacaaaagttgtggtgatcatagaaacgaatgggaacgtattcgattgaacaatccaatatcgaaattggaaatcatcatatagatcaatcagccacctgtcgtcgagacaatatattaatcaccaaagattagttgtatagtcgacagttcaacaattccattctatacacgtacacacattcacatacataagttggtgtcacacattcgtctcatgacgtatactcttcgcattatcctgttttgtgtgggttttggttacctaaatatgtcacaaaacattatacatggtaactccatgttctggaacatatatttgttctaatttcaggggatctacaagaagataaattcacgggaaccttatattttgaaggtttggtttcacgggaattaaaagaattgataaacatatgttgtaagttcacgggaaatattttaaaaactgaagatgaataaaatattcttgattaggtgtatttttgtatcatcatgtgcattgtgtgagttcagctaaaggagaatgagatggatgtatttgtagctactcataaggacatatcttatcttcctttcacgtttacgatgactctttccaagtttcatttctgtctctttgcttgaatacttgtgtctctctccaaacattatctcctaaagaaagtataacggtccggtgaggtgattacccaaactatttatttacataagagaactcatcaatatctttaaacattttcaaaacattcgagttgatacactatgttagcatatgactagaactagaagtgatatttaactataatttttatgctcttttacattgtaaacaaatgatttatattttggtaatttctagaaatatattctcgtgggaaaatagctgtataataaactgcatctgaatttggatatttgagatcaaacgcgtaggttctcctctcgcgtgaaaaataaaaatcatcagaaattacgtggagggaacatgatgactttttaactaggaccggggggctgaccaatcaggtgatatcgcgcgttaaaaaagcaacacatggggctgtcctaagtattaagagagccacgtggtggaaccaaaccgagtcgatggctggaaccagatagccacgtagttagtacagctcattggttttcttttctctccgcgttcatgacattggctcgtgcttgggccactcaccaacattacctttttgcatcccaataaatacaaataccaacaaccaccttttcctatttcctttggccgacacaccaaacattttccttgaatatgaaatgcatatctaattgataagccagatgtcatacatatgtacattgataacgcctagacaaacagataaatgatcagatactctaagtgtgtaaagtttgtttcttaattagataaagactgcatcatcatgattcatggatacaattgctttcctcctacatacgttgctaacactgatgcagaaacgtcttttgagaactcatcccaagaatttgttgacaatatgacaaaatctgctagttttcctggagataaagaccccaagtgatgatccaaaaacgctgctcttgccgctgatatcgtctgcctgcgattttcaaacaaagaatatgatgaatgcttgagaaaatgttggagaaagacttagagaagagggttattacgcaatcagcgcatccgtaaaagagatgcgttcagatggaatccaagcgtgatcccacttgggaggtattcttttaaccgcggttctgatactgtgcaacgggttaatgtctgctacctggagggaaaacaaacgaagcaaagtttgactatatgtaaaaacattgtatatgtgtagagattttcgaaaacatacaggccagtctgagccaagtgccaagagtgcattgccatttaagagagattggaatagataagactcctttacggctctttcagaaccgagcttcttagcaacagaatcagcatcatcaagcaaatggtctggctgttcacgagcattaagttagatcaagaaagtgagttttaagccagatgcttaatgctgggaagtaactaacctgaactgaagcaacaatgtgaagttgaccgaaccggttggctgatcctggtgccaaatgttgggcatgctctatctgtgaccaggagttcagagatattaagtacagacagaagaagcagacgtagcaaatagctcagaggaataggtttataatagcaaacatcaccctaaatcttctatctcggtctccattggctgcagcaacggattcgtacatgtcaaggatcatgtcatttgctttgtcgcctatagcatggatagcaaccttgatcacagcagaacaagattataaacaaaactaaataggacgatgagcaagcaatggacaaaagtaaacaaggagatacctgaagccctgatttgtctgctgccattgtgaagttggaaagtttttcaggatccatcacttctaacccataattattaggtgtatcaatatattcctgcagaaaaaaatgtataccgagggattttatagtgctgcttaaggatgaataacatgtataatgaattgcgacatgtatatttcatcaatatgaacaatatatgagagtatttttagaatatattgcagatgaattagagatagtatagtactcttcacctcgtaaaaaagtgcactgttggaacctagagagccatcaataaatgctttgacgccaccgagatataaccattcactcagtacagatcccttctgcagcttaagatcctgaaagtatgaagtcaaggaagatgagcacatatagaatttcaagtaaaaaaacagaacaagcataattgtgcaagcaacggtgaaaagagaatgggtgaatgctgctaatagccttcatagcacatgatgatataacgcatcaaacatcgaaagagaatttgaaaatcaggaaaggacaaggtttcactgatgatgtatgggaactatatgtaaattgcaaaacataaagttgaagaatgctgtaatatacgcttaagtttttcgtgctaaagaagcacaaaactgcttgtaaaaatactcaattctatctatcagaaaacaagagttggttctgaagaaatcataccaataaacgtgaccacgttgtgatgggaaaaaacaagcaagtccgtatcatcatcttcttcgaggaatcagcatatagatagacatctgtaccataaaaagaagtattcaactcaaaaaaaatttggactaaaacaaattctatcctatgtctatcagctaaagagtcatcaatttctctctagcagtatgcaagtgtggatatgacaactcatcccactcagggtcaatagaacaatttattgcaccttgaaagtctttccaggagagctcatctgtggtgccaggaaagtatcttccaagatcaataacagttgtcacgcctctagtcaaagcatatttgctagctctaaatagtgcttccctacgttcatccactgagatttctttaacccagggggtgacaagctccatagcagcatcgatcaaaagtcctgtcggctctgcattgatacaatcataaaagcaagtaccagctgattttagtatacactgacaacacagaaagtttctctgcaatcccaagaattggaagcataatagaccaagtcctaaattacttgaaacaaacattaccgccactaggcatcctcattatcgttccaccaactggatcttccgttaaacttataacaccagcaatcttgagcgcaagggaatttgccaatgccatatgaccatccatcctaatcaaccaaacctacacgaagagaaataaataaggctatggtgctgattgttgactattgacaaacacaaaatgcagatttcttacaggattacgaggggagatttcatcaatccatgatgcagagggcaattctcctccccagaaatcattgttccagccaccacccaaaatccatgagccttcttttgcatctaatttttttttgttacacatataaaagcagcatagtaatttaaatactctcccactactaagaaccccaacgtaagcaaaaaatgttcaatgtacactgtacactgtaaatcataactaaaaacagacaccaataaagaagtgtaaccacaatatgattgttcatataataatgaaatattaattactctgcacagcgtccttcaccattttacaaaactcatctttttgactcactccacgaagtccaacttgggccatctatgctcaagcgataagacattaaaagcaaaaggaaaagatataaggtaaacgagagtatagtatacttcttcatatctaaacctgatcaaacaatggcatgtaatcatctaatctcaggttaacttaacaatatacataattacatatcattgcaagaagaaagaacacagaaataagtttgcactatgccattatcacctgtaatcccccagaaatcagatgaacatgtgaatcaataagtccaggcactacaatcttcccctccagattcacctccatagttccatctcctataaaaccctgtcttcatcgaaatcacaaattacatgagaccaaaaaagtgtcaaactttcagcttcattcatgccagtgaagtagtatgaaagcagcatcaaccacattgaacattgaaagggtggataaaagaagtgaaggaccttgagagtggcaaagcttccaactttaagaatcctgccattacgaatcgccatggaatcggcaaaaggcaaagagctatcgctggtgaagattgttccattggtcactaacaaatccgccacgataccagccggtggtgtaggagacttgagagttgaccaatctgcgaacatcaatcgtatcgacgactttcagtcaaactatctgatttgagaaaaaagtgtgacaaccctggaaggcgaacttacataagtcgttgagcaaaggaagatacgcgacggagataaggaggaacacggcagctgaaacgatgacgaagaggttcatagtcagtcgccggagaaattcttaaaacagaaacaacaacaactacagtatgacgaagtggatttcgtcccacctgaaacaaaaccgatcataaccggaaactcataccaaccggtcataaccggaagttgatacaatgctgaactttctctcaaataacaaatccaacttacaggttaaattcaattccgttaaattagcctaaagcccgttagctcattaaacttaaggcccaataactaacaaacggagttttgagtcattaagatttcagactagtgtaaatgttgggtcccactgtgaagtgagatccctccaaaaataggcgtatgccacttagcgtggagagcacacggtattctttagtaaaaggcgaaagaatagttcgctttgtgctcaccacatggctgcgtgattattatcaagggagagtgaagtctatttatactatcatttcctctatcaaagtctcttagctttccgatgtgggatacttgaaagtcccttgtgttttttttaaggctttgtaggatgtactcaagcccataaacacttttgtttattatcatttacacaaaatttcaccaacagagtcaggttttgttggtaggggcccatttcaactaaggactgtacaatgtttagcccattaaataaagggtttattagagaagtagacactttttagaaaataatttgagaagtagacatattttttagaaataggaggaataagtagtttttactgggcttgtgagatagagaccatgtgagatagaaaaaatatggctaaagtccaaaagatgagtcaaatactattgtacccttatgatgtaaaaaagaaaattttgtgtgggtccaaaattttaggaataatggatcaaataatatttttgaagcccaaatactatatttcgtagcccagttaaaataatttacacctcagatgtctagactatcataagtatatcacatacgtacaccaacattagtacactacatagtacaccacatatgtacactaacattagtacaccatatacgtatactagaataaaggaaaccaagagaacccatttaaaaaatgcaataaagtttaaaactataccctaaagcccaaatagatgtctaaatgcaatgaagttcaaaactatacctaaagataagatagattactaaacccaaagaaaaatccatttaaaatgcaatgaaatttaaaactacactctaaagctaagatagagatttaaactcaaagaaaacccatttaaaaaatggaaaaatgttcaaactagaatatgtacaccacatacgtaaaccagtaatagtacaccacacaagtacacatgcgttagtacacctcatacgtacactagaataagggaaacaacatacgtacaccagagttattacatctcaagtgtctagactaacataagtacaccacttacgtacaccaacattaatacaccacatacgtataccaacattagtacactatatacatagactagactacatacgtgtatgtacacttaatagatatcagaaatgtaaaatctgattggtatacagtatgtacaccaaaatactttacgtacacctttaaaaattcagaaactttaaagagttttatgataaacataccttccatattgttacgaatttgacaatgtatctgagatttgcttctgaaattgtagagtttatccttttatttgacaatgataatatattggagatgtcaagcccatgagcaattcgaaattggagatgttattgggctggttttaatgaggcccagtttatttcatcaaaccaacagaagggtaaaattgtattttactaaaagctgtattagagggggagttctattagagatgagagataaaagtacccattccacctatttctaaaaaaagtacccatttctcaaattatttttgcaaaaactgtctactctccaagttttctcttaaataaagccgtttgtttgattttggagtaaggaaagatgctgacaaaaccatgtacttacagtaatgataaagtagagaacctgaatgtaagccaaaatcgtagatatcataataaggtatctattcaaagtgagtatgccatgataatcagtattgctatactttacaacgttcacagtactactcttggacaagagaagagggccaagaagttgggacactacttataattgcaactatagtctgtggaatttaattagaaaaacaagcctaaacctagctccttagattctctcctttcctttcatgcacgagcccatccatcttcttttaccaaagcaactgctgtctgtcttgctttcacgcctcaacggttcctgcatatcaatgttgttcaccaaatctttgtaagaacatcatatgtgtgtgtgtttgataaaactaaaagcatgaaacataagactttacagtgagtagaaatcaaccattaatttgataggaggagttacttgaaaaagtatcaaaaagagcaaaaccgaataggcaaagtaattgccaatcagatagaatcactcagaaaccaagataaacaatctgctcaaaacatatataaaacaatctcaaacaacactatggacgcaaagattcagagaaggcttctttaccggttcattttgaagttggttgttctgttgtatttcctcggttgggcttgggacaacaaccaccgcctaaaatcacacgaaaactagctaagaacatcattgaaactaaatgccagaaaccaaaatcaatatacatcaaaacaataaccaatataccacctcaggactaattccgttgttggcatcttcttggatcaaactggaaaaacaagcaatcttagtttatggatttaacaaaaagagatgataggatttgaaaaaagctttaccatgtatttgaatcatctgaaaacaactctggatgcaactcccttgccatgttcgtgtaaaactcagcaaaaggcttacaatcaaatgcaacataacatgaaatctgtttctagcaaaaccctatttctagaataaaatttaccaaaaatcttacagaaattattcgttgtagagtctcaatctcagatacggtcatctcaacatcaaacagagtaaaggaatagaaatatctcgagagcttgccgttgggaatagcttctttcctttgacgcaataaatctttgatagcttgtatctgaagctctaccgactgaaatgacgcaatgatcgctataagccctgtgatactgacatctccatccactacaaacgaaagcacaaaaaaaataaaaaaatcagcgagtggagctgagaaatggagaaacaacaacacaaatgttcaattcgacttactcctcagagtcgatctgagtttaatcagctctcgggccgaatcgcccaaagaagatatcaaagagtttaaggaagatttagatccatttcctttcatcatcatcatcttcttcttcgtttctcctctttccctctcttttgcaaaatgctaggggttttgactagttaaaattttttttttatacttattttgtttagatttttacttttctctttaaagggaaaagggaaaattaataaatcattagataaatttccagatggtcaacattgattttctctttagtcaattttttagaaaatagaaagaattttttttccaaacatttaaatagcaagaatccaacaaataagaaagaaaaaacagattatatgaataggcacagcaaagaatctaaacagatgcatttcttttaattgattgtgaatgagaattatttaaaattatatattgataaactatgaaaaaaattttggaaaaatctataaatactattaaaaaatggcaaatcatagttgattctaaatttaaaccactcaacatattctgacaacccaatatattctttaaccactgggctttagaacttgctatccaaacaggggagcaagacataaaataaattaatattcagactagaaactattgggtctcacatttacgtgagagccctccaaaaataggcgtatgccacttggcgtggagagcacacggtattctttagtaaaaggcgaaagagtagttcgctttgtgctcaccacatggctgcgtgaatttttcatgctgagagtgaagtgtatttatactatcatttccacgatgaaaatcttagctttccgatgtgggatacttgaagttgccttgttaaaaaggctttgtaggatactcaaaagcccaaaaacattttttttaatgtcaccaacaaattcaggttttgttgatacgggcccattttaactgacgactgtacaatgttaatttcgtataagctaaatcactggatatatacaaccaacccatatatatagaggacagagatcagtaaattttgggagctttgctggtcttggagttgaacagattctcaaggacaagcattttttgagcactgtgacttatgtggaaccttataacgttgaagttgccttggagttttatgcaaattctgccaagtgttcataaggtacttatttgttagagggaaaatgtatgagttctcttctaaccggtgatgtatatgagcttcttggaagagaacattgacagctaatcacagactcaggttggtcttgcatgtctcaatggttacttaattctaatcttgtgaaagcctatctaagaaaaacaatccaaactttgcttctttttgtcttctgatctttggtgatcagaaatagagatatagtatctgtgtaaatcagcattagttagttgaactacttaaaaaaaatccctcattacattcttaatgatttgagtcatcaattaatcctctcttcatgatggtataatgctttcagaaaatgaaaattgcagaacaaaaacaatgaacatatttttcactctttttcactctgattgtcacacacaatcaatatacaaacaatattacaagccactgaagataaacatccacaatttttgtttataaaaacctcgtctcgtatcgtcaacaacattgattttccattgaactttctaccaatgtccattttgtagaaaatagaaagaatcttttttccaggcatctataaatagcaagaatccaacaaagaagaaagattttttttttgtatagcaagaatctaattaaacagatgcattgcttttaaattttaattgattgtgaatgagaattacttaatactatatagatattgatacttacctgatcacatgacacatcacaatttttgatcaaccattaagagatatatagtacaacacctagttctaaatgatatactctatatctactctctatctcaagttatatatgtactatgcaaaaattttattctgttttttagtttcataaaaaaatctccattctcgtcagcatgcaagccctcggagtgatacaatcccccggaatccgtatctctctttctccgtccagccaccgcctctcgcaaccgtcacttgtcaccggaatttcaaaaagaaactcctcctccatttccttatccatcaaatgcggttctatcttgtcatgtccctctctatgtgaatatatcatcccaacttttacacttattttccatttactgctcgttgtttagattagagagatcattgacactgaatacattttttacgaattggttgatttcttgattttgttgcagcaagtgaagcgatgaagttcgcggaaggttctaagaaggagaatcttgttccgcttcgtcacaccattttctccgaccatctcactcctgttcttgcttaccgttgtcttgtcaaagaagatgatcaagaggctccaagtttccttttcgaatctgttgagccaggacatcactcttccactgttgtaagaactctcagtcttgttttttacttgctcaatctctttcaaatcaaacttatgtatattttaatcttttagggaagatatagtgtcgttggagcgcatccgaaaatggaaattgtggcaaaggagaataaagttacagtcatggatcatgtgaaaggcactaagactacagaggaagttgaagatccaatgatgattcctagaagaatctcagagacttggaaaccacaattgatcgatgatcttcctgatgttttttgtggtgagtggattttgctaactactttggtttggttactttgagacaattaggtcaaaatttggtttagttttgagaacataatgacaattaggtcaaaatcacatgatcttcttataacaggtggatgggttggttacttttcttatgatactgttccctatgccgaaaagcgaaagctacctctctcaaaggctccggttgatgaccgaaatttaccagatatgcatcttggtctttatgatgatgtggttgtgtttgatcatgtcgaaaaggtgtcaaaaaatctcttgaactttttcataaaagaattggctactctatataactgaatgcgaattttgttttatgatctatagaaaatacatataattcattgggtgaggttatcagaaaactcatcatttgatgatgtttatgctaatgctgtgaaacacttggaagaacttgtttcgaggatcaaatgcatgaatccgtgagttaactattcccttttctacattgtgtgtgtgtgtgtttttctttccgatcagttttgtatctctatcttgagttgtcttcttgtttcagccccaagctaccttatggatcagtggacttgcacacaaatcaatttggcactcctttggaaaaatcaagcatgacaagtgatgcatataagaatgctgtacttcaagccaaagaacacatactggctggagatatctttcagattgttttaagtcaaagatttgagcgccacacttttgcccatccgtttgaagtttatcgagctttgagaattgtgaacccaagtccttctatgtgttacttgcaagtcagtgcttctcatatatcacttgtttcatctccttaaatgttactttcctctgttttgcttatcttcatatcttttacacgaacaggcaagaggttgtattctagtagcgtcaagtcctgagattctcactagagtgaagaaagtaagcatctcttttttgagaatcttcttgttgtgtataatagggactaaaacagggttataagaacactttcttgattatgtaaaacagaacaagatcgtgaatagaccactagcaggaactgcaagacgaggaaagagtttcgaggaggatcaaatgttggaggaggcacttttaaaagatgaaaaacagtgtgcagaacacatcatgctcgttgacttgggtcgcaatgatgttggaaaggttagtctgtttctcaggatcaaatctggtttatatattcttggtttaagcaatgatgaaaaacgatcaatgatcattaacttacgtacttctatgccaatcttttctcttacaaagaatatttcaaatttgaacatatagtattgtctaatatctcattggctctctctgggccttatgaaaccaggtgtccaagaacggctcagtgaaagtagaaaggctcatgaatatagagcgttattctcatgtcatgcatattagctcaacggtaatacaatattttcttaaaacattgcgatcatcaaactcatttctcatctcaaagtacttccacatagtgttttcactcggaatgtaaacgcaaactctcatcaactttgaattgtgtaaataggtgattggagagttgcaagagaatctgacttgctgggacacgcttcgtgctgctttacccgttggaaccgttagcggagctccaaaggcacattaaataactggctagttattacataagttatcattaccacttgagtgtctgatcgttaagagtatctctcttgtgacaggtgaaggctatggagttgatcgatgagctagaggtgactagaagaggtccatatagtggtggattcggtagtgtctcattcactggagacatggacatagctttggctcttaggaccattgtgttcccaacacaagctcgttacgacacaatgtactcatacaaagacaaagacacgccacgccgtgagtggatagcctatctacaagcaggtgcaggcattgtagctgatagtgacccagaggatgagcaccgtgagtgtcagaacaaagctgctgggctagcacgtgccattgacttggctgagtctgcattcgttgataaaagtgatacaacaatctaggtttcttgccacacaagctacgtcctctaaaataaattagttgatatatcatttttattatttttatgttgaatcatgaattacggggatatattaagttatattcgccagtataaattaagaaatatatttctaattttatcaaaatctcatataatggaatcttatttcaaattttcaaaatttaatttttcatgtccataatggttgttgttatggttatgctataattggtcaattggacatatgtgaagtgaaagagtcaagcttttggttcaggtcaataaaaattgatatctatcaattaacagttataatattagagatgttttctaatggaataattaagttctagttgcctcaaaggtttgagtcatcatctcgtgtgaataaatacattatacatacaaaacaaaaagctctttgtgatagtagtagtaatacatgtcgcaaacctatatgatgaaatgaaatacgtggtaagccgtatagaaacccctatggtaccaaatattgaaagcttttttgtagtattttcaatcttgataaataaaaaggtaaaagaaatttgttattcacgaaaaaaagttgttcttttatagcttgccaagtggccagatagacgctatatgctaattgttactaaactactaatccaagtggacgaatgaaataataacacaataggtacacataatttatagacaaaactattaaaagaaaaacaaaattatccaaaaaaagaaaaagatctggtcacgtaatcgtttggaatagactaaggttccttccttcaacgtaaacaacgctcattgatacacgcagctgacgtggacggatcattctgccgacgatggcctctggtggctcacactcacacttgaccttacctttttgtttctcgtgtctctctgacttttctttccacctgagtttacagtttttttagttgttattatgtgcatttcgttttccttatcaaacataaatcagatgttgacacaaataatatcaaatttgaatctgatagaagatctttccccaatttaccggtcgttgagctttaagcactagaggcgtatgtacataatcgtgaaacttgatatccattgagccttaatttattactgttatgtttttcaagaaattttttgttgattgatgatactataagtttagcaagaattatccataaagaccataacatacatgcttctcgtgagttcacatataagaagtttcttttagtatcagtcaaccccgcagccctatggtttattatttgtactcgtttaaaatgggatgctaaaattctctaaatggtcatacaatattctcaattattcaaatcgtacctaagatataattttggtgtattcagttattattgcacttataatacaaaaaacatatgttgcatgaagctagttatattatttttttgtcaatgacatgtattattttgatttaaatccagatgattacagagtaacaaaacaagtacaaacactagactatatttctgattagctaatctgattttcacaattagtaaattgaaaatgaatatagatctcggatgcgaaatcatttgacaattcgctaagtgttctatgtaggttaggttttttcccccactttcgtaataagacgcataacatcagcatatgctttaacatgttctgtaacagagtccaaaaaaaaaagttatgtaactatttacgaaaacgtaacggttattattttaattcaaacttatatagatggttaacatgttctgaattcatcgatggtaaatttgctaattatctttaaaaaaaactaatacaatacaattggcggtatgcgagtgctcacatggttaaaatcggtcggttcctctatatccgcctttaatttgtactgtttaccaagcatatctcatttttatagaaaaaatgtctggaaataacactatttgattagtccgatttctgacgaaaaataaataaatatatattagtccgattgctttctccaaactactgttgcctttattttttgttcaaactaaatacagatgttctttgaacatagttctcaatttgattaatacatatacaagtagactgaatggaatttagagagagtaatgtgcatcacacttgacaaaaattaaataaagacaagagagtactgtgtttgacgcaatttaggtaacaccgttattctagggagactagagctgaacatggattgttgattaagctctcacatatgagataaagtttaattgctgtcctgtatacaaaatttgatttaggagtccatgtagcaaatatttaatggttgcaaagggcaaaactcttgtagacaaatatggataatttgcaatcataatcattcataaatgttttgctcacagtagtacagataaaaataaaaagtctattacggacttattgcaaaccgataaaccaaatgttgaaaaattttccggtaaaccaagaaaagttcagaaaatcatgagactaaacaaaaggaaaatacagaatgtattaaaacttttgaaactcttgtggattatttcctataaggctatataatgcaccaaaaatcaaactgatcatatattatgttctagaataattattccttggaaaagacgtccaaaacaacatcatctcaaatgttaaaattcaacaagaaaaaaaaaaaagagtcattatcaatgatagatattatttatttgttaaaaaatttacacatcagctatatcgtcagcatcgtcaaatttttgttttcgacgacccttttaaaaccctcaaaaataagtctctaccaaaaaacctctctctccagaaaccaaatcacacttacatcataaatcctctgtacataacccaaaaaaaaccctagaaacgaagaaagatcaagatgggtttgattagcaaagaagagataagcaaaacaagaagatattcatcttctctttggagaggtatcaaaacgatctttgttctcttcactatgtttctctctttcatcatcttttctgctccgatcttcctcgccgtcgccgacgccgtcctcccctccgcaatcctctcatcctcctcaccctccctcaaccgcctatctccttctagttttccggcgacgatttattcttacctcagtaactacgatttccgttactctctcatcgacatacctctcatctccataattagatctgccattatactatgtaagtaaactagtaaagtaacacagtaaattatttaaggaaacttaactttgttctgtttttctaaatatggaaactcttttaactactctgttttgtactctgttcttgtttaagttcgtattttttttgtaaaaattataattatttcagataaaattcagctcgtgaaaatagcatgtgccttaaatttctgctagattttcggggattaatttcaatttccaaagagtactatttttggtctcatgtgaaatttttattagaatttaaatcggaaaaaaaatcataaagatcgatttttatatttgctgatgacaggcgtttacgggctttgtgacggaccaaagttatcaaggggaccatatctgacaataacgatgatatgctcgatatcttcactgatatacgtatcgttcaaggcagcaattgtattcggagagccagtgatcggaggatatttccgaacagaggaaatggctctctttctatgttcttggatcttagccatcggtcacatcgttgtggcgtaccgtacaagttgtagagagagacgaaagctcctagtcttcaaaatcgacatcgaatccgtaagttcactttgatttttcttattttattaacttttagccgttacataaagcattattagcattaaaaaaatgatataggccgtatcaaaattgtttatttttcaaatctagcattagttatttgtttttatatcttaagatattgttcttctaccactaatacagatcagactcggtcagaaatagcatgtgacttcagatattacattatagtcaccgtcttgaattaattttcacattttttttggtaccaagtgttattgtaggtttgaaaatgactagtcaattgagaaggtttgatttttcactcccaacaaaaactagaggaaattgtattttgattagcactttcttatgtataaaatcactttgattcaaacctaattagatagtgacgaataaatagtattaattacttatatataataagaataagaataaatcgacattttccctcgaataaaagaaagagtgaaacggatgtttccgagtgggaaccgtgtgggatgaataatgatggacgactgctttatataatcttcgtatttaatgttactttcaattaaatttttataagatattaatagacatgacaacgtcactaacacctaaaacatggctcatgattttagttgaagtgtgactaataaatatatatattccaatttgcaggtttcagcttgtaaaaatgtgtttcccagatatcaaaaaatcctccaacaagagagactcaaatagctagctatattcgaagtcaatcgtcacatgtacatatatacttacagtacaagctacatgtatataaatatacgtatctatgcaacatctactgggttttggtctcctttcatgttcgaggtaaaaaatccacctcatcattttttttaaccaacttgcatattttaataacttgattattaaatactaaagttgctttaattactatcattttcgaagagtgtgagtcatatatagtggaggtaaccaacttgagaatatttgtaatgataatgttgtttattgtgtttttggttacagaaaagtccaaaggatataatctgtaaaggaggaaggaacagataacgaatggggcttaatatatataacctatgcttttccatgtgagactacaaaagacaactccaatgaattggcagttgttactatactatagattttaaattaggtatagacacaaagaaaaggaagaacattatactagttcttcttacaaatgatccaccgttacacttttgtcctttttgtttgtttgtataaaccatattttcatcaatgagataagaagccgaaggcatctttcttccatttctctatttcttcttttatacctttttaaagaaaataaaaataagaaccgagtggaattttcaacgattataaattcataatactttcatttacttttgtgatgaattcaaaatcttgaagttttcaattctagtatgacacacttcgtttgacgacgacgtcatttgttacaaacttcaatatgattacggaaaaaatatacttaaaaatccacaacttctaggcataccaaaataaatcgtaccaatttgctgaatgggattagtctagaattcacacattgacgatagactaaattaaagtaagaaacttttaccgttacaaatagttctgggataaagataggggcatagggctatagttggaggaattggtccaaacctctgtaatctatatagtccattagatatatgggggcaagggtcataaaagtgaaccaaacgaatttacatcgagacaaccaattttctatcaaaacacatgttttgggctgacaatgacaaaagaaaactttaaatagactaaacctaccctatcctgaggagtcactagagaggaccaaaactgtaaaaggttaggagactaatcaaaacataacgctaacgagaagcccgtagggtttttccgcaaaaaaattgtagatccgctgattcgatctattttgtttttttctttccacgttcctaaaatgttaggttcgtatatgtatgtatcgtcaattgtggaaaggttttttttttggtaaaaaatggtacaatctgtttatgtagcgcgaaaaaagtacaaatgtggaaaggttggttcatactaacatgtttaactactagtttgtaaattcaggtgcatgtggttacatatgcataagcattaacgcatggagagagttcttcatcgtgattgttgatataacaaaggaaaaaaaaatgttacaaaaatctctcaaattaggtttttatcgctttgttattttacttttatatttccaagttttttctggctcactatgtaataataaaaaaaactatagcccattcttcagagtaaaccatgaaattgcaattctctgttttttttggggttaaggataagtggaaaagactattcaggaaggaaagtttgcacaaaagagatcacacactgttgggtgtaagggctttgccattttagagataaaagagtgtaaatacactttttcgtgtattcgaaactttcttagtcttgttcacgagcttgatttctacgtatattgtaacgttctgtaacggattgctggaaagattttgaccaagacgtaggatttggtcacatttattgctatgaactcgtagatttttgataattttcttgttctatttctttttgtttgtgcgtgtgtttgtctcaacaattcagacggtcgagatacagtctagagctttttcacttaaaattttaatgttaaatttcttttatatatattttttttctctttatttctaacatgaacattaaattagaaataaaataaaatgcattacgatttacaaattttgtagtaattagttcataatactaaaaaatatttctttattattataagtgttcttgatatattctagtaaacttaataacagagatccactagtagtcggatttaatcaagttagtcataaataaatattatgttttcgtatatatttaatttttaaaaatataactatttgagaaaacaaaaaacaaaaaaaaaatatcttttggaattttggttggattcaaactagaattccgtttttcaatcatatatttatttatccacgtttcttgctaattacacaacctccaaagatccaataagaccgaatcaagtttacagtttttatacgctaccgataaaatctccaaaagtccaatcattttccccacaatttcctccttctcccgttataaactaaagactcgattttgtgttgattgttcgattcacgtaattaaggagatttttggatcaaaagatgggtagggtttttatggttgatctggaagggaacatctacatctgcaaactctgtaagacccatctttctacagaccaagacatcatgtccaaggtttgatcttttcaatctccatgatctggctcatttttttgttgtcataagtctgattatagaattttagttatacgttttcttcgaattttcagtgattccttctaggatttaccatgtgatttttaatgtcaattctagtttttttaatatatcgagtataaatattggtcttgagtgagatcttcatgtgtcgatccagagtttgtatattttgatcttctctttctgatccaatcattacatacttagtgatgactatagtagtggtacatttaaacttgtgcagtcttttcaatgcaagaacggaagagcttatcttttcaacaacgtgtaagtttttctgatttcatgaccacttataataattatataactctggaaaaataaatagtttcttttcgatgatccatttagtgtaaacgtatctgttggagagaaagaagacagaatgatgataactggactacacaacgtagttgacattttctgtgttggttgtggatcaaacgttggctggaaatacgtaagacaacaaaactaactagtttggtttggttgcaaaataacatgtttgattgaccatggagttaaactttgtttttgtgtttatggtttttaggagtttgcacatgaaaagagccagaagtataaggaaggaaaatctgttcttgaattgtgagattcctttcttgatttttttctttcaagtaatcacatttccaagttcccacataaacacaaattttcacaaatttcggtttgatctcaaatgttgattctttctgtttgattttgcaacagatacaagatttcgggtcctcatgatagcaacgacttggttagtgatggagatgatgcttgattgaggctttttccttgtctagttatctctctctcagatttcttttaaatttgtacattcttgggcctagattttaattcgtttcaatatgcgtagtggaagaccggtttaataattaggggttttattttcatttttttaaaatgaataaatacgcgatcattaacgaatcctgttgcagaggcaagagcaaatgcccccttgattatcttttttctatgagattagatagtcttgcatgcctctattagagggaaggaaatgatgggggtgtcagtttaagacagagttatgagccaacttctttgtggagctcgatggttagtgacaacaacctttcagaattatatatctagatgcagttgacaaattgtaggaaaaagcaaattcagtgaattaagctgtagagccaaacacgggttcagtcttacaaagaattgcctgagatttgctcttcttcttcaatctctagagcaagtattaaagaaattcgttgaaaggtttgctatcacattgttaacaaaacctacgaaccttgcttccttctcaggaccaggaacaagattttctgcttcattctcagcatcaggaacacgattatctaaaagcagacgtggatacctgaatttcagcctttccatccaatggaactgtgaacgcctttggtgggagataagagaagtagagacaacatttcttgtaggcaataaccctaaaatcttgtagagcagctcttgtggtagttcgcttagattcctgcagctcttcttcaccgctattttcatgtcacaacacagtttgtctgcaatttggtaaagtgagatttaggtttttctcttcttctctccgcaatttggtaaagcaagtgagacttaggtacttcattaattactgaaaacaagaaaaagaagaatccagatagtgtggatcaaacggttggactttccataaatgatcgaacggctgggcatttctacactcatgtagggtcggacacgtgccttacgctcttcttaaatacagggatacaaatgaagaaggcgctcaccacaagacatcctccaatagatgtttattgtatctgtagggaagtgacagaggtaatggagaaattgcatgccgcggatgctgaaaccatccctcttgccagcaatatacaaatggtcaacatggtgaataactacgtaagttttaccacatgtgaatcttgagcctttttttctacttcaacataattgttccgataaacataagttttggttggatgtttctaacaggtcattatgtcctacgggcttcttcacgatgattatgaatacggagccataactgagagttgccgaaaggatgtgctgctcttattgagggagttatttccgaggaaaatatatttgtgggaaaattaattccatcaacaagtcagtctaattaacaaaggactagaaattgtaagtttctttcggtgctaaacacatgggccaaaccttagagccaacatccgtgtttatactttgactccttattaaggtgcctcagacaacaacttttgagtttggctgatataagaaatgttaatttcaaagaatttgattgattttctttgtttttgtgaatcttggtctcttgttcattcggatgaagaaaaaacttgaagacgatattacaaagaaacttctccactagcaaaaataataacattagctttgggcactccactgtcttgtccctgggcttcgatcttgcgcactacttccatgccagacaataccttcccaaacacaacgtgatgtccgtccaacctttcccaaaacagaaagatttcataatcacattgtcggaaaacagaagcgaaactaagactgaagataagcaaaattaaccatcacgcctgcttaccaactcgtggtgactgttgtgatgaagaactgtgaaccgttggagtctggtcccgagtttgccattgataaaaatcctgaaacccattcgcagactcaatccataagcctttcgttgagtatgtattgagtttattggccatacgaggtaagctttagcgcatacctggcccagtgtgtttgagtttaaagttctcatctgcaaatttatctccatatatcgactctccacctcgtccatcgcctcgtgtaaaatctccaccctgaatcatgaagccaggaatgatcctatggaagctacttcctttgaaataaagaggtttccccatgtttccaactcctttctctcctgcaccgggaggataaacatcaaacgaaaagagtctcttggctcagaactcagaagaagaaaaactaaacgccaggagacaagagttttaaaggggaaaacaaaggttacttggctacccgtgcaaagtgaccgaaagttctctgcgaaagaaactgaggattcagtaaggaagaaacaactcaaggacaagtagacaatacaatgtgaaggtttggtcgatctaaatttaaaactttacctgcagttttaggaactatatttccaaaaaggccgatgagaatgcgccctgtacatgaaagaagatgcaaactttactacaaactctatttgcataagctgcagaagatttctgaagttgcaaactaattctaagactaacgttttcatatacacagtgcatccacttatatgaataagcaaccaagccactttcggaatttgaaacatcctcaaaacatccatttgcatcaaaacaacaaattcacatataaaaatcgaatttttgaattcaaactcttaagtaaaatagaaaaaaaggaggaaactttaaacctgctggtgaaccattgatctgaatgtcaaagtaaactttgtgtgtaactccttctaaatcctctcccacctcaaaattttgaaaaaaccccaaatttagaaaaaccatcataaaccagacaatgcaatgagttatgtgcacacctgattgagcttagcatcaagaatcttctcattgacactaggatctgcaacatcagtcaatttgatctacaagaagccaaaattgaacattgaagccacaaacgtaagccatgtagcagacccagatcgagaaactagaaacagaattcaaattaacctgaatgagagcaagtgtgacgaagaggacgacaatccataagagagtcagtgagaccaatctagtcgccgtaattgccattactccttcgtctttgtaatttgggaaatgggtcaatgaatctgcagaaactatcaaagatttaacagagtagcagaaatttagaaaggtaccctcatattatcaaaatctttcaacttaaaacttataaaacaataattttcatgttagacccaaacatttcgacgttaaccaataagcagactacttgcaactttgtcaacgaatcattatttataaattataactttcagaatttgaaatataggtttcgaattttattgtttggtcagagcaagacaaaaacttaatcactcaagaaaagaacttaatgaatagtagtaccagagacattagtaattgagagcaagatcccaatagtgagcaacaccagcatcattgaaaactttcttggcatcggatttggtcaagcactcttgtacatgaaacctatgaaaactcggtttctcaacacttccttgccaaaccaaacaacacttgtttccaccattctcttcttcatcttccttcttctctgcttcttcccagtttatacgcttcagcatcagcttctcgtacctatttattgcttttctcttaccctcaaccacaacaacactcattccatccatcatcacactaaaccctgttaatatgttctgttttgcattcatcctcactttgaatcttgttttcggatccgatagcttcttgttgatcttgtacaccgacacaatcgtctcaacaactgtcgttggatcaccaaaaagcttcctttctttcttctcacgtttctctgcaggagttagcttcctcgctacgttcctatccatgtgagcttgttcacgctcagcagcttctgtgcggatctctttttcaagcttggttgggttttgcgttgcttcagacgcacgaaccttcattaggttgctcattttcacctttgatttttgtggttcaacccttccttgactaatcatctcccgtttctccatttcttttgccacacgccttagagttcgcagtttcttccgttcctcctttgtcattttaagaggttggggaggtggagacgcagcctctgcaggtggctctatgggaaatggatgctcaatatgacaattaaaaactttcatattcagatggttctcagtaatggtgtccatgatgaggatgtttggatcacacgacaactcattaatggtgtcatcggtgaggatctttgcatcccaccactctacaaaatcagggattggctcttcttctcttgtgacacgtttgtattcatatcagcatcctctgccttttttcagatgcgattgcttctccttgaaactcatacgtttaggtggagaggcccatatcttatatataccaagtattaggccggaccgatgtggatcgggttgagtatgtgcggatcggactctgataccatattagactgtgggcttccaacctaaaaccaattggcaataggtggagagacccatatcttatatataccacttaagatcttactcaacttccgatgtgggacattgtccctaatattaaccatcaaagtactatgattgatcggtttagtgacgctaatcacatttccgtgttcatcgatttctcttccaagtgcatccacacgcagaacaaagcccttggtctgtttatgtgccaagtcctgaaatcgcttaacagctacaataatttgaccagaagtagtttccgatgcaatagaacaagtatacggcctattctcaaacctagccacatcttcaaacctagatttcttgtttgttgccctagccgtcccattctcttcttctctatctttcctcttactaccttcgtgagacctctcatgatgatgcttagtcctatctctctcatcacgatcgccccggatgctcttggagtatctctccttcctgttatccatgacgagacaaatttaggggaagtatgaaacgaacgtgagaagaaagaaagaaacacaaaggtattttttttattgatcctatcaatattcctaattcagccaagaataggaaactttataccgttttcctttatcgtaaaacgacacaccacgtttttactcgaaagtcgaaacttattgacagaaaaagatatttcccaaatttaagactttatgtaaacgaatgccctcaaactattcaatgttttattttgaggcttatagttcacaagttagagctcaaaagtcgaatctccgtaccccaatgggcgaacgacgtgaactacactactctgactctcagtgatattttgacgaattattattttctatacaaacaaaatattcagtatatatttattgttatttaacttctttatcatttatttttgtatatcttttttttttttgtcacaatttttatatatcttttccacattaaaatataggcttcgaattaattcctacttttcaaaaagaaaaagaacttatctagttaattaatttaaaagtattaaaaagaagtaaaaaacacttaatgacaaaaaaaaagctgccgacataaagaaaaaatccacgtggataaatgtgtcataacacgtaatgcaaactcatttctgcacatcccaagttttatggaaagtcactattaacaatcaaaccgccaacgagaaaacaaactaaaaaatttcaagtccgatcaaaaagacaaatccctaaacattgcagagatcatttcttcttcttcttcaatcatcaaattacacttgaggaattgttcaaatgtcgaagcaaacatacaaagtctgtttctgtttccgtcggaggtaccgacacactgtgtccgtagctcctgctgagatcaaaacacttttcgacaattactccgacaaaggtctcatgactaccgatctcctcctcagattcctaatcgatgttcagaaacaagacaaagccacgaaagaagaagctcaagatatcgtcaatgcttcttcttctcttcttcatcgtaatggtctccaccttgatgctttcttcaaataccttttcgctgttaccaactctcctctttcttctcttgaggtaattcgattttagattgaaatttagatttagactgaagataaatttaaagagagattgatcgttgaatatatttttgcaggtgcatcaagatatggatgctccattatcacattatttcatatatacaggacataattcgtatttaacaggtaatcaactaagtagtgattgcagtgaattgcctatcattgaggcattgaaaaaaggtgttagagttattgaattagatatttggcctaactctgatgaagatggtatcgatgttcttcatggaaggtatttattacttattagtaatgtctctgttttcttaaagtttcgatttttatttgttctgatcgaagttaatgattaatacaggactcttacatcacctgtggagctgataaaatgtctaagagctattagagaacatgcttttgatgtatctgattatccagttgttgttactcttgaagatcatcttactcctaaactccaagctaaagttgctgaggtgtgtagactcttttgcatttctgtgacaactttttggctttagtaattgatggtagagatgttgtgtgtttagatggttacagatatatttggagaaatgttgtttactcctccttcaggggaatgtttgaaggagtttccatcgccggcgtttttgaaaaagcgtattatgatctcaactaaacctcctaaagagtataaggcagcaacagatgatgatttggtgaaaaaaggaagggatttgggtgataaagaagtttggggaagagaagttccaagctttattcgaagggacagaagtgttgacaaggtttgtgtaataacacatcttcttcatttagtctcatcggttttcatgtgttttttctttcgtccttgttttagaatgattcaaacggagatgatgatgatgatgatgacgatgacgatgatgatgatgatggtgatgataagattaagaagaatgcaccaccggaatataagcatctgattgcaatcgaggctgggaaaccgaaaggcggaataactgaatgtttgaaggtggatcctgataaagtaagacggcttagcttaagtgaagaacaacttgaaaaggcctcagaaaaatatgctaaacagattgtgaggtatgtttcgaaaagaacaatttctgtttccaagtgtctttagaaactctgttgatcatggagtactaaataatgtaggttcactcagaggaatttgctacgggtttatccgaaaggaactagaattacttcatcaaactataaccctctgatcgcttggagccatggagctcaaatggtggctttcaatatgcaggtttccttttaatatccacagctacatatagttgtaagacaaactgaattcaatggagggacttgggagatatgaacttttccttgtgcagggacttggacgatcattgtgggtaatgcaaggaatgtttagaggcaatggaggatgtggctacattaagaaacctgatcttttgctgaaatccaacgctgtatttgacccggaagctacattacctgtaaaaacaacactaagggtcagttatctattctctgttttggtcatatgaaaaacctcatgaacttataatgttttcattactttatacatcttttaggtaactatatacatgggagaaggatggtactacgatttcccgcatacgcactttgatcgatattctccacctgatttctatacaagggtattaaaatgctgcaaccttggaggttttactagttttgaggtagaagctgatgcaacgttttcaaacatttctcaggtcgggattgctggagttcccgcggatacagtaatgaagaagacgaaaacattagaggataattggataccagcttgggacgaggtttttgagttcccattaacagttccagagcttgctcttctacgtatcgaggtacatgagtatgacatgtctgagaaagacgattttggaggccaaatttgcttgccggtttgggagctgaggcaaggaatacgtgccgttcctctccgtaaccaggatggtgtcaagtgtagatccgtgaagcttcttgtgcggttggagtttgtgtgacagttacaagaaatgctccatttttttctttggtttaagcacttttaaacagggttccagtacatacaagtgaaccgagtttgtgatttcggttcatgggtttggttattgtgagaatgtgctttattggttaaatggttttgtaatgctgagattgtgtggagaaaacaacaaataattatatatatgctatattgctatttatgtcaacaagaattgttctcaaatctcaagcaagtattaccatcattgaatcagacatcaattaaatagttaactggagtgaaaaaaatacacatattaattgatattgattcattgagtttatacattgtatcatatattttccaatttcgtatcatattttttttttcaatgttagatgtttcattaatgatgtccctttatatgttccattgatgatgaatttattgataaccaaaaaatgtatctttttagttatgttattgtcttgacataactaagaaattgttttgacataactaagaagtatacaatctggtttgcaatcaatttacttttgttgtgttttttaatcatttttaacaactcttttatttcaaatgaaaagtcaattagttggttgtcaaaaaaaaaacaaatgaaaagtcaaatactttggtcaattgttttaggtttagttgagtcaaatggcacctttttgataaccacatacatacaaatcatatttatagcaaaaattgaggggaaaaacttcaatgggtaaagcttttacaattctcattcaaaaatggcaaagtagttgataaacttcatttctcaactcatgaatctctctatttcaagatcttctacaacattttctaatgcatacaacatccacacattgggataagccaaaagataacattagatgttccattaatgatgtccctttaaatgttctattgatgataaattaattgataaccaaaaaatgtatcttcttagttatgtcatttactataatcgattgtgggttattttgccattcttattccatagttactaatatcaaatttactagtatcaattttcgcctactctacagaggaccagaccataagcgaatttgacttggtcggcatcaaaatcattaagacatgttaaataatttttctttttttctttattaatcatggaaaatataaatctggttctgtaatttctcttgagtgatgtttctcatttatttaccagaaaataaataaatctttgttagattcgatagattaactagtgagatattatgctcattttgatcgatctctgtttgatatccatttcagttttttgtcgttcgaaggttaagatgatgttccaggacatctatctctggggaataaggaataatgatcctactaacttgatggtggttgccaaagatttctccaaatattttgagtcagcccttgtccaattggatacaaaaaaaagataacaatgtcttgttagctctccctgaggcaccaccttctgtgtatggatgtggacttccttattcacgggaggccttccaatcaatagcggatctgaaagcagtgaaccgggttgagattagccaaaagataacattagatgttccattaatgatgtccttttagatgttccattaatgataaattcattgataaccaaaaaaatgtatcttcttagttataatctttgtcttgaatcgaagaaattgatctgaaattctacaatcggatctttttaagtctttttttaaataaactgaattaataaaaaaaaaatgaaatatttatgtaaatgaaataaaatctggtttttatggtaattaagtaattgtaacagattattccaaaaagatttatactttcttaaaataaatagagtattaaattatatatattgttatttttgaaaaaatatattaaattatactacataatgaactcctatataggagatgatgaatcgaagaagagagagtttacaacggcaatctaacaaactttatttgtgtaaataagtgttgtacatagctcaaattagaaatgtaatcatacattagcttatatacttaagattaaatgtaaacattgaaccgatataaggttaatcaataaccatagataatcaatccaataaccggagataaagtatactcaatactacatcatcatttacactaggaaaatacatgctttcaactttaaagctctggcgtcgaaatttccaacaaaataacaacacatggacgacggcagtttgactagattacatctatacttcattcgaatcacacaaaatgagagaatataattaaaaaaggaaaaaatccttaaaaaaactcaaactaattttaatttggacgcttaatacctaatacttttaaattaaaataaaaatatcttatttaattatttgtggttataaaatatttcatatataaactattggtgaaatcaaacccgagatataacggccgttgacgagcgttacataatcatttaacgtcgttaaattttaaccatacggatatatacaagctgttttatatcatataagatgatatcgttgtggtccagtggttaattgtgtttaattctacctgcaacactcgggttcgaatctagataaggtttttttaatttttttttcttattctttccttccccgccgcgaccacttcccagagagatgataccttcatctaacccatgaacaagagcctccaattccgaaatttcaaggtttttagactcttctgctcctagatcgatctccaatcaccacatattgttacaccaatatcatttaattatagctctcgtatatccaatcatcttttcattcacctaatctttacaataaaccctaaagctctcatccccaatcgcaaaagaggatgaagaagaacccccaccctcaagagagtagggattttataattgtgaccaaattaatcctccaattgtgctatcatctccgggatggtggtcgacggcggcgctagggcgaaaaagaaaaaaaaaacaaaaatttaatatttaaagattctgggcagtctcgaacctagatcttgctgatagtgaattcagcattttaccaacagaccacatcgattttatcttcatttcaggaaataaattaaatatatctctgtactatggaggggttaaaatttaacaccgttaactatttacgttacgtccgttaacggccgaatttgattctaccaataatatatatatatatgaggtattttataattataaataattagataaagtatttttattctaataaaaaaatattagatattaaacgtctaaattaaaattagtttggatttttattaaaacttttcctaatacaaaaatccacgacagagccattattatctacacataaattaaagaatacgttttgaccaaaagaacgacatcataattctcatacaaaacaataaaccaaaaattccaactttaatcattcgctctccgctgtccaaattatacatttcccaaccaaaaaaggttagaccacgactattgaatattcaacttctcctacgcagctacgctaaactatttacaaaatacaaatgaaacaaagaaaaaacaaaccatctaaaaaagcagaaatatttaagagaacaattaaatcttcaaaaaaaattcctatgtaaaaataaaaagagaagagactcaatttgtttgaatttaatctctcaatcagagacaatagaacaaatgccactagagatactcccatgactatccccacacaaatccaatgctctctccaaattccctactatatccgtcattgtcggcctgtttctcccttccgcattcacacaatgcatagccgtataagccaccagctccaccgcatctccttcacctagctccggtgatccaactctcggatccaaaattgtactcaactcatcagccgttatcgccggaaccgagtaatccaccaaatgcaccggaacacacccttcctcctcctccacatcaccattgttcctaaatatcgctcttttcccggtcaacaattctaacaacaccactcctagtccatacacatcgctcttatccgttaaaacattaagactataatactctggatcaatatatccgaccgtccccgcagctttcgttggacgttgataaggattatgatctttccctagcaccggacccattaatgataacccgaaatccgaaactctagcgacccaattagagtcaagcaagatgttagacgacttaatatctctatgaataatcggtggcactgcgtagttatgtagatactcgattcctctagccgcatctaacgcgattttgatccgcattttccaagaattgatcaagctactatgtttttcgacgttgttcttgtcgtgtagatgatcgtaaagcgcaccattcttcatgtaatcgtaaacgagaagcttctcttctctttcttcgcagtaaccaactagtctcaccaaatgcttatgatgaagcctcgataaaaacgcgatttccgaatcaaacgcggtttctttctcttgaaacttcttcatcttcgcgtttacttccccgcgtttgatcgctacttctctcccgtcattgagtttacctctgtaaacaacaccaaagctccccgaaccgattttgttctctagagagaagtttccggtagccgaagcaagctcggagaacgaaaactcttccgctttatcggcgtgcttcatcgacgatgttccacttctctgcctcctcattgatagcattctcgatccttgacgtcttatagataacgaccggctattcgaactgttagaccggctattagaaccaccgcgagttatcgtcggttgaaccgagttatgaactttcttcttccccaagcaaactccagtccataaacagtaaaccacactacagatccctgcaaatgctccaactgatccaacgatcgcaaacgctaataatcctcttgttaaagctttcgacggtggagatgaagttgacggtgatggcggtggtggtggtggtggtggtggaagaggaaattgactcggaggactcgctggaaattgaatcggacatgatttacaaatcgagccagtaccagaacagagcttatcagattgtggataaacaccacaagagcaaagagaggatgatgatgattcaacgcaaggacctggtaaaacttctgggaaagggaggaagattctggagaaatttgtaggattccaacacatgattgagagattacttgaaatcaacccgcaaattagacccggacccgaggaaatcgattcgaaagagatcgaatccgtgacattgttgaatctctctgctcctccgccccaacaaaccacagaattattcgagattcgcatcgcgcaggtgaaatttgatccgagagagagagatgatgagtaaaggttaggttgatctggagcaataacattgagctgaccagaatcgttgtttccgatgcaaatcaaattcccagtagtgtttaatccacaagcgtgtgatttacctgcggagatggtcaccatcggcgtgtttccgaatccggtttggatctgattcgatttaaccggatcggttccccagcaaaggattcggttatttcgaatcgaaacgccgcaggagaaaccaacgccggatgaaattgatcggaatctctcgttcggaggttttgattgatcggaaacggaacctctccagcattttaaggaatttgtaccgttaacggttgcgcagatttgtttatccccgacggagagagtctcgagtaaaacgttgtcgttttggtagattcgtttccggtttggagagtagcttccgatgttatcccaacagagaaggctgtaaccaccggagcgtataccgcagaggaaattatctccggcggctattgaggagaatgagacgccggggtttagagtgacgttgatattaagacgcgtgtcgtaacagaggatacgttgtgtgggttgaccggagatcaatgcgcagacggtgtcggagccgtatacgactgcgtaagttgagcctgaacctaaggaggtgacgggagacaagaggaagaagatgataacggcgatggtgacggtgacggaaaacgtcacggttgagttgataaacctcttcatctacagaggttgaagttgactggcgtcttcgtcgtcgattctaagtcggattggttcattttcagaactcaataacaagactcttgtgttagaagtaacgagagaagaagaagaaagaagaagaagacgttcgtgagatttattagagacaagacagtaattagaaattagtcagaatttgcttaagaaatgcgtttttaatatgttagagtcacgtttttttgtctttgattttgatttatttatttattacagcattaatctaaatgttaaatcttctaaaacagagtaattatttgaatttcaaaaaggaaattcagtatctttatgtaaatataacaagagtgttaattggtaattaattaagatatatttttacataacaaattttctttactaccaccttttaaagattctcaaagaaaatttgatatgaattatttgggccgtttcaatatttaaatacaccacaactactacgttgtatatgtgtgtatataaataatgtggtgatttatattagtcatgcaacaaccgctcatatgctaagaaagtagtgtgaataatataaagaatattaaattgtcatgcaaacagtatagtatacatatttcttatataattcaaactataaggtctatgtttccaaaaatgttttttttcctgttctgtgaagttattaaactgtgaatttctgtttgttgaactttccaatttctgtgtttgactaaactatgcatatctagagtactagaattttcaatataatttatttttttcacctagaccttcattcaaaacctgtcaatcttaattttcaatattaattgtgattgtcaaaaaaaaaactgtccttaattttttttacagaaagttagaataatcattttaaagtcaaaattatatatattttgtttgtcaataagatcaatgaaatattatggtaaaagttagatagatcaattttctttaaaaaaaaaaaggttagatggatcattaatgaaaaaaaatattaccctaaaaccaaaagtatatttgcataaattgcatacactatgttgatccatcaaaaacttagcccgctagctatagatgtctccaaatatacaacttagtatagtttgaatacgataaatgaaaaaaactatttcttttattccaccaaatttgatgttatgaaatttttacacaaattaagaaaaacaattttatattttaatattattgttttgttattttaataatattaattatatctctttttttttattggtcaacaatataaataataatcatcaatttttgtggaacagaaaaaattaaaacatcaaatttttaggaagagagagaatattataaaatatgagaatgccaaaaaaaggttttttttggagaaatgaaggaaaggaatgattcctggattctactaacgcgcacgtactttcttagaatcttactagggatttgtaataaagaaaattgattgacgaaaagtgagagaggaaatgataaactgaaaacgacagtaaaattgtaaagcaaaaactattcaatggctcatggctgcctatatttgaccaaagaataacttctaccgaattctttcaatagcgtgatctcgttgatttgtagtattgagctaaaattcaatagctatgcatggtgcgcttcaatattgctattaacttgttcaaaataaattagtgacatctttccctcagtattattcaaattatatgaaagaatttgaagtcaaagctgagaccagacttagatggagacggagacttgggagaaaccttctctgaatcttatgcacacatcttttttcacctttttcttcatcataataagttttgaaacattgtatcccctcacctttatattaattaattaatatatcatctatcccctttgttttgatatttatttactcaaatttagtataaattgaatttccgatatctatattaatgtgtctacatgcatgtactgataaattatatattgaaaatcatgggaacatatctactactacacacacacatttgcatgaacttcacgtcctcgaatatctttttcttgttgttgtttaatgtataaatgataaaaaaaattgtgatttagtggcaatatgatactataaaaaaaatggtattagaaacttagaacaatcatttgggaaaattcaagtcgattgtttgctaggtcaactataataaaatcagtgttctaatgatgtaatctaacaatccagggaccaaattgaccaagtctaaattaaacatatgtaatgcgtcaataagtatttttggagggtaaaaaataaagcttttttgtttgttttagattctcagaacgcaagatatcaatggaaagaagacttcatggtccagctcttagaccacgtaccatgtacatagtgttgtaatacatcatgaaaaagaataaaaaaaaatgtaaacgttttagtattttttgaattatatacaagaaaatgtcgaaccaaaactcatatcaatctttaaatttctagtaatcaacctagattgaaatcataatgagacaatacatatcatgttctccaactctagtgaaattttcaactactaaaccaccataaatttgttattcattagtactttttactcaattttcgatatatatgatctattgtagataagtctttcatattttgttatagaatacttttttgccaaaacccggaggtgaagaatcaattaatcaaaaacggtttatttatttatacattggtaaactgatttctaaaaatatgtatatctgagtccctgagtgatctatacataggctgcagttttcataaaaatttcttatctatagttaagcgtgctgatttgacaaaaaaaaaaaaaaaaaaaaaaattaagcgtgctggtattcgttgcagtagttcaattccaaaaagtgacatatgcgacaaataatgtcaaaccgtacaacaatatattaggtagagaactaaattgtcaaaccgtttatactgtttttttcatgacaataaccacgtagtacttcccttttctaaagctaatttatctaatgaatttcgtactgttcaaactttaaactgtgagttctgcattattatttttcaaataactaaaatgcatgcaagactagttctaaaatcttgaattaatagatagatgagtaaatgcatgcatgcatacgaaattaattcgacacatatactaaaactcatcaaatctgacctactaattaatcaactcaaataaatagatttctttaacatgaaaaatatctgatttttttcaagaggaattctgtgaaagtaatgtatgtgtctccaatctctcaatgcaatttacgaacttccatcacgcgtctttgttcttgatattggtttccagctgaaattgagaaaaatatagtataaaacaaataaagtaactagcaaataaaatgagccgaaaaaagtaaatttcatgggagtagttagacttaatttagatgtgcaaaaagagaagccttcgaagtcataagcacagctcacaacgatccacttattattaacaacaaacatgagaagggccgaccataaaattaaagattagttgcaaaagtacatttaattatcagaaataggaacatgacaggtcttgtaatgtacctcacgaactcttttgacctgtaaacaatgtattaaaagagtattgtctagggaaggagatagtaatagtgtctgcgagctaagattaggaacattgccaatctttctcaaacactttttgctggatcctgacataactttcaacccaattcagaatttcagtctaatacagatactttttgctggatcctcttcaaaaagaatgttatattctatagtatgtcacttatcttaaaatctggatgtgaaatatctattagactaggttattggttaagcattctgtttagttgttaaacatattcattctgtttagctaattaagttagtaattatatacttgtatatacggagatttattcaattagtaacaagtaattatcattgacttttcatgttctaaatgttaggaatgtaaatttgtctcatatcatgtatagtaagtaaatttttgcttattatcataccagcagacccagtttctacttcggttgaatccataactcggtattatccaaaccgaaccaaccagaaaaggaaaagaatgcttgatcattaacaaaaattacagagaaagctacagaatttacttgaaatcaagaatgtgtgaagagtttatcgtttaaaaggaatctaccatagattataaacaatacgaatggtgccttccttctcctgtggctttcattgctgaaactactgtaccaaacaagtcctttgccctttttgtgtggaccagagacctctgataattcggttacgttccgcttaaccggttaaggcttccagcacgaaggtggtatgccttgcttctcaaaccattcaggcatgcggaaccgatcataaagtgtcggtcgtacatcgtcttcctctgacagttgcttcagaagcggtagaataacatccaagagcttcaaagtttgataatccgattagattccaagagttaataataatcttaagggttgaaaattgtatgagaagagtaacaactaatagagacctgagtatcatttggctgccctgcggaaaatgcaatacatggaattccatttgatggttgcaacaaaaagctgaaaggattgttgtcaacaattactgtcctacacatattctttgatgtgcttaacagatccttcacgtgatctcggtattgcctgattaggaaccacacacaatttataagatctcagtaaccttaccacaaactagtttcttaaaaactaaaacagagcaacccaattcaggataacttacgtgctgactgttgagggtcgataaagtcggttggtgagcactttcctggtatctatcctatccacaagcggcctcgcatatcctgcagacatgaagcatgaattgtcaatggttaggaagttgtggttatgtagttgagcattaatttgaaaatagaacataataacactaataagtaaatcaagagaccttcaagaccagctgtaaacagaataagatctgcaaactcgctgagttgctctaggaactcgtgcaatccaggacgctcaaacaccgtgacataattgatcttaggcttcccatcatattccttaataaaaaagagtgacttatgtcatgatacagaaaatcaacaaagagtgaattaacttgagaagagcatgttctgaaagaaaccttgtctgttgataagcactccagctcaaaccactttaatccggcttcaattgcttgattgcgtaaagcagcgggtaaactcgacgtctcatatgcacaaactaacgtctcatccaagtctagaactacctgcaaacacatcttcagttctcagactactcttaaaactaccaatagctactagactattctaattgactccagacaccataaatctgcaggatactcctgagactcagtaaggtcactaagttacaaattagtttgctagacaatgaaccaaattaagaatcaaaggctccttaatctaataaaacaaggcttgcgacgtcagtgatatatgaggatacagtcaaaacaatgtttcacaagtcaaacatacgtaagctataagacgagtaacaatcaggaagatacacgatattcaaaaggctataaatcaaagaattctcattcccaaacccatatacgctactttcagtaacacctagcattgcttatcatgcatgattataagaatgtcacaatgggaaaagcaataaactcatcaataaaagtagttccatcaacaacaactgctacgttaatgatcaccttgtgagcttaactagagacctgactaccagataactagatcaaactcgaatttcaagtccactttcctattgattaaaaacacttgttttggttaagaattataagcttgagcagtagaattctaccacaggatagtaatatatgtgtagaattgtctatgcagatgttagaaagcaaacaaatttcatctatttcgagtcttgttcctccctaatcagacttccttcacagattctaagttccacagagcaaatatcttcaagcagcaattttcttttcaaaatcaaactaattccaaaaagactttgactgattcaacacataccttaagcctctgaaaacggctgcgtgcaccatcgctgcaggaatcagaagtcgtcgtggctgcgatttcaacggtggtgggagattcggaagccctatcaagcaactcaatagccggcaaaggtttaaaaccatcagcggaggctttagcagaagaagagagaagaggatgataaccaacggcacgaaggatctgaagaaagatctgatagaaaaaagcgagccagttcaccaaagtcttccacacttgaaacgaacgaggagagtatacaacatcggcctgagtcaactcggccataagagagtctcggagaagaatgaaaccaaaattttcagaatctgaaaaaaggtgagatttagaagaagaagaagaagaagagacttgaggaagaaaaagaaagcaatcaaaaatgaataaatttgtaatttaaaatgaattagagagagagagagagagagagagagagagagagagagagagagagagagagagagagagagagagagagagagagagagagagagagagagagagaggtgttattgtgaagaaaggaagaagctatggtggcgatggttcgatgaagtctctttttgagaatgacatttatgaattttgatcctcacgcgctccacttgttgtattttggaatatttttattttagttgtatgttattgaaataagatttaaggaatgatattattatttttgggtaaagaaaagtaaatgaatgttcaaaggctgccaactagatgatgccaaaaagaattaggaaaatgtggggttaagacgattttgttagtatgatttatttatgggcgtaatatacaatatcattccttaaatctggcggacaacgtttttaatcatagcaaaagtgaccaaactatatcaaagtcgttgacatcttttctaatttaaaaaaaaaaaaaaaaaaaaaaaaatttgaagaccaatgtctagtgtctcattctccatattcattttaacaaaatattcaatattttcaaaaactatttgatttcacataaccgatttaacataaaaaaagtttataagatccactactacatagattaatggatggtgctcctttcacaaatgattcttcttatgtagtttctttggagattgtgtttacatgatctgaaagacttataactagtttttttagttgaatgtattcgttaagagttacattatagatgagaaagtgtacatatcgtatattctctgattcttcgtcattcttaccagttacatcttttcaaatctttttctctttgatgtgagaagccacttgcccgtataaacactgattaagataccggctggatatatagtgtaagcgaacgccgtaaaagtcgtgtgagaaagtcgtacatcagtatggatattttgatttttgctttatacctttaattacttaaaattaggacgtaattcgtggaattaatttctcacaatagtcgttaacatctttgttaaccaaccactaaataaaatattatcaattaaaaaataaattttatgcaaaaattttatattgataagaattaggataacataatttcataatataatttcattgtaatgtcctaatatcaatgacgaatcatgttaagacggaatcaagaattatttagttatttttaatcaaaaaccatgactaatagcaaatatataattaaagtgtatataagaccgtttttaatagttgtctctattttcacttcaatggttcttcaaaaatagagatctctatttggtagaaggaaaaatagaggaaaaaatataaacccctattttttatctctatatttagaggaaaaaatagaaatctctataatagtgatgagaatagatatgtgttagagtgaaatagaggcaaaaatagagtttaaggaaaaaaatatggatgaattggagatactagtaaataatgaatactctaagcttggttcatcatttttttataagctgctcaaagtttcaaaggtcactcaaagtctcaaacccacttatatgtttatttttatttgcaaaaatataaaatatatattcgttaacaggaatgggacgtgaaacacacgcgtcagaaacatgagtgtgggagttaaaaaagaagaagaaggaaaatagagccaataggaaaatacagattctttactcattcgtgtatttttgcattttaccttttcgactaataggaaaatacatcttttttaaccggactttatctcggtttggtttgatattggactcggttcaactctcattttgattatctttattcataatcattaatcagtctatctctaaatcatttcgcaataatcttctcgacgattccaattagtgaaaacttgactcattcaaaccatccacgtaatcacaatgtttttgttttgtatttgatcgtaaatgcataattaattaatatgaaccactcattgctaggagaagtcgagacacacgtccacacacacacgagcacatgctagcaactttaaatggccaggtcgctctctctaatcccaaaatcgacaatcatcaagtgatattagaagaagacatatttgtcttatctctaatattatactatcaattaacgatttcggataagtgtaacataattcatgccccgactcacctttagatttgtctcacattaattttcaagtgttagatatatttgcgtggttcggcttcaacaatatacaattatggatagaggcaagtatgtttcaacaaactaatgttgcatgtacctcttaaatcttaataaaatttacgagttttcatcatctgtcactttttaatattaagaaatatactctaaaataagtatgagggatgcgaattagtctcatttcattgatatagacttttcgtttatctccctactagagcccagtttctacttctatttaatttgtaaccaacccaaaagaccaaaagaataacaaatgcctgaccattgaaacgttttggcctgataaatagttatgggcttttaggttctactaggctcatgaatctttatgtatttgatgggccataacttcaattatacataaagctcgatatatctgtcaaatttctactaacgatacatgcactctctaaaatgtaaccatcaattgaacatatataaccttagttttaaaaatttcacaaccatggttactttgataatctgaatctgataatggctaaaccaattttctccaaccatattgatcttgcatttcaactctaactatcacctgagacgataaattacggttgacactcaaagtaccgtgaatccgatagaagtatgtcagtaacaacaacaacgggagatcgagagctgactgatggaacagcaagagaaggcaatgaagagggtagcaggggagctgaagaaacatttgaaaggaactgcgtcttgatagcttcgatggtatttggtactctccataatcttagctttggtaatagctttattcgaattgtacttaatttatcttcttgattagccattggcctatatggagcttttgtttatatgcgtacaaaatttcgtcgattcgtttgatataagtatttttgtcaacgtttgatataagtttatatggctaaaatcaacaggatttgatataaagttttttttttggtagtagagtagccagggattctacgtgttgattattggtacgtacgaagcattgaaaaaagttataatgggttggctgcatttgcatgaggtcaaaactgatcgtataactaatttaatgaaaaggtggagttgatccgaaatgaataaataaaaaaatcatcatctcagatatggaggccattaaacattcaacgctgagtacataaattttatataaaccacatatttaattataaataatttcgtagatactaaccaattgaaaagaatgagagtaatcaaagtcacttggaaagataactcatttcccaaaagctctttatagattcaagacctttaaccaaattaaagcttctgactacaagagatgcaccagccaaaaacagagaattctttacatattagctaattctctatagagaaaagacagcaaatccaacaaaatttgccataaacataaaacatcagtaatattttgaaaaaaatatatatatatatatattagttttaatcaaaacacacaatacttgaacatgtaaacattaaaagaaaaaaacgcatcaaacccatatcctaaaacataatataaacatgctcacataacaaacacaataaatattacagtacttataacagataaaaagaagcattgttcattatttatacaacaagaacgcatagttcactattaacaaatcaaatgtacgcactatcgaggggatttaagttcgtcaatatgacatttgctacgtgggccttgcgtacgaatgaattgacggtaacgatcgtatgtggtggaggagtagagagcaggtgaatctacggtcactagctccttcaatggctcgataggaacattgccctttgggttgtagaaaaatgccaatgacaacctctcattttcagggttcacgatcactctgtgttctacgcttttgtatattgaattgctcagcatctagccaaaaacaaaatgttcaacgttcattaaatattctatcagtccaaaatatagtgagatattgaaaaaagaaccctgaaatatatgaaatcattaattctttttatcaagtttgaacaaccattaagttagttatacggtttatcttttaataaaaactctgatagtccttatattaaactgtttgatttaacaaagcaaagaatgtaatcatagacgtgcaaaaatatcaaaacgaagaaagaagaagaaaattagtctagtttgactaagtctgcaaatttgattttagcacgttcgaaacatgttaatagttgtgagagcgtcttagtcgttgaaattgtttttttctgttcctttgttggaccttttctttttcctttaatagaggcacatgtcgaattaaagaacggaaatgaatatcacgacgtggcttcaccgatacattattggtttcctatcaactttatgttttctttccaattacgcattaactttattaaaaatgaacaagaaaaaagaagaagaagaagaagaagatgcatgcacgtggtttatcaaaattaacaacttcaatgaaaaaaagaagatcaaaatcaagtcccctccacgtgatatttactttcttttgcttatcattgatattttttagtcaataatgaaaaaccaatctaggagttatcatatatgggagttcgatttcaattatggttaggtaatgaaagaagtttaaacaaacaacaaaagtgtccgactttttcgtctgaagtttagtttaaagttttgaagttttatatatataaaaaagtaattggtatatggaaaataaaacagtcacctgaatttggtcacccatgttaacgatgaaagcatgaggagctggttcgactgtgatccaagcgtcgtcggatccacggacctgaagactggcgacttgttcgtccggcaagagaatggtcaaaccgccgggatcagagtgcggagagataccgagagtcagctccggttgagggcattttgggtaataattaacccttaaacatccacctgattcctctttaccaccaaatgcattttgaagtctgtcttcttgtaatcccaagtttttggataagattttcatcaagttctcgcatagtttcaccatttccttgcaataatcctccaatatttctctaataattcaataacgtgaaatttcattaaaatattcgacttttgctgtcttatgattaatttgaaaactttaaaatataagctcgattgacaactataatatgtatcttgctttatgaattataatctactaataaagtacgtcggttttgttttctacgatgattattttacataacagtgaataaaattatttttaagaatctcattttttttttttatcaaccgatattaatttacactcatacgaatcaatcctgagggtgcataagtaagcttagacaagtttaatttttaaaaagtggagccttttaggtatcataactaattaaggaagaagaaattttgaaattaaacataccggcaatgaagaggcaaggaaggccacttggtgtaatccttcaaagacgaaggctggtaatggagataatagtagtcgctccaatcaagaatagcacccttttctacgcctagtcggcttccatatccctcgtaagttttcggcgaattagcatgcatatttttgagttccatggggagattaaagaattctctccatgttgctttagcttggtccatgagctgaggactcatcccgtggttcaccacttggaaaaatcccaattctctacaagcctttgagatttcatcaagcgttttggcttgtagagttaggtcgtccgtgtataggcgacctaagtcaatgatggggatggtggtggtctgagggttgtgtttgttgtgaggggttatgtttggacgctgagatagaggcttgacgtagcgatttggtatggctccgaggttgctttcagataaggattggacacggactataggctcaggccagtcttggaagatattcatggcgttggttacttttaaaaggctctaagagatgaagggggaggacgggaggttgaggatgagtctaggagtaatgagcaagtcatataaatagagaagagaaagctacagagggcatgcataggttttttttttttttttttttttacttataaaataatatgcgaaattaacaatttgtagtggtacacgtttttacaacagttgaaaaatcatcttacttgatatagccagagatcaaatctcatccatgccaaaaaaataaataaaaaaattgtctgttttttacatgactatatattaatgaaaaatattggctcataaaatgaaaacaactagattttaacccgcggtacaccgcggggacaatttattttttaaagttagtatatataaaaatttgtaaattgtatctatctataaaatatttttattttatagtttacaattgttattaagtaacgtcctgccaaactcgtcccgcaaaacccatcctgcaaaaaaaactatttattttattaatgttgatcttatttatgaatcattgtctaaatattttagtcgatgcgggatgttgaacccacacatttttcgccaattggttaatatatgttcatttttaaaattttgaatcacaaaatatgacggaattttttttgagattttttaaactatatattatataatgatgttaaattttttgatatattaaactttttataagtttaaatattaataatgttttataaagtttaaatatataaataataatatttaaaaaaatatatattttttgccttttaggtaatgacataataactctaaaagcaaagatttagaagatttaaatcgttaattaaatatttttatttctaaataattaatgtcaatagcatgacattgtaaataagttcaaatacagaatttatttatttaaacaaaaaacgtttagtaagaataatatttatttaaacaaaaaattttgttttaaaatattgttaacaaatacgtttatgctaattttaagggattaatgtgaagtttgtttgttgattgataatgtgattgacaatttaaattaagtatttaaagtaaaattaattattttggaaaacaattaatgctaatggcattgggttgtaaataagtccaactctaggatttatttgttaaaatggctgcaaaaatgtatatatagattgtttgctaaatactaattcaacccagattactgagtttataattttcaagaaaatatatactatatactaatcaattcaattagtgtgcattaatatgcatatatagcctaaacataaagttttaataagaaaacacaaacgcaatgttttgaataacaatgtatatatataaacgacaaacggggagatctaatggatagatacttaaaaccctatcaatttataaccacagaaaaataaaagcatctagatgaggtcgacgttaaatctcgaggccaattgtcgagagacatttatttaatttctcacgttttgtattagactattttaaataagcaatgccaacaccaacaaaaaaaaaaacctgcatttaaatacagattttggtgcagtttaatgaaattcaaatttcccactacataaaagattgcagatgttgttgttgtttattttttaagtttctatatatatatcaaaacaataaacttatatatatattattgaccgtacatatattttcacttcatatacgtctcatcatctatacaattctttcactttttgagcttgcaacgttgagcttgattcctcccacccagtggatcttactaatccataatatgcattatgggtcgataggttgaggttgtaaaactgttttttttatataaaaaaaaaattgtcacgtgatttatcaaagcaaaaaaatttacaaaaacaaaaatctaaattctgattggtatttttttgcagcaaatatgaaagtgatatgaaaaaaattctactgcagccctaaaatctgcatactaattataatatattctagtaaaggtacgtagagttttagcagaattggttgaagaaataatttaagtcctccactttattgtacgtccacataaattagaggaaaatttgcaaatcagtgacggtctaaaaaggaaacaattgaacaatgtggctaagggtaatatgaaaactgcatgcgtatgcatttcggcgccgtaaccaaattcagcacgacgtaatctcatttatatgcattaaactacaacattcacttgtatagttgtatgccccaaaacatttaaccgaccctacaggccacatcttcatttatatgcactgcactagccatcgggatgtcggcatgtgccaatgtgaaaattaaagtcttaaccagaaaacatgacaaaaatattcgattctaactatttattattgatcattgcacagtagggggttggagttttggtatatactgctccaatcttcagttatgagatctcactggatgatctcgtaacttgttttgttggataacccttgagtaaaaaaatattgtttatcagtgtcccttgttaaagactaaaacgaatagtggatcatgtcggaaaagtcgatgacagaaagcaaaacaaatggaagcaccacaaagacaaagaagatagatcagcagtcatcagtagccaatagatataagccacctcacactgactgcacagaagttcgttttgattggccactgatgcgtttgcagccatgtgatatcgacttgtaagttatctggatttcgaactaacgcattactgttatgttttcattagaaaatttatgagatacctgacatttatgaagttttttaaacgacgtaaaaagataaataattataaaccatagattagttttattttggtaaaaaaaaaacataccatagactagtttgtgattttgggttatctttggtgcccaaattacataaaagaatacgtttttaaaaaacaatggaagtactgatattttaatgtgttttggtttggtttgaaatatatatatttactagaggatagattatattagatgcagttttacaaacccatatgaaattttactaagccggcgatattaaatacttcaagaaactaagcctacggataacatgaaatcgtaggaaaccaaacccaaaataatgagaaacaaacaccataacttcatatgcacaaatatgccaaaacaaagaaggctaacgactgaactgtaacatgggaaatcaaaacttataaataagaatcttgacaacaacacatggaaaagcgccattgggtaaggattccaaactcagatttacgcaaagtgtgaaataataaacataaattattgattttaaatcgcacttatagagattaactggataaagttttacatattaggcgaaattagaaaaaaacaacaaatgataaattggatagaagtcgaaaatacaaagtgattctagttaaacgtttatagtaccagtgaattgctacatgccaccattttctcaaacgagtctttaaatttaaagagactaactaaacctaaaaattgtcgattaaaatttgactagtaaataaataattgaagcttcgccatcttaccagctcgagactcgcgacctgctttggatcagtattagtttaattgcctaaagaaaaaaaaaatcttctagagtgtattataataatccgatatagaattatcgcacatgtctatattttttccggataaaatcatttttataatatatatattgatttttcatgttgacgaaacgaatcaaaaagtaataaagaaaaagattagcttcggaattgcaccatttgtatacgcaacttcaagacatgaagtgaagtattggggaactaatttgacacgtgccgttaaatcttgaggagcaaaattgttcaacacattttgattacatgacgattatcaaaggggaaagacaataagcatatcgttatctcaatttattaatagtgggcgtcttttttggttattcgtatagtagtggtttttgagtcattttcgataactaggtcaagattcaatatccaaactatataaaataagacaatttggttctaatttcctaagtcattgcgtcatgtcggccaacttcgttttattgctttcatgtctcttcttctttcttgacatccatgctctctttttacatcaagagttcacatacgacaaaaaataaggagcaagagctcgaataatttaaaaactagtcgattactgctgcaacaacttaacttgttgtctaatatttggtccttatcaaacagagagttcaattattatttttacaaaaagttagaaggtttggattcgaactcgtcatactgtaaaagaaagtatatgaatttaaccactttattactacaactgttttccctaatatgatgtccctaaatgcttccacagaactttgatgcttaaattctttgctttagaggttttagtccagggccagacctgcttacaagttacacctatgtgtttataactggttatactataccaatcatagttttaggtttcgattagtgtcataaacataatgatgtcgaatgaagtttttggaccatagaaaagatgatagttcataggaattaaaaaaaggaggataaagtaaaattagagaaggaaggccacacctgattacagaacaaatggtacaattctcatcacccaacaaaaatcagagcctagtatgcagatcacgtacgatcagtccaagtacagataaagtggacgcctataaaaacctagggcttcaatcactagcccacaaatctgtggaagaatcttatactgggccttttctttactaaataaaaagtaatttataacgttctggactttatttgagtataggtttctttctgcagttattaaatttactgggttaagagttcatacgtgttatgtgcatttcgctttaaaaagtcttagctcctgagatgatcgacaaatgagttgcggccaatattgggtcattagaaactattgggctataactttgggtccattgggccgaagtagcagctagaagctagtttctgttttctctaaaattaggcctaattcaggttactcaaaaatctagaataaccttatattactgtaaaatttgagaaatctggttgcataattctttatcatagtttctgtagagaacagaagcccacatgttatataaaactaggggttcaatggttacgacttacgatgtacgtggttctcaggcgtgagacccagcaagagcaaaggagatcgaaattattagttattagatgaaatttaaagtaatgagtttcaacttccctttacattgggaggcatttgtctcccgatccattaccaaaaaaaaaaaaaacttccctttacattttatcttaacctccttttgaactgttgtttagttagactcaaaacggtgtaatctatcaattatttttccattataatgactgtactttatccatttaattagtcttttttatttacccaagtggaaataagaaataacctaaaaaattcgattagtgcatggggatacagcaactttgaaaggtccaacaaaactgacctttgttgatcatattgatattccggtcataatattatttggtctttctaaggacatctcaatcatattaattgtgttttttttttggcagtccaaaatttgacttaatgaaaaaactcttgtggaaaaatcatagaggaaaaccccaataattcgaagatttgcattagataaattagaataatgcttttgaccccaagatgcagtatttattgctccaagttttgactcttcaaccaacttatatacgtatgacaatatgaccccaactcccaagttgcccaaagtccatagattctcccccacaaagtaataaagatcgcattaacaaatgaaaagaacaaaagaaaaataacaatcatgttttgtgtgatcgattactattaaaaattaaaaaaagatgaagaaagatttgggttgtataataatggcaaataaagtgaagccaaagagaagacattttttttttttttgtcgcacacccaaagggaacgaagattagagaacgcgtcattcactctctcgtcacgcacctctcacacaacatgactctcctccttggtttagcctaatttgctttgttttatttttcctgattctatttgtattttatttattaaatttgtattttgtaatgtcaaatttttattatgcttctcttttccctttttcacagaagttgatcgtttactgttttatgattttctaaaatttctcacaacatcaatacttttttttaatctcctaatggtatggtatttgcttgataatctttctgcctccattaattttgagtttggctaggatttttgatggaaatagacagcttaattaaaatcatgtaaacaaaataaaaacaggcgaagcaagcaagtggtaaagttgactggtaaaagtctctttcacgtgctcttgaaaagcgcgtgctagttgtgtgtgggtggatcacgcacacgcgtattgaagtgttaccgtcttaatcggtcagaattttgagtcgagaaattaaaagtggtgaattcttcttttaactccccccaactacaaaatttaccatttccacccccaactatttccataatcgaattattagacttcaaacctaataatttaaaacgaacaaacatattttcttaaatgaaaggagaatttaatagcataatcaattgtttgaccaaaaaaagagaagcataatcagctgttttccttgtatacgagtagaagagtcagcacaagagcgacaatggctcacctttgaaagtttggtttcaaccttttgacttttgacctaaaacatatccatattcgtcaagaagaacaaagaaagtattccaaaaaaaatataataaaaaaaaaaagaccaagaaaaataaaatggaaagaggaaacaaagaaggcagcttcctctctccttcttcattgcaaagaaagcaccaccttttaaagaatcctcctcacactccattcttcttaaaaaacccaccacaacacaattcccacttgtttcttcatcatcacctacttcaatcaaaaaacattccaactttcttctcaatttcattccaggtttgtgccctttcttcttgaatcttcttctatggaacttccaatttcgtctacttatgggcttaatttggtttacaagtcttgctatttctagaaaactcgtcttatcttgagtttcttggacagaaattcttgagtttcttgatttatctttgacttgtttcttgaaaaaaaaaaggaaaaaattttggttggaatatttcaacggagaagagtagaaacggtcgttggcttgtcttagtagaaagtagtttactttttttatatccgcaaaaattgcggcttcaaattctgcttcagaagactcttagaaaatggaaaaagttacaaacaaagaataatatttattttctgtcagtttttctgatcatcaattacttttcttgaatctacaggatagtattatgtgcagtggaccaaagagcaatctctgctcttcaagaaccttaacagaaatcgaatcaaggcaaaaggaagaagaaacaatgcttctcctcgaattcgctgcttgtgatgatcttgactcgttcaagagagaggttgaagagaaagggcttgatttggatgagtcagggttatggtattgcagacgtgtcggttctaagaagatgggtcttgaagaaagaacacctttaatggttgcagctatgtatggaagcataaaggttttgactttcatcgtttccactggaaaatctgatgtgaacagagcttgtggtgaagagagagttactccgcttcactgtgctgttgctggctgttctgtgaatatgattgaagtcatcaatgtcttgcttgatgcttctgctttggttaactctgttgatgctaatgggaatcaacctttggatgtgtttgttcgagtttcgaggtttgtggctagtccgaggaggaaagcggttgagttgttgctgagaggaggaggtgttggaggattgatcgatgaggcggttgaagaagagatcaagattgtctctaagtatccagctgatgcttctttaccggatataaacgaaggggtttatggaagtgatgagtttaggatgtatagctttaaggttaagccatgttctagggcttattctcatgattggaccgagtgtgcttttgttcatccgggagaaaatgcgaggaggagagatccgaggaagtatccttacacttgtgtcccctgtcccgagttccgtaaaggatcatgcccgaaaggagattcttgcgagtatgctcacggggttttcgagtcgtggcttcaccccgcgcagtataaaacccggctttgtaaagatgaaacgggttgtgcaaggaaagtttgtttctttgctcataaacgcgaagagatgagacctgttaatgcttcaactggctctgccgtggctcagtctccgtttagcagcttggagatgatgccagggttgtctcctcttgcttattcttcaggagtttcgactcctccggtttctccaatggctaatggtgttccttcctctccaagaaacggcggatcatggcagaacagagtcaatacccttactccaccggctttgcagctcaatggtggaagcagattgaagtccacactgagcgctagagatatcgatatggagatggagatggaattgagactccgcggttttggcaacaatgtggaagagacgttcgggtcttatgtttcctctccaagtaggaattctcaaatgggtcaaaacatgaaccaacattatccatcttccccggtgagacaaccgccatctcaacacgggttcgaatcttcagcagctgcagcggttgcagtgatgaaagcgagatcaaccgcctttgcgaaacgtagcttgagcttcaaaccagctactcaagcagcaccacagtcgaatctctcggattggggatctccaaacgggaagctggaatggggaatgaaaggagaagagctgaataagatgagaagaagtgtttcctttggaatccatggaaacaacaacaataacgcagctagagactacagggacgagccagatgtgtcatgggttaactctttagttaaagacagtactgtggtgtctgagagaagctttggaatgaatgagagggttcggataatgtcgtgggctgagcaaatgtacagagagaaggagcagactgtggtgtaaacacacacaaagatggtttcttatatatattgcttttgggccatctctgcaaatttgattctttaatttttgtgactttctttagttgttactgttattagtagtatatggtttgttgtcactacgagtctacgtgatgaaaagatagaagttaattgcattagtttctatattcgtttctcatcctcttgtaatttatcaaaccatgaaatggctaagcaatccaaaccgtaatatggctgaaacaaatataccatgtcatcaacacgaaacatgcacaacgccacctcaatgagcttcaaaacaggctttaggctatactcaacaacggtacataacataagtcatcagaggcttcgcatacttcccaaattggtgatgttttaacaaagtcttactttaaaatttcattaaaatagtagaattttcttagattgacatactatacagtataagctttttcatagaaaatatgtcaaagatgttatgggacgcacgtgtgcctcagacacatcactgcgcacgtggtgaacttcaagtaaaattcttattatataaataaaggtatgagtacgtatgatatatccgatgtgtatctgactcactcatactaacaaaatacagaggtttgggttgggttactttggctttggttcaaagcaaaactgttgaacgaacaactaaaagtctaaaaccaaatggagtcataataaagtatacaaattctgccaagaaaataaataaatttacatatatatatatatgtagtaagatgatgtaaataaaatggattggtaatggcaatggttggtgccgtatacatatatgtgtgtatgagattccttagcctttacttctctcaaacagaaagcttcatactattatcattttgagtatttgacctgtctttttaattttcatttgattttgcaaaacatatatacatctatttctctcttaacgaacactgatgcttcaccctcaacatgcgatggaaacatgattgttacagaaaacgaaagattagtttcttatcccaaaacgtaagattaatttggtactaatctacttttagatttggtgattaggaggagtaaacttgtgtttaatataaaactgatctttgttgctttaatatgcatgtttggtgaattacacccggaaacataatcagatcaactggcacatgagacattaaattcatgttggatccttatgtttcatagaacattatgtttatgaaacaaaaatgtaaatcaatcggaaactttggtggtatacaagtaaataatttggaaaaatacatgtttaagcaaaagtaattgttactaatatcctaatttctacaattgttgtttcgatggtccctttctttaggtgaggattgagacaatcttttagaatctttgattccactcttcgctccaaactctactttgctataacaacaacttcaaaatagattagttaagcgaatcaggttacattttaaagaaaacgatatagagagagcaactttgtatataattttaaaattcttcacctgaaagcctttaaaaaccagttcaagataaacccatctcaccaaactttagtaatcacaaaactaattaacgtcaaacaataacaattttttcacaaatttaattcttttattcctttattcgttgctcttatatttccatcgatctttctccttgtctcacaaacattctgacattttagagagcctcgacagagaattatttttttcttttttattttcgtttacaagtttcaattcttctctatatattaaaaaaacaaacagatgcaaccttggagaagaaaatttccattgttcgaaacaggagttacaatgaaacagaggaagaacagtaatctctcaatcttcgtcgtagtcttctctgttttcctcttcgggatcttcatgtacaatgaagacgtcaagtccatcgcagagtttcctttctccacctcaaaacctcacgacgtccacgacgaagcgacaccgatcacagagatcacaacactaccggttcaagagtcgatcaagaactcagacccaattcaggaatcgatcaaaaacgcagactcagttcaagattcagttaaagacgtagcagaaccagttcaagaggaggtatcgaaaacagaggaagttaaaaagattgagcttttcgctgcgacggaggatgaagaagacgtggaattgccgccggaggaatgcgatttgttcaccggagaatgggtttttgataacgagacgcatccattgtataaagaggatcaatgtgagttcttgacggcgcaagtcacttgcatgagaaatggaagaagagattctctgtatcagaactggagatggcaacctagagattgttctttaccaaagtaaaccggaaaaaagctctgtttttgttttcatcgattctttgggttggtttagttttggtttcttctaattttgtttccggttttgtttgatttggtgaaggttcaaagcgaaattgctgttggagaagctaaggaacaagagaatgatgttcgttggagattccctaaaccggaaccaatgggaatcaatggtttgtttggttcaatcagtggttcctcccggtcgaaaaagcttgaacaaaaccggttctctctccgtcttccgagtcgaggtaattgaaaccgactagtttatttcttatagtaatgataatgtgtttagtggagttgctgattttcgagagtagttaagataagtgtggattagttttctagttattaatgttgaatttttgggtggttttaaaaaggattataatgcgacggtggagttttattgggcaccatttttggtggaatcgaattcagatgatccaaatatgcatagtatacttaaccgtataataatgcctgagtccattgaaaagcatggagtcaactggaaaggcgttgactttcttgttttcaacacttacatttggtggatgaacacattcgctatgaaagtcctgtaagtctactactacttcaatattattacctctatggtgtgttatgtattttacaaattttgtgaattgagattgtggaaattgacgatgaaatcagacgaggatcgttcgataaaggagacaccgagtatgaggagatcgaacggccagtagcgtataggagagtgatgaggacttggggagattgggtggaacgaaatattgatcctctacgtaccactgtcttctttgctagcatgtctcctcttcacatcaagtaattaatcttcctttctttttttcttaattgttgcttcaatacacagattttagttagtgatgctttgcttgcaaattgaaattactgacaaattgataggtcactctccatgtttgactagtgtcaccattgaaaatttgaaatgattacataatttagtttcagtgattgagtgacatatgcgtttcttagaaattaattcctactagctcctgactccatttaattgacctgctaaatattatacgtgagagttagtagtttttaaacttttccttaaaccaaaatgatttcaaatatgatttgatttaaaacaggaaaaggttgatcattttgtgtttttctctggattaggttattgatagattgccaattataatgtcacttagttaattctttatttttgttataataatccaaaacaaaaaaaacacaggttggtataatcattaataacaccagaccataatattttaaacctgcggacgtaacttaacttgaaaaccaagcaactaccagaaaagaaaaagagataacaagtcgttgtcctttgaaaaatccacacagtatacaaaaatcagctaaaaacataaaaactctaaatagtatttcattttaacgagttggtgaaccacccacatattagacttttaattgtatgtgtttatcttaactaacaaaatatagtttgtaatttttgttgttatattgtataggagcttggattgggagaatccagatgggatcaagtgtgcattagagacgacaccaatcctaaacatgtcaatgccattcagcgtaggaacagactacagactgttttcagtagcggaaaacgtcacgcattctcttaatgttccggtttactttctcaacattaccaaactctccgaataccggaaagatgctcacacttcggttcacacaatccgacaaggcaaaatgctgacgccggagcaacaagccgatcccaacacttacgccgattgtatccattggtgtcttcccggtttacctgacacgtggaatgagttcctttacacacgtatcatttcccgttcgtgacctacaaaatatttgaaatatctctttttcaatattttttcccactttgctccatccaatggaagagccttgaaattttattattttgatgtcctaatgttcataatttttcttgaattgtaattgtgaaatgtttctttctttttctttaatggttattagagtgcctagtaggctattttaactgtttttgtactcttaaaactttgaaatgaggtggataacaaaggatgccaaatgttttttttttgttcaatgaagtgggtaaaacttgctcacattcgactgtttcttttaacggtcgatttttttgttaaccgggaaaataaatataaaggtcattatgtttcaatctcttgctattttgttggactattaagatttttgaatgttagatcgttacaaaggattcttccattaaaacagtaacatgatcacaaaaccacatcttttaatcactatacaatcgaaccttttgaaagaatgaatgtgtaggagaagaagaagaaagaagttagatatgtcagtggttactcggaagtctggaccggcgtacttggaaccggcattccaacgtagccaactccaacaacaaagaaggcaatggactgcaagaaaagatacacgtaaaggtatgtcctcccaaacacaaaatcatagtatccacatatgaagagatacattccaaccattatctctcgccatcgaagtctgcacaaattcgaaatcatatcattgattgattagccatttcgcacgataaatctattcggggaaaaagttcaaacctctcggggaagctatagtgatcaggaaaaatgaggttttccctgagattgttactctctcctagtttttgtgtaacaatccattctttaactctactagtctctagcaatccaatgagagttcctatactcctatgcatcgccattacgttttcaaataagatccaatagagtatgaggtaaaatgatttaggtgttgcaatagcgtttaggatagtgatggtagctggaatgtagatagttgtccatttagggacttcgatctccgggaatataacggtagctggcaaaatcacgcagtagaaaacgaatgtgaagatgtgtacaacaatcttcctcaaaaagaagaagttgtatatcaaatacaccttcttccataaagacacattctgtttcaaacatgtcacacaaaaaaagataaaggtcattgaactatatttgtgttccgaaaggaattagatttggggatttatgtaatctatctacctggtttttgatgatctccattgcaattttcttgaaaaggttcgctggaccgcaagaccaacgatgttgctgaaaccggtatgcttgaaatgagctcggaagctcgtttttcaccttaaataaaactcccaaagtttagtcagatcacttcagtacaggttgaatcattgcattcagttgataacaaaccttaacatcgtcgacatacacaaacttcgagccgcgtagataagctctaacagctaaatccatgtcctcgactatcgtgcggtctttccatccttcagcctcattcaaagctttaattctccacacaccagcagtacctaaagtcaacgatgttcttttagtaactcaaattaagatcatataatacaagacacacaaagagcatgtttatggatgtttcaccattgaatccaaagaaaccaagtatggaggatccagacttttgctccactgcaaaatggtagttaagagacatctcttgtattcttgtcatacaacactcatcagcattccctgtcacgcacacacaaacataatcgatttaacaaatcgactacaccgggtctttagctaactagaaagggaagaagtaagatctaaccatatttccagccggcttgtacaagagctatctcagggttatggacaaggaaaggaacagtacgttcaagaaaatcaggttcaggctgaaaatcagcatcaaatataacaacaaactcgcacttgtattcatccacgtaactatgcttcattcctgcagtgagagctcctgctttgaaaccctctctaaaaccgcctctaacttccgactttatggttataccttcgctctcccatttcttacactccaatctcaccagtttctattttctttcaaaaaagcatttctttatagatatcgtaataactaaggctgaaacataggatcaaagcacattcaaatgaactcaagaggggttaaaggaaaggacctgactttcttcttcggttgaatcgtcaagcacttgaatgatcatccgatccagtggccatgatagcttacaagctgctcctatagaaagttggcatacctgtaacgaaaacatgccacttgtgaaacagagttctctgttttttagaacagagtgctctgtttttgtttcgcattcaagtcacctctttctcgttgaagattgggatttgaatgagaaccatgggatgattgctggagggagctagctcgatatcatcgctcttgaagctttcccatttgagaactttctgtggtgttcgtccaagtaatttgacaatggctacaactatagccatataagctgcatctacgaacaacaacaccgaaacaacctgacagagattcacaagacgtttcagaatcggcacgagaaagatgaacctggtttgctcaagtacatatccgatcactcccaacacgctcatgtcatcaaataatccatcagacaatgtcgccattacagataacttttgaccccacaaggccacaactcgaacaaagcagagacaacctggttcgagagaaaattaacagaaaccaagaaaagacttagaaatctccctcgagcaataagcttcaggaggatccgacattcttttgtctttcctaccatatctgtctttgaattagtaaaggtttttttgtttatttgattgaatagtctatggagacatgtgtagtcgtgatcattaaaattaaaataaatgggattagattgagctggaattggttgtgtccacattacattttacaccatgtcttagtattaatgttgagtttataatatttttaaggcaataatcattatctctgacttttgtttaatttaataatctctaaagagactagttattgttgcatagttggactgattaatgaaaggtactcttttgaatattttaaatgctcacaacaataaccttatccatctaaatgcttacacacaatggaaaggatacataaaccaaagtttgtctttgtacaaaagcatttctacataagaaaaaggaaaatacatgtgtgaaatggtcactaaagacaagcgatttagattgtaaaaagaatgcgagtaagatgggtcctctcataaatgtagacgattaatcatgtacaactacaaagtcaatgattagtggaccattctttatctgtttaggaggaagaaaaaagttattctactatattatttaggaagtacattttgaatgtaaccttaatttttgtaagtaattatataggtatgccattaaaaataaaattttaaagagtaaattaatttagctctttaaggattaaaaagtcaaatactaatttaattaattaaatttaattaaaaaacgaaatacattattaatttccaaaaataataaccaatcaaaatcaacatataagatttgatatctaaattttaattaatttaatttaattagaaaaacgaaatacattatttatttccaaaaaagtaaccaattaaaatcaacaaattatatttcatatctaaattatcatattaattttttattaattattatagttcacttctcatctttatatgattctatttttgcggaaaaataatatcatcattataaaaaaataattagagttttttcccatatgccataatttgaatttttaaaaacaaatataaactgttcagtacataaaaaaatattataacggataaaaaatagatttaagaaaactttctactgagtaacgggtcataatttgaaatatttatattcaatttcatacattttatattgaaaatttataatcttatatactacaataattaataacatattagatgtgattcaatttttaatacaagttggaaatcctataattgaatgtttagatcgatattaatacaagatggtatactacaggtgaaactcttaaattaacaatcaaactacaagtgtataatcttaaacactaaacaatatagataatatcaacaaaacatatacaactcacagtttactatacatttaaaatcaaataaaataatatcaaatatttttaaatcatctttacaataaaaaattttagtttaactaaaatatataccgcaggttaatatctagattatagggcttattggatctaaagacggatcatcaaagacttcttaaactgaagcaaaatatattgaatattcaaatatctatatgttaccaaattataaacaaataagtcaatttaatattttatatacgaaatcaattaaatcttaatcgcataaaaattagcacaaaaaaagtattcatcaattaaaaaattatcaaatctctgggttatataagttttgatactatattcgaataaagtgtaatataccttttcaatttgtattctttaactaatttaagctaactaatatatttgctaatcttatatctatcaaaaccgactatcgtttcttctctctatagtatttttgcaagacttttttggtggatttgaataaaagtgcattcgggtcatatggtacattctcctattaaataaatatggtgcactcatatgttattatctaaaatgtttagattctaattcagagtcataaataaaattaatattaacaaaataaatagctttttggcaagacggatttggagggacggatttttgaatcaacattaataaaaaagtagaatataattaatccaccgtttcaatacgggttaaatctttaatttattattttttaagaccactaatattaaacatatcaaatcatcctaatttcgaaaagattatataaaaccaaaaatgttatgtggtatgtataatgttactatatataaaattaaactatagatataaatgtattagagaatgatacaatttgtaaaacttttatatataaaaaattaattcttaaattttaaaaattactattttttaaaaaaatcacgggacggtaaaaaaattacagaacgagttctattttggaattgagttatatggtggatgtatttgaatcaatatttataaaatttcaaaatattattaatatgctgttttaataggggttaaaacttcagttttttaacaattatctcatggattcgtggtataccgttacttaataacaattataaactgtaaaatataaatattttataaaaataaaatttgtaaattttaatatatattacctttaaaaaataaatcgttccgcggtatatcgcgggttaaaatctagtaaaactgtaaaatttcacgtctatcagttacaaactattgtacgatattatcaaactggtcagaactttttatgtaaaacagtcatagtttgggttgtgttttgcaattttcatcttttcaatgggtcaaattataaaagagatcgcgtggttgtcacgtgctttaagagcgagtgggacgttgatcatcgagatgaagcagagaacccaatcttcgattctgtgtttagcttcttcactaccacacagaaacagagtttccgtctttcatcttcctccatatgcgtcgctcttaaaaacctaattcacaatgtccgtcgttctcaacgccggcttcagttctccggtaagaatttgctctcttcctctttgataaccatataagattcttctactcatactcctgtataatttgctccagaaccactttaattgggattgaatcgtttactcttttgtgactgaaattcgaaagctttctcgtttcccttgatgaacttggttttgtagagattgattggtccttgattcgtctctctagagtttgaaaaaaccattgctttatgtacttcttcgatgcataaaccaatgctttcatataattccgctgatattaacaaaaatcttctctctttgaagcttcaaaacagatcacatcatgttatacagttaaagccttcgccttttgcgtcatacatatctctaaacagttcaagaaggtcactgttatgcaaaagaagattggttgtatcttgtttggatacaaatgacaattctgtcacaactacatccgtagattcttcttcttcttcagattctaataaaccagtaagtgaatcagttgaatcaagcaatggcactgccaaaaaagcaccattgacagcacgagagagactaagagcggctcgtgttcttagccgatacactgaagcaacaccgaaaccgtcaaaacctaaaatggggagccaacttcttgatgtgctcaaggaaagtgataagaaatcaaagaggaaaccgggtctacccgaagcaccaactaacatgcttgatgatagcaggagagggatgccaaagagcggtcttacgtttgatttaccgggaggctcggatattctcatcattgctttctcctttgtgttcataagcacagtcatgtttgctactacttttcttgtttggaaactcggtgcgatacacttcaacgaatagtaaagttgagatttggagaagtttaatggagtttggaaaccatcaagcagggaacgagagagagagagtgttttgttacaatgttagttaacaatgcatacttggggatgtgatggggatcttcatcacttggcaaatccggcctgagtgtatatacatatactctgtagtacacataattttgctatgaactctcttcatgcttgatttgtaattttaatctttacattgtaatttcttttcatatggaaatggatgcttaaagaccaacaacagccaatgtaaatatgtatcagatgttagagagcaaaatatcacaagtttattttaagaagagaatgagagataggagggtttgggacaaggtaagttaagaatgcactatgcattacttggaatgtccatcatctagctaagcctgttttgtcttttgagtaagtagcacactggcgtaattttgctactaactttcttttttacttcgattccaatatcaatctttacattgtaatttcttcctaaaaaaaaagagacaaaagatatgaagagataagagcaccagtctagtgatgaatatggtcaaatcatcattaccactttcagcatcgcaagatcacaagtaagaggcagagatggttatttggctatattaactagaaatgaaccaaatttgggagaatagatgggatttggaccaagcctaactgccaggaaatcctaaattttcatcaggcctagtcataaataagcatcaaacaaatgagagattttatgctccagtaagcagacatgtaatacataatctattcttctgtcataaacgcatattgatgaaagaaaaatatcctaaccagctagagacaacataaacataacaacttgattatcagaaatgattgcaaaccaaatgatgatattcaaaattgatcgctctcggatcactaattctacaaaagcgttaagatcaactagtagctacgatgagataatataagcttagagacaaatattaaatcgtaaattaatagacaaaggaagatcaaactgaaaatccattaatccaacaacagcaatatctggaaactaagacaaattctgggaacaaactgaagcaaatgaaacacaaaatgcagaggggaaaagcgaaagacttgtggagtagatttggtctacttagatcgctgtctcatctttcgtctcttcctcttcaatctcctcatacgcttcttcttccactgagatataaaacaacacaaccagatccacaattacttgacgaagaaaaaacgaaaagttggctctaaatactaaggatgtaaataacacagagcagatgaatcagacaatgaacacagtatcggaagatcattattaccttagctctcatcactcctttttgctcaaaaccctaatcgcggtgagagagactacttgaggatgaaagatggtatatatattctacaaaccctagacaatgaaacgagacaaataaacatgtagcctttttatattgggcctttaaggcccatctattctcccaaaactagtgtagcccaataatctcaagcgcagtatatctctacactgtattctacatttctaatgttccggcttaaacccctaatctccgttgacctgaatcagacgatgtctcttctccgacgattcgttaaagaagcgaacaattccagatttctgcttcaatcaatctcgggacgttcattctccaccgtaaatcccaatccaactgcttcacctggtcgtcgtacttgcgtcgaattcgataacctcatcttcaaagccggaagctccggcgatttcgaagccgtacgtcgtctcctcaacagccgcgtcgtaaacgcgtgtttcaacacgacagctactttcaaattcctaacaaacacagactcttactcctcctccttagaagatctccgccgtattttgcctcagaccgacgccggctacactcggaaacactcctacgaaactctcatcgctcgtctctgcaaactcggccggatcgacgacgctctggtcttgatcaacgatatggcgatcggagaattcggactctcaacctgcgtatttcatccgatcttaaacacgctcacgaagaagaacagaatcgaagaagcttggcgcgtggtggaattgatgagatctcacgcgattccggtggacgtgacttcatacaattattttttaacttcgcattgttacgacggtgacgtggcggaggcgagcagggtgttgaggaagatggaggaagaggaggaaggagttatgtcgccagacacgcgtacttacgacgcgcttgtgttaggcgcgtgtaagtcagggagagttgaagcggcgatggcgattctgaggaggatggaggaagaagggttatcggtattgtacgccacgcatgcgcacgttataggagaaatggtggagagtggctattatgcgctaagtgtggagtttgtgatggcgtacgcggggaaagataagagattagatgaagagaatttgggaagtttggctagtaagcttatcaagaggaagaggtttaaagaagctaagatggttttgaaggagatgagtgttagaggattgagaatgggtgatgctttgcgtgaatttcatgagaaaaatgtgttacaatcatgattttgattctaagaatgagatcaccattgttacagacataaaaatgaactttgaaggaggtaagtgtaaacagttagcttctctgcgtttttttttttcacatgcagagtttttttgtttccattaagaatgttttgacttgtggcttcaagttcaagtattgctgtgcaagtatgaatttatgaattgtacaattgtcgagcttttttcatgaaagagaacacatcagatagatggtgaactgttttgtttaatttacagaggagcaaacatttacagcaaattacactttctatttttattttcatggacaaggagaggtaataaacttttttctactttgggaggcttagctccaaattattcgggttgggttagctttgtgaaacctctacttgttgaagatgaatatgggatccattgagttggtagttccaataccagcttcctgtttccattacctcttctttcagtgcttccaagttgatgcttaaacctaaatttaacaccaaaataatgcaatcaatcaataatagtgtcaattggtcgattttttttatctatcattgctttagataagattcactgacctgcatttcctgatgtgatcttcagtttgtgaccgtcgggtacttcaaaaacatggtgtccctgcaaaaagagtatataccacttgattttaaggagaagatactctaatccatcacaaacttccatgttactttactttacctctatagttacattgctggcttcgaattctgcatttccgtgcagtatgattttacaggtctcaagcctgttcacatcgtttctccagtaaacatttgatttactgttccaatcgattcctcggttcactacgttcacgttatgcagtttacacttaccacacctacaaatcaagtttttctgtgaattcccaagtgcaaaccaatagacacgtatcttacggagatagtcaagtacaacactctattctaccttaacccgtattgcaatattggttcaccattatcattaggtgttgttgaacccatggcattttcagcagtaacgatcaagctaccatcaacctatgggacatgaagttgattaagaaactcaacgcgatgaaagctatgcaaaatcttgttggcagaatgaaaatattgagaacctgaacattgttccatgagaactctgcaatctctagttgcagttctgagcaactggaaatggaccctcccttgaactgtaacaacgattcatatatgattttagtcataataaatgatatgctagaatttgtgaatcaagaaacaaaagaagacaggcatcttctactgacttactttctgtctcgaaacttcccaaagagggccgagggcaggatgcagaagaatgagatacggaggtggggaatcaacatatttatcattagcttcaatctggaggagtagaataaaaatgttaattatcaattttaaggtcacactggcatgcaaaagatgtgtatctatgaactaaccatggggagtttgatatcacactccgtaaggaggtcatatccattccggagtatatccaacaatgcaccatctggagtctgcaaagagagagaaaagtttgaaagttaagttaaatcaagctgaataaagattttcgttccattgaatgccaaatcaatgcaagaagacaaaggaataggcaaagaaagactaaacaagtggctagagaaagacaacctggtgtaatgcagcacttgcgtgtggtttcttcttcttagctgatgaagtgacctttcttcgttcgttgtacacaatatatgtatccagtttgtctggtaagatcatgggaagaagtaacaccttaatacaaatatacagaaaacaatgcaacttattcaaaaaactttaccttctagactgccgtggcatctagatggaaacttattaaaaaagttgtctgctatgttttgcatcgtgcattccaatctaccacccataacgctgcccaacaaggaaagttataagaaacttactaacgataatacaagaaggggattgaatgcaagagagtgattggtaactccatttagaaacgaaaaaagtgtttggggtcaaaaggaatcagtataaattccagtttagctataagcgcagttaagatttgacttaggtttccatttaagcaaaatatcacacggagattgggacatataacaaggtaacagaagatcagtcaacataaatgttcagagataccaacctgtgatagtctccatactgatcaaggtactcaattcgcttctttgtattgagaaccatatttggcaaactttttgcattactgcttgacccaattaactcggccgaatgtaagtctacatatagaatgtttgtattggcaggaaaatcagcctgcaaacttcagaagtaaaaaggaaaattgatttgatcttgattttgcactcgaagctgaagaaatatatgagcattgaagattcacactaatcaaaacactatattttttaccacgaacaaggaagaacaactaatactaaagacagacaatacaagaggagataaatttgcactatttttgagctagaacagagatattatgaatcagttctcgaatatatgcactttaagtaagaacaattcaaagatataaatatcatacccatttgaagaaggtgatctgttggagatatcgaatttatcaaattctgtgtactcaatgcacgatataccatattcccacttcccatcgaaattcttcttctccatcaaaacattaatcccttcggttgctccagcattccttttacaggatgcaaacccaagtttctgtcaaattaggattaataaatcaagtttagtgggaatcaattgttcgcaagtccaaaaagggtattcctatttcttgaagtagttgagagatgaatacatggttaatatatgttctcaactagtaagctagtttggaaagcatagccatatatatcagtagatagttaactgccacacctcatacttctaaaggaacttatccatcatgatatagaacatgttcttcaagcccaactaacatgagaccatttgcaatcaacaccagatgctctcttctttatctctataagtgatacatttaatgttttgaatctatttgcagtgtgtcagttataaacataagatcaagcataccttattataccgtaagccaatcccagcaagggccaagagggtaacatctgtagcagccacaacgttactgtaatatcacaattatatacacaaaattcagatagttctgatttattataatgaacaactcacaagggtacaagtgactaacctaacttgccgaacggttgctccttttcttccatgatcgtaaaaccagttaaagacacctttgtcataagccaatttccaaattacaccatgaccaccaggtttactaactggaacaaagggctttgatactatccattgaccatcttcagcactgacagctgggacgagaggctagcgaacaaaaaccattctattaactgtgagtacaatactcaagatacagttgttccagaaaaaggtaacagaaatcaaaagaaaatatatgttccctgatacctgttcaaagagtcggaaatttgattgacctctgccaaaccatttaagcctttcacaaagcgaacttacatgctcatggttgttctttgcagcacttgtcataatggcaacaggtgtgacacattgctttccataaagtttgaagtaaaggaactctctagcctagccaattccgggaaaaaaggataaataacattttctaatgacatgaacaaatacagtttcgtacctcaaagtttcctttcatacatttaaatgtagacaaacccacccagagtcaccaagaaatgagtgcacatgtacctgaagatctctaataagtccctccaacaaagttcgtccacaatgagcaagcattgctgcaggaaggcattctccagtttctgaatcaatcaaacctagtctgtctgcagcacctcctaggggatatatttcacctaggtctggcaatccctaatatgtacaacaacttataatccagaaaccatacacaacaactttgcttaatttcaaaaccaataacacaaacctaacctcaattccccacagagccgcctgtgaagcataatcttcctcctgagtgagatcaagaacactaggagtatgcatttctaaatactggcaacccaatgattcttcaacaagttgtgaccggttagtattacgtctcttagatgactgatgaagaagctcaagaaccataacctgatatctgacacacaatcatccatgtctcagcagtgaatatattcaaaatcaataatcaaaactttcaaggcatctctcatctaatttctatactaaaaggagaattaagaattggtacccaatgattcctccaatgcagtcgtagaactgttcaatttcttccagaaacgtcaagaattttctaaaatgagcaatctcctctgaatctaaaactgtacccatctctcttctacctttatagccgctactattcacatcgaatctctcaatcatctccaccaatgcgtaaagtgcgttcttcactgagcttctcactgtatactcctcctcttcttctccaaatgcttcctcataattcatacatagagcgtgttcttgccccgccgcgataacacacttaacgagaaacatctcattcgaattcaaaccaagataaccaaaaaccttagataaaccgcctcgattctcgctgaagaatcgacgaactctggaatcagcgtcgataaccgcgtccttccttcgtaaatccttggaaacgtctagtttcgataggagagacttaagccgatcgatttccgataagaaatcgtcggattccggaggagtcggtgtagaatactcgacaggtacggtggacacgtgtctcacctggtgattattacattgctgctcgctctgctgtaatttcgaggaaaatgacgaagaagaagagagaaagaggagtggttttctgaaatgcagagagctgaaggagcgaggagatgttgtagtgcgaaagtggaagagagagaggtgattttgggggtgatggagaattggagaagcttgaggattagccatggtgaagaagatggttacagaaggagaaggaagaaggggttttgaagagaaccccaaggagggataaggagagatactccaagcatatgcccagaatcactctctacgattgcttcttttctttcgctttttttttttgtctttaatgtgaaggaaaaaaaatataatccaatgagcttcgatcgaagggatttgattgtgtagaagatgatgtgtgattgtcgtgtgttgcaatctttaatctgacggttcagacgacaccattttggattacaccgatgggccatcttcattgttcatgtcgactccaacatttttagcataatatgtgacacaaagcgatattaattttgtttttgtgattgattatgttttgattattagctacgatatttgcatgtggatttaggaggtggagtgttaaatagtggagtacaaacgaaaacatttttaaattattcattgaattggtagcaccatcttcaactaaataaatttgaacgagcagaatttgtgaattatacttcagaacctgatgattaaacatatcaagaacatagtaacactaatttacaaagacagtaaccacccaccaacattatgcacaccaaaaaggggtattaccgtgattaggacattttctgtttacgacataaacgaccaaatagatccaccgaattttaaagccgttatataaactaagttccatacttatatatagatagatagatgaaagtagcctaaagagaagccaagagcttctaagagactcaaaaacctcactcaaatcttcatattaatacttacagatttttttgtgaagttcagtagttgtctcttcacgcagtggacagaacttccagctctgcccaccagagtggtgaaagttttgggatagtgtcgtctggtgataatccagtgatctctcgtaatctccctgtgacttccttcattatcggtctctgtttcgcgtctgctcttatgcagcttttgatcacttcacctatattctcaatcttctcgtcaaagctttcaattgtcggatccaccatctcccttaatgtctttcctctcaagaagacagccaatccggtatctatcgagtcacctttttgaactgactctgggagttttcctgtcatcagttcaaacaacagcaacccgaagctgtgaacattgtcttcttgtgttgtttctgagatgtttgtatctatgagtgcattggtgctgctttctgtctcggatgggccttttaaatatccaaaattgaaatccgcaattttgactgcgtagtcctctgtgagttgaactgatgatgagagaagattgctgtggactataggtggcttgagtccgtgcatatggtcaaggcaataagctatgcccattgctattcttagccgcattacccagtccaagtgttctgattctttatctgcagcaaaagtaaatattgttttcccacttttaatctgacaacttacagtgtaataatgactcatatgactaaagagctttgttacttacagtgtaaatgttcaaagactgttccgtttgatgcatattcaaagaccaagatcctagtgaaaggttcttcttcttcacagtaaccaagaaggttgacaaaattcttgtggtttatcttggataacatttcgatctgaaatcatcgaaaccataatcgataaggtgatagaaatcaaaatccttaaaatataagaaaactggttgaccggaaataccttctttctgaactgcatttctatattatttgtccattctttggcagacgcagtagcaacagaagccacagctatctccaccccacttgatagcgtccctttgaacaatgtaccaatggggcaagacccaatgacattactaaaatcttcacaggcagcttcaatctcagatcttttgagtttggggacacctgagtaacaaatcatacatcattaatatcgaaaagaaaaaaagtggagcgactattaaatctcatcttctagaaccaacaatgccacttcacatttttgtatcagggagtagaaaggcaattaccagttatgaacactttctgaagttgtccactaagacctgtacgccagggattcacagatttcccagccttacttttaaaaaagaaaacaccagtagctaaaaggaggataaacacagcacccgctatgcagccagccactataggaattgtgctgtttgaagaagttttggagctgcttgttagactaggtaaagtcacatggtgcacaaaaggaggtggagcagaaacatgttgcgcaggaggacttttttgtggcggaggcaatgtagaggatcttttggcatcaggtctcgtagaaaccgaagatgacggaggtgtagctcttgccacagggcggtccctgaacgcattcaaatgggtgtacgggttacgaaaacggccaagtaatttcctgtgaaaaccaactgctctcctgcaaaaaagacacgaggtataatgaatttgagtacaaaagggagaggaaatagaaacatgtttctaactcaaatggaaaaaatgattatgctacagcactatcaaagtaaatttagcaagtcttagaatacaaaatgcataaaacacagtgtcggtattcatgttgttaccactcagaaatagtattagttcactaaaaaaattcatagatctactataccaactacattgatgttgatactcagccaaaattcattttacaaatcatgttagcaaaactattcattatacatttactacaacattagatcttagcaagctcagaaacctaaattgcaaaagtaaatacaccaacaaacacctcagctcaagaactagcaacaagttctaaaactgaaaatcaacaagagctatttaatctttatcaagcagctgcgttaaaaattcaacaaactaaaaacattcacagaacaaaaatcgaaagctgatacttacaaatcctcagcatctatatctgaccatagatctttcgtcacggattccagaaaaccatcacctgaaagccaaaatcgaaactaacaattatgaggaactatccttctatgtatcggcacaccaaaaaatagaaacaaaaacggtaaataccttgagatttcaacgaatagcaagaaccgaagctcaaaatcaccagaagaaacacgagagtacgattttgaagccttaatcgaacggatttccagttgttactcatcgtcagactaaaaaaaacaaaaccgagcagaagctaaaggagcacggagaagctgataaatccaagtctcgatctatcacagattcgaagaaaagcaaaaagttagagagagctttgagtttgagttcgcatggcggaggagacgaattgagaggaggagtaacatgacttttcaacttttgttaaaagcgcgtgtccccgtggtttggcccgataataaattaaagaaggatacaatagtaaaagcatttacttcttcttgttgacaataagaaaaaaacaatctcgtgaaagagtatctatttctaattttttctatagtattcaactgtataacactagagtaaccatttatcaattagatatttttgtatagtaaaatacataaaaaatgatataaaatagaagaatctatggacctgaagatgccagagctaagaggattcaaaagaagaggccaaagacaccgtcgaaaaagacttttgatgttatagcactattgtggaaaatcgtttaggctcgctctctctattgtgcaatgtgtttttttttttttacaaaggagaaaacctgaagatggtgggggtataaatgccacgtggaatatagttatgatgtgttggataatggaatgattgaagatgaatgattgtgtttgtggcattatggattaagaaaatgtggagggagttttctgatgaccaattcaacgtggatgttttttctttgtttttgttttgttgcttcgttgttaatttcttcgttttcaatccaagtctttgccatgtgggtagagtcatggatgtaatgggaatatgccccattaatacatattttcatttaatttatttatgtatacttttctcaatatttctcagatgtttgttagtgtatatatactgtatactgtagatagaagtattccataattgttgcattcacacagcccacgttttctgatgatttatctaattaaaaggagagaaagctcaaatttcgcccccacgatcgaatgtccgtcgaagttttgatctatcaatttatttttttatcggcttaagagcaaattttatagtaagtaaagttaattatccatattagtcagatcaatcagagaacattttcggaaatgtatgttaggaatgaatagtatattaaaaggttgactagtaacggtttcgccgtaatttgaaagccatcgggttttgattggttgaaagaaagaacaatcatttttattattatgaatttacaaattcaccggcatatctacgcgtcgtacgtaatctaacttcatccttacgtaattctatgctgtctttgttttgacctaaagagtctgcacaagcacattcatgggcactttgcttaaataaattgacattgctgcggcacaatacttaaaaactgggcgttatgggattaaaaaaattgcgaaaccttaaagggccatgcattagttaaatttgtcattgacttattaattggtaccaacaatgcatatggtacgtagctgtgtgaatgatctaggattcaaaaccatagtatagaaaatattatttgatattttggtagacttaggaccatatgaaaatattattaaagatcttttaataaaatatttttttgagtataaactaacttaagctgcaatcacatgttaggcgtacatatgcatgttagattgtttatttttgacgtcacatcttatatactttatatgttatgttattgatttaacttttgatatacgattctttcaaaaccttacatgttctaatctcttttttacaaccatgcatacctcataactaaaagataattctctaactcgttattcaattaggagaacaaatattttcaaatttaacatcatcgaatatgatcctagcagattggattaagaaaaatcatgaaatatatattccaactaaacaaagaatgcgaaaaagatatgaaaataattttggagcacaccaaaggatttgtagtccttttcagctccattttggagctctctagtaggccagatcccaaataataaattttccatttttaaaattttgtgtatgcaattgactgccctaccgtcttgttcactattactatacattgagtgagacttgtgaggattgacctttcataatcaaatttgttgacgttatacttgtgcagaagtatgttactaaaaagtaaaaatataatcaacgatggcatgggaaaaaatgaatatgaaggttgattgcaaaatacgcttgaaccttgatagtttttgccttacacctcatttggattttcattgcaatgtcgggataaattaggcaatcttatcaggaatatatatcaacacataagaatatatttacaacatttaatctatccttactaagaacaaatttcttaaatttgcaacaataaggcaattcatccttttattgtctaaggccattatcaacaaggatatgtatcaagtgtttcagtcggttataaatgactttagtgcaacagaaaaccccatttgtaagattcatgaaatatgtgatatacactatagtgaatgtcttcgtttggagcaacgaacaccaaacaacaatatcttttagcatatgtacttagaaatctcatgtttcttcctcttttcctcggaaagccatcctctctcgaagaatcttctgccccatatatctacacattacaattttccaacaatcatattttgaaaaaaaaagattaaaaacatgtttagatcatttgtatcaattggtttctgcgtgtttttaccttccgagcatcatgattgtggcctgtggattagtccccggagacttgagaaacgtggatccatcgatgatcctcaaagcatcaacccctaatactttgtaattgttgtcgaccacttttccaacttgacaacctccatggtaatgataaatagtcatcacggtatcgatacaatactgctccaaatcaaacgttgaagttatgtgtcttggccttaaattagtgggaagagcaagaatgagatttagtagtccacgtgcactcgctaaagggtacttgtacttggagtatcccttcgaatctatcactttaataatggtactaagtccttcaacacacttgttcaaatcctctggatccttaaagtagttgaatgtcactgaagggttatcatctggattcgtattccgcaactccaagtgacctctcgagagcggtccattcactttttggatgatcacacccgcttttgtagtcacgttcaaggtaagatccaaagatttgaaaaactttgagatggattgggtaggaagttttgtctgcatataaaacatcaatatcaaaaaatatcttatgaagtcttgtgttaacaaaatttgtaacatttaagagtgttaattgattatacctttttaagaagattcaaaacaccatcgaagaagctacgggtcaaactaatagagagacttaaggcacttccaccttcaatgtaactaccaaacttggtgattcctacggcttgtacaagagacacttctacgggttcaggagaagggataaaaaccggattcatcgggttatcacccatcccttggcccaccatgggttgatctacgatgaccgggttcactctataggctgcaagatgagccgcagggcccacaccacttagcatcaatagttgagggctcgcgatggcacctgctgataagatcacctcactcattgtcgagtcttgcgttgccaattctgccttgtaggacactccatttgcgtccagaaatatcaccccatatgctttgggcctctggttacctgtccaatagagaagtttcatatccggagcaatatacaaacaaataatatgtatggtaatgtgcaacaacgaatgactacgacggtgataatgaccaaacgatcgccataattgaataattcattataattaccaaaatgaacaactgaaagtcatgattcaaaattatagagatttaagagtaaaaaagaggtttctaatttgaagtttcagttttttgtaattagtgtatgttatcataaataatgtttgttttataaataagtatcataactatgttaaacatctttatgtttttttttttgttaaggaacatctacaagttataaccatgttctaatcaaaatataataatagatccttactacatgtaataaatatataaaaatcataatcgtaagcaagatttttaatatttcaataacaaattaaacacaagttgtgattaaaaaaaaaaaaaacaagtttgatcacgtgtaagctacgtctctctgactctcgctttgttttaggtttttcaggaacgttcctctctcttctttcatacctctcgttatggaaaaataaaataaattataagacatgtattcaattatcagtcgtcattacctttaatagtgaagaggatcttatggacagaagcatgcaagtagacaactatcatgttcggattagcatactccaacaaattcgccgccgtgtgtctatgaccatcccggtcaaatatcgtaccaccaaatttagtcccaacgatatgttcgtacgtgaaaccattgtatggagtcacaccagcttccaaaagcccatctcgaaacgctgattgccatttgttaaccggtggttcaaaaaccactttcttctcgacccactcgtaagccgcttcgacctcgtctctctcccatcctgcttccgccacgaaatcttcttccgcacgtgagtagaatcctgcgtttatgactgtgcctccaccgagtacacgagcgcgtgagttgaaaacgccgtcttcggagatgaaaagctgcgaccatgagtttggagttatgttcaagagtgtgtttgcgaagtttccgatgtctgttgccgctggatcgtcgtaaggggaacctccgcgttcgaggactagaacggttgcgttttgagagagcgttgcggctaatgcacatccagcggttcctcctccgatgattatgtagtcgaagtgagataactttggtgctaatgttgcatctttcataaatctatagtttccagctacacgaaaacatatttttcataaagttggagttcatattagtacactaaggtaaggtataacaaaaaaaaaaaaaaaaaaacataagttgaatgattggtaaaaggaaactaaaaattcacgtaccttcatcggaataacacgagtcgtggaagatgaaaactgcgacgaggataaattgaaaaaatcgaaagatatgaaaattcattatagaggaagattataggtttggttctttatctattggggccaaggaaaaaaaatatgctatttataaaccaacatttagaaaagaaaaaacaaacaggaacatctctcacggttgcggcaaaagtcttattcgatgataacctggcttcgacctctttattttttctagcacatttaagtcaacggattatagtattttccatcttagactttgatttgttacatagtaataattatacttttaaccccagggtccttattatacaaagtttaagtttttttgttgttgttttccaaaaaaatgatgatttgaccaaatcaaattattgtggtaattttgacgaggtggtgcagcatggctggccactatgttggaatccaagtggtcaagaaatgtgaataaaatggttttaagaaatgtataaaataacgaagctaataccaaagagttggctagactttaagttacattaattgccaaggcaaactagttgttggagtatttaaagaagactgtccaaatattgttggctattgactattgatgctgaaacttaaccataagtagaaactactcaaagaaatgtgtgatgcgttggctaaacaatatttatcatcacatgatcagaaagtttatcttgttctgcatatgaagtgaaatctgcccaattcgaaaagtcagcaattttggatacatattcgcaaatgagtcctaagaagagtttggttcattcatattaactacaccaaaataagaaagctacaaaaccaaatgtcttcataaagaaactaaccattattatcatccatcctattctcacacaagagttttaagaaaacaacttacaaggatggaccacttcctaaggttcatatgatatagtcaaaaccaaagtagtgcatcacagactagattgaccttaacgctaagatgctgtctctgcttcacagcatatgatagaataacctgtcaagatcaacccacccaatgttttaagaacttatgaacttgggttcttgagctcaccacaatcttcaatcacaactcgttcagaaggatttcccatgtcagagccaacatcctccattgccttgaccacattgtatccatcaacaactttcccgaaaacaacatgtttcccatcaagccacgaagtcttctctgtgcagatgaagaactgagaaccattagtgttgggaccagagttagccatagacaaaatccctggaccagtgtgcttcaacttgaagttctcatcttcaaatttagacccgtaaatagattctcctccagttccattcccacgagtgaaatctccaccttgacacatgaaccctgggattatacggtgaaaggctgagcctttgtagtgtaaagccttccctgctttcccaataccattctccccagtgcacaaagcacggaaattattagctgttctcggagtcacatctgcaaataactccattacaacacgccctgccttcatcttaccaatcaagatgtcgaagaagactttaggattcgccattttactctgtcaattacaaagatatgaatcagcagatggtcccaaattctaattggtatataagagactaaatcatgcaaacaaaggtcccaaattgttcaaacaacaacaattgtgagattaccactctatgagcaccttaaagtaaactagataaaacccaagtggtactattttccgatcaatgcagacgaataaggattcaattattcagatctgactcagattttctcatacaatgttaaaaatcataaaaccgattaataaatgtcccatccatcgaaattgtcgataagaaaagataaattcttataacacagagatttatcgaaacctcaaatggatggttttaggatattgcacaaatattgagctcgcaggcgttttttattatacgttatctgcaagccttcgatatgtgcttttaacgcgataaaacgcaaaatcgaagaaatagagaagcaaaaatcatcgaaaacatgaattgggttcaccgaaatgaagtacctttgcagaggcaatctcaaattcgtcttctcaaggagcgagtgaaggatttatataacggctcaatggcacaagggctttgggggctagggttttactagggcttttgattgtttgagttgagacagagagatctgttttctcggttttgcccttttttattttcttaccgtcacagtctcatcaaaaagcccatatgattcaggcccattattaaaactaccatccaagaaatataatcgtttcgttggacttggacccaacaacaaaccccatttcacattggttcgtgtgagctaattaaagctttaataagctatctaatttcaatctcgtgttgctatcttaataagctctttaacaacataaatctcaatgttttgagattgctttcaaagttaactatttgatgttcattacaagagactatatatatatgaacctagttgcttagatctaattaaatgagctttggaaaataaattacataggacacttgggcttttcggatgatttataatcttggccttattatgaatgctctaataaaacaagaagaaatggattctctggtcgcttggacttgtgttagtggtttattagcaaagagaaagtgtccaacaacagaagtgcaacagaagtgcagagtctttccgaaaaatcagatcatagaacaatgcttttgaagagatggttattaggtggacaagactctacattatatattataatattcagattatctttatactattaaccactccataatgttacaaacaaccaatcttaatgtaaaaagtgaaaaactaaatgagaagcaatatcagatattatagagctaataagattcttctttttcctctctaactctctttcttcaagaccgatctcacccaatgataagtgaaatggggcgacgataagacttcttcctctcaatatttactctaatgacttcagcatccttttgacttcagatgtttataaggtggacaagagtcagcactaaacagtatgtagtataatatttgacgttcaaactatctttatactactaatcactctacagtgttagaaatagacaattttaatgtaaaacgtggaaatcatcgattaggaaaaacaaatgttttcaattatggttggactgttgagggtttcaattatattgaccaccagagctaaccaaatatcattttctgattgacttccctcagaatatcttatactgattcctgaatatctttttaaaagggcttttcggatgtcatctttaataccagaaatagacttaggattctttgaccaaagagaaatagttcagatgtgtatgctatagatttttttgcacaaactctgaacctatctttcaatctaataggttatgatggaggtagatcattttataaagtgatttaatccatgaaccgattactcattttaacatctagttaatcaaatttaaattatttttgaaaaatcacaatggcaattttagtagtttatgctgaaattcacataattattttacttagataatagtattaattatccggtgattatccaaatcactattctgaaataatgaaattatataatggtccggtgattatccaaatcgtcatttcattagtttcattattgatttcataaaataactcaatgtctttaatattattcgtaaatgtctcttttaatcttatgtgttattttatatgtcattttaaaaaattgtcaaaactctctaaaattttaaatcgtcaaaatcatctaaatttttatctaaactcaaatcacttcaactccttcatcaaatcacttcacttcaaatcattggaattttgcattgaaacaaaatataatatttatttccaaaacatattcatttgattttggatctatttgtttgagccatagatggagaatctgctgacggaaatatatacccggcgtcaatgttgttcttggtatggatttcgttccatttatttgcttgttttagacagagagatgttttcttcgttttgccctcttatttcactattttacatttttgctttcaataacagttgtccaaaaagaaaaaaaaaagaaaaaactttcagtaacagatcaaaaagcccatattaagatttaggcccattatataaactccgtccgcgattgaattc

SEQ ID NO: 1364 - DNA, 99492 bp, Arabidopsis thaliana
gaattcaaaccaagataaccaaaaaccttagataaaccgcctcgattctcgctgaagaatcgacgaactctggaatcagcgtcgataaccgcgtccttccttcgtaaatccttggaaacgtctagtttcgataggagagacttaagccgatcgatttccgataagaaatcgtcggattccggaggagtcggtgtagaatactcgacaggtacggtggacacgtgtctcacctggtgattattacattgctgctcgctctgctgtaatttcgaggaaaatgacgaagaagaagagagaaagaggagtggttttctgaaatgcagagagctgaaggagcgaggagatgttgtagtgcgaaagtggaagagagagaggtgattttgggggtgatggagaattggagaagcttgaggattagccatggtgaagaagatggttacagaaggagaaggaagaaggggttttgaagagaaccccaaggagggataaggagagatactccaagcatatgcccagaatcactctctacgattgcttcttttctttcgctttttttttttgtctttaatgtgaaggaaaaaaaatataatccaatgagcttcgatcgaagggatttgattgtgtagaagatgatgtgtgattgtcgtgtgttgcaatctttaatctgacggttcagacgacaccattttggattacaccgatgggccatcttcattgttcatgtcgactccaacatttttagcataatatgtgacacaaagcgatattaattttgtttttgtgattgattatgttttgattattagctacgatatttgcatgtggatttaggaggtggagtgttaaatagtggagtacaaacgaaaacatttttaaattattcattgaattggtagcaccatcttcaactaaataaatttgaacgagcagaatttgtgaattatacttcagaacctgatgattaaacatatcaagaacatagtaacactaatttacaaagacagtaaccacccaccaacattatgcacaccaaaaaggggtattaccgtgattaggacattttctgtttacgacataaacgaccaaatagatccaccgaattttaaagccgttatataaactaagttccatacttatatatagatagatagatgaaagtagcctaaagagaagccaagagcttctaagagactcaaaaacctcactcaaatcttcatattaatacttacagatttttttgtgaagttcagtagttgtctcttcacgcagtggacagaacttccagctctgcccaccagagtggtgaaagttttgggatagtgtcgtctggtgataatccagtgatctctcgtaatctccctgtgacttccttcattatcggtctctgtttcgcgtctgctcttatgcagcttttgatcacttcacctatattctcaatcttctcgtcaaagctttcaattgtcggatccaccatctcccttaatgtctttcctctcaagaagacagccaatccggtatctatcgagtcacctttttgaactgactctgggagttttcctgtcatcagttcaaacaacagcaacccgaagctgtgaacattgtcttcttgtgttgtttctgagatgtttgtatctatgagtgcattggtgctgctttctgtctcggatgggccttttaaatatccaaaattgaaatccgcaattttgactgcgtagtcctctgtgagttgaactgatgatgagagaagattgctgtggactataggtggcttgagtccgtgcatatggtcaaggcaataagctatgcccattgctattcttagccgcattacccagtccaagtgttctgattctttatctgcagcaaaagtaaatattgttttcccacttttaatctgacaacttacagtgtaataatgactcatatgactaaagagctttgttacttacagtgtaaatgttcaaagactgttccgtttgatgcatattcaaagaccaagatcctagtgaaaggttcttcttcttcacagtaaccaagaaggttgacaaaattcttgtggtttatcttggataacatttcgatctgaaatcatcgaaaccataatcgataaggtgatagaaatcaaaatccttaaaatataagaaaactggttgaccggaaataccttctttctgaactgcatttctatattatttgtccattctttggcagacgcagtagcaacagaagccacagctatctccaccccacttgatagcgtccctttgaacaatgtaccaatggggcaagacccaatgacattactaaaatcttcacaggcagcttcaatctcagatcttttgagtttggggacacctgagtaacaaatcatacatcattaatatcgaaaagaaaaaaagtggagcgactattaaatctcatcttctagaaccaacaatgccacttcacatttttgtatcagggagtagaaaggcaattaccagttatgaacactttctgaagttgtccactaagacctgtacgccagggattcacagatttcccagccttacttttaaaaaagaaaacaccagtagctaaaaggaggataaacacagcacccgctatgcagccagccactataggaattgtgctgtttgaagaagttttggagctgcttgttagactaggtaaagtcacatggtgcacaaaaggaggtggagcagaaacatgttgcgcaggaggacttttttgtggcggaggcaatgtagaggatcttttggcatcaggtctcgtagaaaccgaagatgacggaggtgtagctcttgccacagggcggtccctgaacgcattcaaatgggtgtacgggttacgaaaacggccaagtaatttcctgtgaaaaccaactgctctcctgcaaaaaagacacgaggtataatgaatttgagtacaaaagggagaggaaatagaaacatgtttctaactcaaatggaaaaaatgattatgctacagcactatcaaagtaaatttagcaagtcttagaatacaaaatgcataaaacacagtgtcggtattcatgttgttaccactcagaaatagtattagttcactaaaaaaattcatagatctactataccaactacattgatgttgatactcagccaaaattcattttacaaatcatgttagcaaaactattcattatacatttactacaacattagatcttagcaagctcagaaacctaaattgcaaaagtaaatacaccaacaaacacctcagctcaagaactagcaacaagttctaaaactgaaaatcaacaagagctatttaatctttatcaagcagctgcgttaaaaattcaacaaactaaaaacattcacagaacaaaaatcgaaagctgatacttacaaatcctcagcatctatatctgaccatagatctttcgtcacggattccagaaaaccatcacctgaaagccaaaatcgaaactaacaattatgaggaactatccttctatgtatcggcacaccaaaaaatagaaacaaaaacggtaaataccttgagatttcaacgaatagcaagaaccgaagctcaaaatcaccagaagaaacacgagagtacgattttgaagccttaatcgaacggatttccagttgttactcatcgtcagactaaaaaaaacaaaaccgagcagaagctaaaggagcacggagaagctgataaatccaagtctcgatctatcacagattcgaagaaaagcaaaaagttagagagagctttgagtttgagttcgcatggcggaggagacgaattgagaggaggagtaacatgacttttcaacttttgttaaaagcgcgtgtccccgtggtttggcccgataataaattaaagaaggatacaatagtaaaagcatttacttcttcttgttgacaataagaaaaaaacaatctcgtgaaagagtatctatttctaattttttctatagtattcaactgtataacactagagtaaccatttatcaattagatatttttgtatagtaaaatacataaaaaatgatataaaatagaagaatctatggacctgaagatgccagagctaagaggattcaaaagaagaggccaaagacaccgtcgaaaaagacttttgatgttatagcactattgtggaaaatcgtttaggctcgctctctctattgtgcaatgtgtttttttttttttacaaaggagaaaacctgaagatggtgggggtataaatgccacgtggaatatagttatgatgtgttggataatggaatgattgaagatgaatgattgtgtttgtggcattatggattaagaaaatgtggagggagttttctgatgaccaattcaacgtggatgttttttctttgtttttgttttgttgcttcgttgttaatttcttcgttttcaatccaagtctttgccatgtgggtagagtcatggatgtaatgggaatatgccccattaatacatattttcatttaatttatttatgtatacttttctcaatatttctcagatgtttgttagtgtatatatactgtatactgtagatagaagtattccataattgttgcattcacacagcccacgttttctgatgatttatctaattaaaaggagagaaagctcaaatttcgcccccacgatcgaatgtccgtcgaagttttgatctatcaatttatttttttatcggcttaagagcaaattttatagtaagtaaagttaattatccatattagtcagatcaatcagagaacattttcggaaatgtatgttaggaatgaatagtatattaaaaggttgactagtaacggtttcgccgtaatttgaaagccatcgggttttgattggttgaaagaaagaacaatcatttttattattatgaatttacaaattcaccggcatatctacgcgtcgtacgtaatctaacttcatccttacgtaattctatgctgtctttgttttgacctaaagagtctgcacaagcacattcatgggcactttgcttaaataaattgacattgctgcggcacaatacttaaaaactgggcgttatgggattaaaaaaattgcgaaaccttaaagggccatgcattagttaaatttgtcattgacttattaattggtaccaacaatgcatatggtacgtagctgtgtgaatgatctaggattcaaaaccatagtatagaaaatattatttgatattttggtagacttaggaccatatgaaaatattattaaagatcttttaataaaatatttttttgagtataaactaacttaagctgcaatcacatgttaggcgtacatatgcatgttagattgtttatttttgacgtcacatcttatatactttatatgttatgttattgatttaacttttgatatacgattctttcaaaaccttacatgttctaatctcttttttacaaccatgcatacctcataactaaaagataattctctaactcgttattcaattaggagaacaaatattttcaaatttaacatcatcgaatatgatcctagcagattggattaagaaaaatcatgaaatatatattccaactaaacaaagaatgcgaaaaagatatgaaaataattttggagcacaccaaaggatttgtagtccttttcagctccattttggagctctctagtaggccagatcccaaataataaattttccatttttaaaattttgtgtatgcaattgactgccctaccgtcttgttcactattactatacattgagtgagacttgtgaggattgacctttcataatcaaatttgttgacgttatacttgtgcagaagtatgttactaaaaagtaaaaatataatcaacgatggcatgggaaaaaatgaatatgaaggttgattgcaaaatacgcttgaaccttgatagtttttgccttacacctcatttggattttcattgcaatgtcgggataaattaggcaatcttatcaggaatatatatcaacacataagaatatatttacaacatttaatctatccttactaagaacaaatttcttaaatttgcaacaataaggcaattcatccttttattgtctaaggccattatcaacaaggatatgtatcaagtgtttcagtcggttataaatgactttagtgcaacagaaaaccccatttgtaagattcatgaaatatgtgatatacactatagtgaatgtcttcgtttggagcaacgaacaccaaacaacaatatcttttagcatatgtacttagaaatctcatgtttcttcctcttttcctcggaaagccatcctctctcgaagaatcttctgccccatatatctacacattacaattttccaacaatcatattttgaaaaaaaaagattaaaaacatgtttagatcatttgtatcaattggtttctgcgtgtttttaccttccgagcatcatgattgtggcctgtggattagtccccggagacttgagaaacgtggatccatcgatgatcctcaaagcatcaacccctaatactttgtaattgttgtcgaccacttttccaacttgacaacctccatggtaatgataaatagtcatcacggtatcgatacaatactgctccaaatcaaacgttgaagttatgtgtcttggccttaaattagtgggaagagcaagaatgagatttagtagtccacgtgcactcgctaaagggtacttgtacttggagtatcccttcgaatctatcactttaataatggtactaagtccttcaacacacttgttcaaatcctctggatccttaaagtagttgaatgtcactgaagggttatcatctggattcgtattccgcaactccaagtgacctctcgagagcggtccattcactttttggatgatcacacccgcttttgtagtcacgttcaaggtaagatccaaagatttgaaaaactttgagatggattgggtaggaagttttgtctgcatataaaacatcaatatcaaaaaatatcttatgaagtcttgtgttaacaaaatttgtaacatttaagagtgttaattgattatacctttttaagaagattcaaaacaccatcgaagaagctacgggtcaaactaatagagagacttaaggcacttccaccttcaatgtaactaccaaacttggtgattcctacggcttgtacaagagacacttctacgggttcaggagaagggataaaaaccggattcatcgggttatcacccatcccttggcccaccatgggttgatctacgatgaccgggttcactctataggctgcaagatgagccgcagggcccacaccacttagcatcaatagttgagggctcgcgatggcacctgctgataagatcacctcactcattgtcgagtcttgcgttgccaattctgccttgtaggacactccatttgcgtccagaaatatcaccccatatgctttgggcctctggttacctgtccaatagagaagtttcatatccggagcaatatacaaacaaataatatgtatggtaatgtgcaacaacgaatgactacgacggtgataatgaccaaacgatcgccataattgaataattcattataattaccaaaatgaacaactgaaagtcatgattcaaaattatagagatttaagagtaaaaaagaggtttctaatttgaagtttcagttttttgtaattagtgtatgttatcataaataatgtttgttttataaataagtatcataactatgttaaacatctttatgtttttttttttgttaaggaacatctacaagttataaccatgttctaatcaaaatataataatagatccttactacatgtaataaatatataaaaatcataatcgtaagcaagatttttaatatttcaataacaaattaaacacaagttgtgattaaaaaaaaaaaaaacaagtttgatcacgtgtaagctacgtctctctgactctcgctttgttttaggtttttcaggaacgttcctctctcttctttcatacctctcgttatggaaaaataaaataaattataagacatgtattcaattatcagtcgtcattacctttaatagtgaagaggatcttatggacagaagcatgcaagtagacaactatcatgttcggattagcatactccaacaaattcgccgccgtgtgtctatgaccatcccggtcaaatatcgtaccaccaaatttagtcccaacgatatgttcgtacgtgaaaccattgtatggagtcacaccagcttccaaaagcccatctcgaaacgctgattgccatttgttaaccggtggttcaaaaaccactttcttctcgacccactcgtaagccgcttcgacctcgtctctctcccatcctgcttccgccacgaaatcttcttccgcacgtgagtagaatcctgcgtttatgactgtgcctccaccgagtacacgagcgcgtgagttgaaaacgccgtcttcggagatgaaaagctgcgaccatgagtttggagttatgttcaagagtgtgtttgcgaagtttccgatgtctgttgccgctggatcgtcgtaaggggaacctccgcgttcgaggactagaacggttgcgttttgagagagcgttgcggctaatgcacatccagcggttcctcctccgatgattatgtagtcgaagtgagataactttggtgctaatgttgcatctttcataaatctatagtttccagctacacgaaaacatatttttcataaagttggagttcatattagtacactaaggtaaggtataacaaaaaaaaaaaaaaaaaaacataagttgaatgattggtaaaaggaaactaaaaattcacgtaccttcatcggaataacacgagtcgtggaagatgaaaactgcgacgaggataaattgaaaaaatcgaaagatatgaaaattcattatagaggaagattataggtttggttctttatctattggggccaaggaaaaaaaatatgctatttataaaccaacatttagaaaagaaaaaacaaacaggaacatctctcacggttgcggcaaaagtcttattcgatgataacctggcttcgacctctttattttttctagcacatttaagtcaacggattatagtattttccatcttagactttgatttgttacatagtaataattatacttttaaccccagggtccttattatacaaagtttaagtttttttgttgttgttttccaaaaaaatgatgatttgaccaaatcaaattattgtggtaattttgacgaggtggtgcagcatggctggccactatgttggaatccaagtggtcaagaaatgtgaataaaatggttttaagaaatgtataaaataacgaagctaataccaaagagttggctagactttaagttacattaattgccaaggcaaactagttgttggagtatttaaagaagactgtccaaatattgttggctattgactattgatgctgaaacttaaccataagtagaaactactcaaagaaatgtgtgatgcgttggctaaacaatatttatcatcacatgatcagaaagtttatcttgttctgcatatgaagtgaaatctgcccaattcgaaaagtcagcaattttggatacatattcgcaaatgagtcctaagaagagtttggttcattcatattaactacaccaaaataagaaagctacaaaaccaaatgtcttcataaagaaactaaccattattatcatccatcctattctcacacaagagttttaagaaaacaacttacaaggatggaccacttcctaaggttcatatgatatagtcaaaaccaaagtagtgcatcacagactagattgaccttaacgctaagatgctgtctctgcttcacagcatatgatagaataacctgtcaagatcaacccacccaatgttttaagaacttatgaacttgggttcttgagctcaccacaatcttcaatcacaactcgttcagaaggatttcccatgtcagagccaacatcctccattgccttgaccacattgtatccatcaacaactttcccgaaaacaacatgtttcccatcaagccacgaagtcttctctgtgcagatgaagaactgagaaccattagtgttgggaccagagttagccatagacaaaatccctggaccagtgtgcttcaacttgaagttctcatcttcaaatttagacccgtaaatagattctcctccagttccattcccacgagtgaaatctccaccttgacacatgaaccctgggattatacggtgaaaggctgagcctttgtagtgtaaagccttccctgctttcccaataccattctccccagtgcacaaagcacggaaattattagctgttctcggagtcacatctgcaaataactccattacaacacgccctgccttcatcttaccaatcaagatgtcgaagaagactttaggattcgccattttactctgtcaattacaaagatatgaatcagcagatggtcccaaattctaattggtatataagagactaaatcatgcaaacaaaggtcccaaattgttcaaacaacaacaattgtgagattaccactctatgagcaccttaaagtaaactagataaaacccaagtggtactattttccgatcaatgcagacgaataaggattcaattattcagatctgactcagattttctcatacaatgttaaaaatcataaaaccgattaataaatgtcccatccatcgaaattgtcgataagaaaagataaattcttataacacagagatttatcgaaacctcaaatggatggttttaggatattgcacaaatattgagctcgcaggcgttttttattatacgttatctgcaagccttcgatatgtgcttttaacgcgataaaacgcaaaatcgaagaaatagagaagcaaaaatcatcgaaaacatgaattgggttcaccgaaatgaagtacctttgcagaggcaatctcaaattcgtcttctcaaggagcgagtgaaggatttatataacggctcaatggcacaagggctttgggggctagggttttactagggcttttgattgtttgagttgagacagagagatctgttttctcggttttgcccttttttattttcttaccgtcacagtctcatcaaaaagcccatatgattcaggcccattattaaaactaccatccaagaaatataatcgtttcgttggacttggacccaacaacaaaccccatttcacattggttcgtgtgagctaattaaagctttaataagctatctaatttcaatctcgtgttgctatcttaataagctctttaacaacataaatctcaatgttttgagattgctttcaaagttaactatttgatgttcattacaagagactatatatatatgaacctagttgcttagatctaattaaatgagctttggaaaataaattacataggacacttgggcttttcggatgatttataatcttggccttattatgaatgctctaataaaacaagaagaaatggattctctggtcgcttggacttgtgttagtggtttattagcaaagagaaagtgtccaacaacagaagtgcaacagaagtgcagagtctttccgaaaaatcagatcatagaacaatgcttttgaagagatggttattaggtggacaagactctacattatatattataatattcagattatctttatactattaaccactccataatgttacaaacaaccaatcttaatgtaaaaagtgaaaaactaaatgagaagcaatatcagatattatagagctaataagattcttctttttcctctctaactctctttcttcaagaccgatctcacccaatgataagtgaaatggggcgacgataagacttcttcctctcaatatttactctaatgacttcagcatccttttgacttcagatgtttataaggtggacaagagtcagcactaaacagtatgtagtataatatttgacgttcaaactatctttatactactaatcactctacagtgttagaaatagacaattttaatgtaaaacgtggaaatcatcgattaggaaaaacaaatgttttcaattatggttggactgttgagggtttcaattatattgaccaccagagctaaccaaatatcattttctgattgacttccctcagaatatcttatactgattcctgaatatctttttaaaagggcttttcggatgtcatctttaataccagaaatagacttaggattctttgaccaaagagaaatagttcagatgtgtatgctatagatttttttgcacaaactctgaacctatctttcaatctaataggttatgatggaggtagatcattttataaagtgatttaatccatgaaccgattactcattttaacatctagttaatcaaatttaaattatttttgaaaaatcacaatggcaattttagtagtttatgctgaaattcacataattattttacttagataatagtattaattatccggtgattatccaaatcactattctgaaataatgaaattatataatggtccggtgattatccaaatcgtcatttcattagtttcattattgatttcataaaataactcaatgtctttaatattattcgtaaatgtctcttttaatcttatgtgttattttatatgtcattttaaaaaattgtcaaaactctctaaaattttaaatcgtcaaaatcatctaaatttttatctaaactcaaatcacttcaactccttcatcaaatcacttcacttcaaatcattggaattttgcattgaaacaaaatataatatttatttccaaaacatattcatttgattttggatctatttgtttgagccatagatggagaatctgctgacggaaatatatacccggcgtcaatgttgttcttggtatggatttcgttccatttatttgcttgttttagacagagagatgttttcttcgttttgccctcttatttcactattttacatttttgctttcaataacagttgtccaaaaagaaaaaaaaaagaaaaaactttcagtaacagatcaaaaagcccatattaagatttaggcccattatataaactccgtccgcgattgaattcaatcggttcgttggacccaacaacaaacccaatttcaagttcgttttactcataccatgtcttttttttttaactcataccatgtcttctaaaaatcaaaactaaaactgaatcaaatggaaggaaaaatattatatttatacttcaaactttatagttaaaagacacattatcacaagaatctaacgtttaacttgattcctataaggctatactttccaaaccaaaaaaaaacttcaaattaagagtatccgcaccaaaaatcattgaacagccctaatcaaaacgaaaatgaacaagatttgttaaagagaatgatgaatgttgtgtttaaggacgccaagaagatttcaagccaacaaggaatttgcctctgtacagattcgttgaccatcggagtgataaaagaatagggtttagcttctttagcatttcgacagtgtcttgcaccgcaagataccctcctggtcttagtattcggtctatttccactaccacctccatcaaatcacacctgagaatatcaaaatcaaaaacaacatgtagttttagctatagatcgaaaagtcaaaacaacttgcaagaatcataaattttacctttgagaaagattggtaaaaaggaaactagagtgcaagagatcatatgatcttgggtatgtattgaacgactcacaccaatcatggtatatccctatcaaacctctatcaaaaatcgtcgataacgtgtcttcaccttctacaggaatcacattcatcacccacagaggtttgtttataagagcagccgcaaatctgaaaaggaagatatgaacaaatggtaaacaagagagaaatgaatcatttgtgaagtatatagtgaaatattgtctcaccctccataaccagcgttcatgtccataacattgtgaatcctagtccagtttatagctaaactatataggtagatattagacatgactccagaccagagtttgctgtcttctctgaaactctcttcactcctctgctctctaaagaggctaaccggtgtctccgttaacctctcaggccaaccggaaggccatttccctattggactgaccggtagtttcggtagacaagtaagcagaggagtgtaccttttgattcgaaaaaattgttatgaattggtttaagagacatcaaaaactctgttttttttgttgaaatcatatatttaaggatacaatgtcattaccatgaactgttcttcttggtctcttcttcaatgcagagaggcggatctttgtttttacgagattcataacaagaatctgagtctggtttctggtaaatcacgaatccaactttagtgaatcgagttctagccacaactttccaacacattgatgtagtcaaagactccattgctgcaagaaaaacacatacaaaccataaaacattcacaaacttcttctgtatgctaattaaacataatgaggagggactaagaagaacaagtaaaactaacttttccaaacattacggtgcccttcgtcgtgttgataaactggtgtagctgaccaaacaaaaaaccctccaggccttagaacccggttaagttccaaaagtggtctaccacctgcaacaacacatttccatataacaacagtattaacaaagcaagcaagttcactgattcaaaagcaaggatatatttggagtataacaaccgtatccatgccaatggactctgcatctagcgcaatggattacgtcgtaagcattatcaggaaaaggaagcttttgagttccaataacagcgagtgtagcgggaatccctcgttccagtgcgaactgaatctgagcttcgtgttcgtctttaggagcaaatgacattgtgataacgttcttatcaagtaaagtcccaccaaagctagccacaccacaaccaacatctagaaccactcttactttcttcccccaatcaagaataggtaacgtctataaaaagaaaacagtaactcagtaaaactgaatcaatcttttggatatgtaaatatgtttttttaccttttgtatgaagttgatgtagtgaataacaccgtctttgaattgagttccacctccagggaagacaaagaaaggtccagatttacgaacccaattctgatctttcttgtattctacaagtttcggatgaggaacattatcataccaaatctgcagacacaagaaaaacaagaatttagaaagcagaggaatcacaatcttcacaagcaagtaacaagaaaagatcttaccgaaaaaatagaaacgagtctctcaccatgtctctactctgaggccaaggaagaggaactttgtaatgttgtggcaaaggaaccaaacattttggtgaacgctcaggacaatgtctctctctgtgctccatgtttctcttcgacttaagtttcttgatagcttttgtgttatccaaacacggtatgtaatctggactctcacatctcttccaatctatcttcaaactcacgttccattgtttgtcatctttaagccaatccaattccaaaccttgatcatcaggatgatcatcgactcgggtttgattaaccggtgattccagaggaggtgatgagtcgttggtgggactcgagattggcgtggaggtagggatgacggagagagaagatcgagggagataagggagagacaagtaagggaagagatcgatggtatcattggtcaagaggaggattgtgactgatacgagcaagattgagagaacacagagacctgagagtttccgactttggaagatgttcttgatcattctttcttcgtttttccacacaacagagagagattactctgatcgatctttgagagagagatattgaagttatgtgtaaagagccaaaaatagaaaacaagatgggcaataatatatatgacatgtgtcatgctattacttgctctgacgtgatgtgagatatggaaagtaatctcatatctttatgacgttatgattgtatagtttgatgtccaagttagtggatgagaatattacaaggagttggaaaataacataagtgtatcttttgcttttggagtcttctcaattgtctcagtgattttttttgaagttgcaatccagaacgaaaaagattaagaaaattgttcaaatgaacaagaattgatgatctttgtaagtgaagaaaccaaaagctatcaaaattgaatgttactctcatggatcagtataacttcatgtgaacaaattgcttaacataggcccatatccacttatggtgaaagcaaggcaaagtaaaagaagtataaaaataaaacaactaactatcgcccaccgtggggctcgaacccacgaccacaaggttaagagccttgcgctctaccaactgagctagacgggcttgttgtatgatttcaccaagtctaagctataatcttaccaaaaccgtaaatggtctttatttttggtgacttcaaataattagtgagttttaacaaaaaggttgatcatagttttcaaatgaattggggccttcacccatagcatgccatgttgatcaaataactttttttttctacctctcaatttatacaattttactaaaattttaattttgatatttgttttttgcacaatataaaatcaaagtatttagaatatttgatacatgtgaataaataatcaattgtctttcatgatcatcatattgtgtcaaaaaaagatcatcgtataaagaagaaaaaaagagtagttgtaattgtgagattttgattggtatatgagaaaatgataaattgactcaaaactttgtaagtatggacactcactcagtttgtagttttcttggatagagaatgttttggtaccactttgttgataaaacatactactttcatgcaggggtaatagaaaatatcagtgaccattacattacacctcaaaacaactgctgatttgaaatgttctaaaggaaagtgatattacgaagtggacaaaaccataatactgaaaacacaaagaaagttaaccccaaggagcgtaatagcttgttttctctcacaacagaatcgatattgatcaaatctaccttaaaagttacatctcatactcaaaataactcaaaagttaaccaaactgcgagattacagctaaaactcagattaagcagcagcaccaagaagctcctgatcgaaatgccatgttcctgattacaaataaacaaagtgtaagacacgaagtggacgaattgaggtgtgttttattagttttaaattgaataaacaaatggttaccatgtcctttgccaagtctcctaagttgagaaacatattctgagattttcttaatggcttccacctgcaaagtgatgttaattaaacttcattagattccatttttgacagatcaagaaccccatatctttgccactaacatagaacgtgtaggtcttttgttttacctgttcgttcagaaacacactctcaataaaatctgccaactggacatcatcgttcttggaagccacctgttgaccacattattcaaataccaagttgtattaagaaactagattatgacttgaataccataaacaagaactggatcctaatgagagagatggtcttacactgtgcaggtttaggagcttttcattgactagtttctccaatgaaagagccaactccatagctgcaaaaacaacaatcaacatgaaattaagctttccaatcttaaaactcaacacaatcactatattagatcctactgagacccaacaatcctcctcttcactaataacatcacatgtatgtcaactctgaagtcttaagaaactacagatactttgtactggaattctttatctaaaatctcagaaatggaaatgaagcttaccatagagagcatctcctttctcaggatgatcaaactcagactgaggcaacaccatgggctgtaacttgaccctcccaccacgtttgttctgtagatcaagaaaaccaaaaatgtaagatgttacaaacttagctcaaatgatcataaggcttatgaatgataacaaaatgaaatcattagtcaaagacctgatactccatcaacagctcagcgtgctctcgttcttccacactcgattccttgaaaaacctgattcagcaaaaaacaccaaacaacagataattcatcatcacacagaacgaatatcagcacagagatttcaataccagagaaaaactcacttggcgagacccttgagggcaacgttgtcacgatcgaaatatgcatacaaagcgtgatacacatacgacacgttatactcaacactgcatcaaacgaaaatccagattcatgagagactcaaaataaaagccaatctcatctatataggattcaagcaaaaattgactcaatcaacagatttacaataacaattttcaaatccatgataacaatcactaaaatgtttcaatccaagacggaaaaacgtacttgatctgctcattgacggcggcttcgcactcaggggagtacaaatgacgagcaagagaaagctgttgaccagatggaactagatccatctctttcttaacctcttcgaaaggctcgaacacaacgccgctcaacgtgcttgtggtagtggttgaactcttggaagcacgaagagggaaagagagattgccggattttccagaagaaaccggagacgaaatggaggaggaggaggagaagagaggagagatgtctttcttctctccatgaatgttcaatagagagaaagtagaagcagctttgagaagcattttgttttcctgtgtgcgacgaaattggaggagaaagggttttgtggtgaggcgattggtggtggcggaggagggaatataaagtgaggtgatatgggatgatgaggctgtggattgttgacacgtggatggatacgattgagaggtgggtttgggcgcgtgtcaggcgtgtggtgcattgctttgctggcagatattttttttccgttggtatttgtgtaattttggcctctctttttttggatttttcttattttccttttcggctttttttttttctgtcaagagaaaatacatttttcttagtgagaaaaaggaataaactcaataaaatatgtataggtttgaaaatagtaattcttatagtgtttagaaattttttagactgttcaaaatttctctaaattgtacaattattaatacttgtatttattatgagtgatactaattttttttaatataaattttattggatttaaataatctcgaaccttaacaatttgattagtcatgaaaaattataaattctcaaatttctctcctgagattaaaagaattccatctttgaaatccatttcatttcatcttctaaaaatgaaatcttggcacttgttggctgttgctttaactttgattatatactggtttacatttttctggctagtgcgtatctttgtactcttatgtgtttatgttttggcaaatgtgtgagcattttcattctttacataggtacctaaactttcattcttgttggactttggttagttgtttgaatcttctcaatgtcctctccttttcagtatatggtgtaaatggtgctttaaaacttacctaaatttttactgtagatggtgaaactcatttctagtagtaccttcttcaaaacccaaatttttcactgtgctcaaaagacagagactacttgatgaaagagacactatttacaaacataaactgatgaagaaatggttcaaaacactgaaacaaacaaagaacaaaaaaacaacttggaagaattaaagaattgcaaaagaaatcaactactactctgcaacatttccacactacaaaaattctccactctttctattgacttgtggaagcagaagcttcagggacatcaatcaacggttctgatgttgttgctgttgtctcttccggtctaatctctccaagttgtgtcatcacttgttgagcttcaggtcttgttgatggtgtagcatcaacacaatgtaaagccagtttcagtgtattcaaaatctcatcacccattgtgttcacatcattcaacagctccaaatcaaaaacctcattagtccactcttctttaaccgcagtagcaacccattgaggcaaatccacaccgtttaaggcctcactcggagatttcccagtcaacagttccaatatgatcacaccgaggctgtacacatcggttttcgtgttggctttcttcagcttagagagctcaggtgctctgtaacctaacgcaccagctgttgcaatcacgctggatcctgctgctgctgtcattagccttgagagaccgtaatctgagatcttcgcggttatgttctcatccaaaagcacattgcttgatgttaagtttccgtggatgatatttgcgtgtgtgtgaaggtagaacaagcctcgagccattccctttattaagctcatccttgtaggccaattgatatgtacatctggtcctcttgctgcaatttcaaatatgaaaacagagttacaaaatggtacttgtaaagcaaaattgtctttaactttaagactttagtatcaaacttaccatggagaaacgtggcaaggcttcctctagacatgtaatcgaagacgacaagcttctctcctttagggcctaagtaataagctctgagtgcaaggagattcggatgccggattcttcccaagacgttaatctcattctcaaactctttttgacttttggtgatctttctctcaatctcttcactgctacttgacttccatcttcaagtgtagctttgtacacagtcccataagtgcttttccccattatctctgctgttgcacacaaaagatcatctgcagtaaacgccattggtccatcaaaatgaaccagcttccctccagtttcacctccagcttcagcttcccctcctttctcagtctttgcggctacagctccaggtccagcctctccgcccttggctttggtttcattggctttcttcctcagcaagcaacatagaacacaaacaaggataagcataactatgaggagtgctccagacgcaatgaggatgatgtctttggtactcagattcctgtgggatggtttcctttctttttcaggagacggtgaaggaagagtaggacatggtgtcgaaacgctgtatccgcaaagcagtgagttcccgacaaaagaagaggaattgaacttttgggacaagagagtaggaacaggaccagataagttgttataagagacattgaagaagttcaggctttccaggtcagaaatcgaaataggaatctctccggtgagtttgttttgagacaaatccaaatgtataagagaagaaatgttccctagggtttcagggatatggccactaacactgttaccactaatatccatttttctaagcttagtgagtttgcttagctcagagggtagggttccacggatcctattatgactaaaggaaaaaatcttgcagctgagttaagttgcagagtgaaaatgggaacggaccagagagagagttgtgatcaagagataagacacggagattaagagacttactaccccaagtatctaagattggaccagagaggttgttatggtcaagagcaagaaactgaagggaagaagaccgagagagactcactgggatttgaccagacagtgaattaaagctgagattaagcctaagaagcttagaagagtcagcaagattcggtggaataatctcagagagcaagttattgctgagatcaagcgtttgaaggaaatgtgatacaccgagagaagcagggattgagccagtgagacggttgttgaaaagctgaactcctctaagattaggaatgagtcccaatgacattggaatcgaacctccaaggttgttgtcatgaagactaagcttacgaagagcttgaagctgtccgattttctcagagattctacctccaagactcttccatggaagttgaatgacgatgacttgaccttgagcacattttattccagcccagcctccagagcaagcactgaatccagaaccgttccagcttctcaagaagcctcttggatcaatcagttcttgtttaactgcttgaagaccttggtaatcagcttgtgttatcactacaccatcccaggcttggcttgagcagggagggacgaagaagaggaggcatatgattagatgaaggagaaatcggcttcgaagtgaagccttaggttgatcaatgtcggtgttgatcatactcagagaagtaatagcttggttttgggtgataaactccattagaagatgaagaagaagaagaagagagaagaaagaagataattggagttctttatgggtgaatagtagttgtgatgaggatggaacagggaaagattttggatttgaaagagttttgtaaagagagagatgggtttcgttggaaaagaacaacagagcacgtgaccatcttagagagagagagagaatcttggtctgtgttcttttatcttgtagtgagagagaagtgagagaaagagagagaagggagacaaagatcaggtgatggtaataagaggttggggggtgggaacagtggatctctctgttctggcctaatattagtaaatgggctccaacggctagtttcatttattcatattagttacttgtgtttaatagtgttttgaaaacactttgttttgttcgatgggttgctcttgctcatgtcattttgtttaacagtgtttagtaaaatactagtatatggatttcattgggaatttggaattactaatacataaaggtagattttgttaactaagtatcaaaaaacgataaaaaatcattaatcacaatacaaacatgttggttctgacaaagatgaaaaatttactagtattacaaaaacaaaaattttgatttgtcaagagtactatcatgcttcgaatttgaaccagtaatatattacttacattcaaatttaccagttgttttcttggaatcttttttttatagctcttagttgtttgtatgtgaggtcaacattatttaattttattccaaatctaaggaaagagatcaaagtattgttcttccgaataaagtaacaaataaagcagacaacataattttattttattcttgcagaccagcttcgtttaatgcgtcggagctgcctaatggacacgacacacgaacaacaaaccgctccgctccttcacttctcctcctaacggctatatttgtgggacctacaagccattggatcactagatcttgtaaagaagcccaaaggaaatgaacaagccattttatttatggttactgactaaaatgccctcgcaaatggaaagtaaataaagtagtacagtttcagaagaagcagacacacaactttgaaacttgaaagtgaaacttttcctggcttacaattaaacaaagaaaagaagggaagggttgtgccgtacgaggttattatgttgacgctgatctatctttgccctttttaacataaggctggtacacgtgtttaaagtgtttggatactagatgtggaggttttgaacttcaatttttttaaaaattcttgcatatacatttttcacttcaaacacattttctgaacatataccaaacctgaccatttctcttatgaacaagtcatctctataatgaagtctataatgacatatcactcctgtggttgcaagaacaaaattctggagacactcttaccttgaactcaaatggtatgtcatgtattgtaaatactatatcacaagattagtaattctcaagccataaggtttggaggaatcgaaacaagatggtttccgaaggcgaattttatcatgctgatgaagctgttgctaaagcaattagatattagccccgggaaaaataaagtccaaacaatctctcaaagttaaactgtactcaaaccatcaacctcgaaccccaaagcaaagcctaattttgtgaacaataaaccaactaacaatgccctacttttataatcggatcatcctcatgtccaccaaatctgttaataagttttatatttcacaaagtgggaactatgagcaaattagcagattgatactagttaggaaaggcaagacagtcatatatatgactatattccatccataaaagcatgaaagttacttacttcaaatcacaaaccaatgagaaaatataggagataaccacagttgagacttattaacactaaattagattaatatatactaactcgccactagaccatcaatgcaacagctatgaacactaacctaataaacgaaaaagattccatgtgcgttaacattgaaagtaacgtaaatctcaaatacgaagatgacaaaacaagggttaagagagttcaccagttataccccaaatcgatcttctctaagtgattggctactatcctttacaagccacaaataaatggatcatgaaaacaaagaacatgcaccaagaagtacatataaacatttaacagaaatcacctaccaataccatacatcattttgaaactactcaattttctagctaagtgcttccagatgaaactattatgtcactgaatctccattaaactactaaagaacactaaacgtaactagaacttaccatgatcagcccaattgcagtaatatccttattcattttggtgaagaatgctctgaaagtcaatgctactgataaaggaaaaaagagaacaaactgatttgaaggtagatgaaattttaaaagtgaatcccacaataggagaaacgatagagaaagatcaactttgagttttctacatctgaacataaaagtgtcgagccaccaaagagataaaacaacaagaagaagcagatactgcaaccaaaaattcgtagttctaaatctgtagagcttcgttacgaatctacattccatttcaacaacaacaaatcactaaaatcagtacggagttaccaaccacaattgacgagatctgaatcaaatccagctcttagactctccctgagacagctgcagcagctgaggtagcagaacctccaaggaatgagagtaatccagcattcgcaggctcttgctcgtccaagaagagatcatccggaaccacaaacgcaccgtgtacgcaaacgattgcaacaccaatcataagcgcggaggttaagagagatccaacgctcgtcataaacacgacgacgatcgtagacagcacaagagcaagcagagtctctcgatcagagaaagtgcgaccgaagacgaccagtggctgatctgagggacggaagaggtagagaaacatccaaccgcctaggagtccgatgaggacaaggagggagagaggatgagagaaaagcgaaaaggcgagtacgagggagacgatggcgacgtagttaaccttgaagtaagcgagattcttccttatccgggacaaggcatcggtgagagattcaggtctcgccatggaactacgatcgatgagctccgtccatggacgacgctgtgacaagccatcacggatcgaggtggagagacgtgagaagaaagtacgaaaagcaggtgtgttgattggaggctgagattgaacagcttgctgattggtgacaggtagcgtcggtggagttgccattgcggcggcgcgtgaggttagatgcggctgatttggctgagaagtttcgatccgttagtctgaaacgaaaaaaattcaagagctgaagttgctgaatcagagctccgtgtagattagatattctagggcctgagcctgaccataaaggttaaaccggcccaaaacctcaagtcgctggttcgattcctcctcgtgcttttaaacaatgttttatttttgtttttggattttttttttttttaatcaaaccctaaaataccgagagagcacgactaacgtcttcactgacgccacggtctgggtggttcattcttcttcttccgccgatttcttcacattttctctttctggtattcaaacattgtaaaacgacaccgttagcaccatgtttgatgaaagcaagttcgatgtcaatctcaagctctgggctcttagaattccccgtgaactctgtaaaagcgcatctcgcattctcaatgggtacgtttcttcaataactcaacttactgtgcaaaggatcatctgttagtaattgcatttatagataagtagttaggaactttgtgaaatcaagttcggagcttatgagaattgaattgtgttttaatgtggtttggtttgtgtacttattgatgaaaaggaaatttcttggtttgattacttgtagatacatgcttaacatgccgcgaattaagcccatcactgaagatcctacctgtgaaaagactcgtttggtgatattgtccgaaagtgttaaaaatgctggtaagagtttattctttatctgggaatgtgtctaggaagtagtgggattattcgtattaaccaagtttttctttgttataagacagatttgtcggagatacccgaggaaaaactaaaccagcttaagaaacttagtgaacttgaggttgttcctcattcggttactcttgggtattcctattggagtgcaggtaagacaacaattaggaagatcttttccattgcgtttgtatttttcgaattaccaggacgtttagaagagctagtgtttctgcatgctatcctttatggtctgtttgatacaatcttctcctgagatctttcatctaatgcttgtttagagtctttataaatttgtatgagaaaagttggtcccatttccttgtaactcttgttccttcgtctccgtcgtcaattggtttgtggtaccctggcatttgatagccccattatactggttaataccttaagcgagggaatccaactcataggttattcgtaaattgtcttttaagtgtttttgttttgttctatttaccttgataattgtttatataggtccttattctgtttatgtgatataaatccttctgatactgttctttcctcgcagaccaccttttgaagcagattctaccagatggattggatataccttcctcttttgaaactatagttaagtatttaatttctgtttgcttcgtggattcaacagcctagcatatagaaactctgtttgcatgagcttgcagcttttttgcatgtttgttttttcttgtctgcaaatttgtttaataagttttcaagcatcatgaagattgcctctctcatgagaaccaacatctctttgcttattatgtgcaggtcatattgcccacttaaatctacatgatgagctccttccattcaaagatgttatagcaaaggttatctacgacgtaagttttttaatgttcctttcatgaaagcattttttttataattgcatttcgtgtcctgacaacaaagacatctaacgttctagcgggtctgttatatttgtagaaaaattatccaaggatcaagacaattgttaataaagttgggactatcagtaatgagtttcgagttccaaagtttgaagtgttagctggagaaaatgggatggaaacagaagtaaagcaatatggggctagatttaagctggactatggcttggtttattggaattcaagattggaacatgagcacatgcggctttcatctttgtttaaacctggggaaaccgtatgtgatatgtttgctggtattgggccttttgctattccagctgcacagaaaggatgctttgtgtatgcaaatgatttaaatccagacagtgttcggtacttgaagatcaatgcaaagttcaataaggttgatgatttgatttgtgtgcacaacatggatgctcgtaaatttttctctcacttgatggcggtgtcaacttgcgaggataatttgcaatcagtggctgataatgataaaacaaaggaagcagccgtgagtcgaggaggtagttcttttggtttaaactatttttttgcattatagttggcatatttggttttacgagagacaaaaaataactttaccggtgggtttctgtttactttgcttaatcataggtgagactaattccagtggagaggaaatacgtgaatccaatgcaagcataaatgagcctcttggtgcaaataagaagccatctggtactacaaagacgggtaagaaatgcctcataaagatttctccaagacattgttttagttaatattgcctaatgcctggggatcctcaccagtatgttaattgagtgcagaaaatggggtaggaaaagactgcaagagtatagaaggacacgcaaataagagattgagacaaacgttgcttccaatcgcaaagccgtgggaacatatcgaccatgttattatgaaccttccagcatctgccttgcagtttcttggtatgctatcaatgattctttattatttttgttcaaaatttgggactagagtcttgcatatacttgcaaggcattagagtttcatcaactatcaactacattccgcatcagcaagttaattaggaccaggaccaatagaaataggagatgcatcatgtattaaggcttgtttgaagagttatgtgattggctcttcaatttcagttagaagtaagaaaggaagtcaggatttgtttttgtcacactactaatgcatataagctctgtaattgtttttgcagattcgttcagtaatgttattcaaaagaagtattggaaaggacctcttccattaattcattgctattgtttcatccgtgcaagcgaaaccacagagtttataattgcagtaagtatcaaccgctcccctcctgcttgtcccttctagttttgttgtcttcactatatcatatctttgtaccaaagatctggtagcgtttttctgcgagcctttaaatctgatatacagcttctgttgatatttttaaggaagctgaaactgctttgaagttccatatagaagatccagtcttccacaaggttagagatgttgctccaaacaaggtaagatcccactcgtctgtttttctttttgatatattatcaaaacatagcatctgtagttcctgagctagatttcttttgtactttgcaggctatgttttgcctaagctttagactacctgaagcatgcttgaagcaagaagagtaaaagacatttctaggaaagaaagaagaatcaaaaaacgcatttgaaatcttttctttttgcttttggtattgtttgtttgattccatggcacatagagtcagctactgcataagttgatagaaaatggggacacttaaatttgcttaatagtatttaacagaagctgaagacttttgataaaattaattgatgaaagcatataagagagataagaatatgcctttgttaataatactacattttcagaactaaattacgcctttttgttagtataccggcgcatgttagcaaaggaaagtgacggaccgtagtgtagtagtagatgcggcggacggagttaccaaagaagaaggccgctcaaaataattaaatttgttcaaccgtcatcttcttcaactgatcttagctcaactaacacactctttcttcttggcgtcaattcaatcaaccaaaacctttttctcctatctagctcacgctttcttcttcttccaatggcgtcttctgcagctctcggatctctccatcgtgagtctcttgctctctcactctctgcgttttacttattctgttgatttcatgaggataggaaaactagaaatggaggaccatgagtaaaatttcggaaatgaaaggcatagattggagctatccgttagtgacgttgttgcttcttagagtgtaatttagcgacttaattaagtttcaatctcggatcttgtgtgtctaatttgtatcaagagatgtttcagctagaaaaagtgaattttatttgttccattttacagagactttagggtcagccattaattcacagagtgaggttcactcgctttctggaaactggtctgcctctggtaattcatgtgtgccacggtggagattatccaacaggaacagcaactacaggctcgtgttacgtgctaaggccgctaaatcttcgacaacaaccataagtgatggtgagtttatcttccacaattcttcttcatgttcattttgctggttaatgcctttttttactatcaggcttgtctcatcactttgctaatacgatccattggccaaagatggtattaatctgttttgctcttaaaggaactggaactgaaattcttagtctcgtttgctcttaaaggaactagaaatgtaactgtaagcctcggtcttttaccagctgtcttggaaccaggagatacagtgatgtgatattggaacatttttcttttatttcctatgacttttgcttatttttggctttgcaggttcatctgatgctagtgtgtcagacgggaagaaaacagttcgacggataactttcccgaaagaagtggaggtttcttccttgcctttcatgggtcttagatattaggttctttaatttataagtttggtaggtgatgatatgacgatttcctcaaatatgcactttctagatcgtcaggattttggatgcataacttcaggcaatctactcttataatttttaatcatgacgtatggatgtacctttctttatatgttgttagatgaaatgttgcaggcactggttcacgagatgtgtgatgaaactgaggttgctgtgctgcaacttaaggcaagtctctctgccattagttttaacttcattattattattatttgtaaactttctttgaggctactacaaagacgagtgcattttactcaaccaacaatatggggctaaatatcactgatttgagataatagaatgtaggttccaacaattagactcttctgaagctttcttttgctacaggttggagatttcgagatgaacctaaaacggaagattggagcagccacaaaccccattcccgtggcggatatatctccaactgtagcgcctcctattccttctgaacctatgaataaatctgcttcttcggctcctagcccatctcaagcaaagccttcctctgagaaagtgtctccatttaagaatacatcatatgggaaaccagcaaagttggctgctttggaggcatctggatccaccaactatgtgttagtcacatctcccgcagtatgagatccatttcctaattagtggttgctttcatatcccttaatttctctgcagttttcttgtttgatttgatcttgtttcttctcttaccaaaaggtgggcaagtttcagaggagcagaactgtaaaaggaaagaaacaatctcctagctgcaaagaggtaaacgactctaaattcttttgcatctcttagaacaaaagaacagaaataagatcaaagagctaagtgaaaaaaactccttagggtgatgcaataaaggaaggccaagttattggatacttacatcagttgggaacagaacttccagtgacggtaatatcttaactaatatatccatctcttctttgaaactatctaatcagactcatcgatcttgctatttgtcgagcagtcagatgtagctggagaagtccttaagcttctttcagatgacggaggtaaacatttgagtattcaaaccgtttcatttagtatgaacattcagaaattatataagtgaattgatatgaactcatgcttcgtgtgcaaacagactccgtaggttatggagatcctctggttgcagtcttgccatctttccacgacatcaacatccagtgatgatggtttcttcagcccaattccatagcaaatgaatagtctttcatccggagactgtactattcatcttctcctgtgtttgttcaatgaagatttgtaatctgtttagttgcaaagagtctactttgatcttgctctcatcatttgtcacgtaatgtggattttctgcaccagagaaaaaaaacaattgtggaatttttatagaaatgacgtggctatcttatcttctccgatcatcaaataaaatcaaggctcaaaaattcagaagaaaattgacgaatgtttttaacagtgaaggaaaatattaaaattcttctcttattcgtatcggtcttagcaatgtatgtaatacgctgacgtgtacaaacggagctctcttctcagctctggcctctgagaatgaaactcaccacgaatgatctcttcgcttctcaaccattatttcactgcccttgctcctcctcctcccgtcctcgccgccgacgtttctatggccttcattttccgatcaacctcaccagcgagaagaacaattctctatccattgttgctctttctgattccgatcttccatcacgaaccgccttctctcgccgcgcttttctactcgcgccaccacttctagtctcggctgcttccttgtttctcaaaccgtctgtctctttagcctccgaggagagctcgtccgctacagtaacatcgcctgcggaatcagcagctcctcctcctcctcctgcgaccacaacaccgtcgccgcctccacccgtgaataaggaagagacgataacctcgagaatctatgacgcgacggccattggtgagccgatggctatgggaaaagataagaagaaggtgtgggagaagctgttgaacgcgagagttgtgtacctcggtgaggcggagcaagtgcctaccaaagacgacaaagagcttgaactcgaaatcgttagaaacctgaggaagagatgcgttgagagcgagcgtcaaatctctgtagcactggaagcattccctctcgatttgcaggatcagcttaatcaatacatggataagaggtttgtctacacataaacttactgcaaaattcgagattgccgccgcgtacttttcacgtgatcgtgaatattgtttggtggcaggatggacggagagacattgaagtcttatgtgacacattggcctgctcaacgttggcaagaatatgagcctcttttaagttattgccgcgataactctgttagactaattgcttgtggcactcctctcaaggtagagtcttgaaagtatttggattttgttaactgtttgatttggtttcgatgatcttcctagttcagtgtttaatttctaatcctttaaactatgctgcttcattttacattggtttctatctgatggaagtttgtgagactaattacatcttgatacttgtaagtggtatgaatatggttttgatcatttgaaatgagtatggacatgtttaagctgttaagactaaagagagcgagcttatcagaaatattgctcttgttttgtgactctggtaagagctgacaacactctgcttaatctgatgtaggttttaagaactgtccaagcagaaggtatccgtggtctttcaaaatctgagcgtaaattatacactccccctgctggttctgggtttatctcaggattttcttcattctcacgtagatctacattcgatatgagtctcccaacacagattgttccttttggaccgagttcatatttgtcggcacaagcaagagttgttgaagaccatacaatgtcacaagttattttacaagcagtagcagatggagggggtactggtctactgttagtggtgacaggggcaagtcatgttgagtatggttcaagaggaacaggtttgccagcaaggatctcaaggaagtttccaaagaaaaaccaagttgttgtattacttgaccctgaaagacagttcttgcgaagagagggcgaaactccagttgctgatttcttgtggtattctgctgcaagaccctgcagtagaaactgctttgaccgagcagagattgctcgagtaatgaatgcagctggcaggaggcgagatgcccttcctcccgtaagattcatatggttgctttcattattttgacgacatgcaccctagtatctaaaaatctcttatcaatgggtttattatgcagttcaattcttctccccaattttttctttgttgagcttaactttgaatcaagcttgtatattataagttcagaatgatggaaatctattccatgctttccaggatattcaaaatggattagaccttggtctggtgtcacctgaggttctgcagaatctctttgatttggagcagtatcctcttatttctgagcttactcagcggtttcaggtatatccattatgatgattttttttttgagatttttgcatgatatattgttctatatcgatatagcagagcttgcatacagtccatcgtagattacttgttctatatttatatcccagagtttatgatttcttgaacagttagtggaatttcagttatgatgatttcctgtgtaattgtgatacagggtttccgagaaaggttgttggcagatccaaaattcctgaataggttagccatcgaagaagctatatcaataacaactacactaatagcacaatatgagaagcgaaaagagaatttctttgaagaaattgactatgttataactgatacagtgagaggatcagtcgttgattttttcacagtttggcttcctgcaccaactttgtcttttctttcatatgctgatgagaccactggaccagacagcatagacgccctgagaggcctcctaggatccatacctgataacgcatttcaaaaaagtcttgctggaagagagtggaacctgaatcttagaattgcttcagttattgttggtggcttgaagcttgctggtgttggagttgtttccagttttgcagctgtgggagcttcaaatgcattgaatatagcacgaaaggtcattaaacccgagctggttgtggctgagaaacctaagaggtctcctcttctgaagacggcaatggtttacggaggttttctgggaacatctgcaaatcttcgttaccaggtatgatgatccatgctgcttgacagtgatggtatgtgtatgttaccgcgacgtcttggctaaggaagagtgttgattaaagacattatgatttgatatatgcatctaatgtcaaagtgtctttaaatgcagataattgcgggattaatagagcatcgcctatctgatgagctttcttcgcaacctctacttgtaaatgctatttcatttgttgtcaggaccctaaactcatatttcggaacgcaggtcagagttacaagcctgaatatttggtttcattttctacatctttatttccttttctcctaaattcttatttttgaagtacagtactatttgatttgatcccaacttttgataaaaatgttgcagcaatggatcgatcttgcacgctctacgggtctgcaaactcagaaaagcatcccagcctctaaagaaatttcagaggctttggaagaaccgacagtggaatgcgatactactactgaagaggaaagtatcgataagctcaataatcaatgatactggtgaggctaccccactagttatcaattaatagttgtttgccatataagctttagatcgtagaaattagcatataataatttcacatttcttaagttgtatgttcgtacatgtgcttggcaaatagtgatggtttcaatataaatttgttgtcttaaactcacattgattgtttctctatttatcgttcttcgtacttaagcaatcatttttctagttgacaaatacttttgcacgggagaaggagatggtatctcagctggcaataagttgtggttcagaaattctatttggtatgtaagcaaagaaaaaggacatttaaatcatcaacattaattgtgcagattcaacatagagtagagagagagtgacaataactaacaatatgagtgatgtgaagattgctgagagaatctttatccggctcttatgagtcctccagtcttgatcagctggccaaaatgtttgacgtctctgagccgcaagtccacagcattattatccttttaagtgcagcagaagagcctttcactccaccggatacttcttcagcatctttatccggctttggcaaatgcaaccatgtcacttgtactagttactacttagtacttactacgacaagcttgtgtttcttttttgtatctgtgtttgccatacaacatgagttataataagataagagttccaaaaaaaaaaaagaattttctcaacaatattcattgtcgctagctccacgaaagtagccgattaaatcacagatgttcttgataagaaattaatcaaacacttcatcgagaggaagttactaagcaaacaaagatgaaagagtaaaagacatcaacaaaaacagacctgcaagcatacgagaaaaaacctaagccttcttcttttcaacaagaatgacgcataaaaaaaaacttattaaactttccagtaaagcattcttaaaagtcttttccaacaactgccaatatcacaaagaaaataaacaatcacaatgcgagaaaatgtgatgaacatctcttagaaagaaccatttgataaccaaaaggaatccaaaacataacaaaaggttgagactaaggtcaacactgcagatttctcctcatcctctttaagtacgaacacctcggttaagactcaccatacggcttgagccatccatctgcatacctctgtttcctgaaccaactcttcctgcataccctcctcctcggttctgccctgaccactgaccattttgtccagatgatcttcctccaccataacctgatctgttgccttgtcttccttgtccgtaattcgccttgtcttgccaatatccaccaccacctgatgctgctcctgcatagtcctgattgttgtcccttctccttgaactcagatccagaccacctccaccggttctagattccattgccctctcattgctttctgccaaaatcgagagtttctccgttaactggaaagccaatgattgtaatctgctgtgttgcacttcatggaagacgatgcatcgtgttggctgatcccagcttgcatgcagttcctcattaatcatcatcttactcacaatgctgtggacctgcggctcagagacgtcaaacattttggccagctgatcaagactcaaggactcataagagcttgagtatgtgaataggtaagtccttagagcctcttctttgatcctatccttcaccatgtcaaggatgctgtcacggttcttgagcagcctccagacctcaagagagttcaaaacttcaaacgccttctggaaatctcctttggtcagggctctggtggctgccatgacatggtcacgtacattctcaggcggtgcagtgaatgcttgcctttcactgatctcgagcaggcggcggaaattcttgctaatcactctgcgtttggcatcgtgcgagtttgcagccatgtttgggacttcaagaagcatggcacagatgagatgaactgcctccagaagctcaaggtttaagtgcatgtggtacggcatttgtcttctcctttccatcctttcctggtaaatcaagaaataaaccaagaaagttttatatcacatataaataaactgaacgaaaaacataaccataagcatccatgttgaaatagagaaaatggattgtgtgaaatgaaacaaaatgaagaacccaaaaatgcaacagtgtttgtaatcatgtctcaatcagaactatctggtcaaacaattttttttcaatcctatctgtattaaatctaaaaacagaagataactagttacctgctccggggttttctcatggtatcggctttgcgagacaccttgggcaagcaactctctcactctttgaccagagtacagctcggaaaggcagctatgggactcagtgatcattccagcccggaaggcgcaaagaccaagctgcgccatggtcctgttaaagagaatctgtgttgagatgtccatgtgctggatgttgtcttgcagatgactcatcagcaacaggtctctagcagtcacaaagttgtccattaaagcatggtgattgatatcacatagcatcgcacgcgctttggtccgctcatctccatttctgtagataagggacacaagaatatccatcatagctcggctgctctctgggaaggtaggcttacggggaacaacctccggaacaacaataaatgaagtaggaggtccactttcctctttggcctcctcagtttcttcttcttcttccaccaactcagccaatttcctcattgcatcataaacttcctggggcttgtagtatattgcctcaacacgtcttaaggctacctttgcagcagctttaaaatcacccatccgctcaaagtagtcctggatgttctgagcaagggccaagaacatgggctcatcccttagcctctcaacatactcacgggtgtgaggatcaatgcattgcaaactcttgaaaaactcagtgtcaaccctctccaagaatgcaaccaaatttccccagacccgaatttttccatcataatctgttggctttgaagtttcgttctcatcaggctcaactgtgtcatccacaacaatgttactgtacttgacgagaatgtccagtatggtgagcatgttaagcacgcatttcttccagacattgataggcatgtgcccgctgagacctggattcacatcaaactgagccgaaataacgctaaacaagatttcaagcttctgtgcaggagtcttggcaatctttgtcaagtgcgtaagctgatcaactagctcaaatcgagcagtgcccttttttccacgagcagccacaatttccttgaacttcttgttgacccagtcccaagtgatctctttaggatctttattcattagcttctccaaaagcttatcttttttgctcagcatcttctcccaagtgagattatcagtaggttcatccacatcggacccaggatctacggtaggtccgtcgatggaagaatcatcatcatcttcaacctcatcatcatcatcgtcatcatcatcatcatcttcaggttgtttctcttcctcaacttctggagcctcacgatacttgttgatatcgtcttcgtacaacttattgttcttcttcaatttctgtttcattgagttcaaagccttggagttactagtactcatcttcttcttggcttccttattggcaagagcttcattcaagaaatcctccaacataacaagcgtcttgatatacaaggtaggaggcttcacagcctcagtaatcctcataaccttctcaagctgtttgttaaccttatcaaagttttcttgaaggctgacccaatcattgatcttcatagcattcttcatctgatcaacagtgtaggtcatctcctcaaaacgtttatccttagcaggcttaaccacacgtttcgtatcagtatcatcatcatcctcactaccactttgaaggtaacggttattgacgtcatcattctgaacctcattaacctctacctcataatcactttcatcttcactttcacttccaacctatcaacataacaagtaaaaatcattcagaaactgaagcaagtaaaggtaaagagagtttataaacaagaggtctgttgaaggaaacctgagtgaaaaaacgagacgtcatctttttagctggaagcgtaagcaacaagaacctgatacaccaaaagtaacaaatctgaatagtgaatcagaggaacgaaattataagtaaaacaaaccaatccattcgaagaacataatctgaacgaaacaatcgtgtcacagatacagactcgtatcaacaaagaattagaatcgattcgaatcaatctacaccaaactagaatcgaaaatttgttacgctagatgatgaggaacaaaattacctgaattcagaagatggagatggagatggagatttgcgaaggagatgcttgaggaggattacgaatctaaacaaaaatggtgtgtagccgtccaagcattttggtcgagatgaaaaaatatatagaattagggtttcgtgatttactcactaaaccggattcgatttgattctatttccataccgaaactgaaaaccgaggacaattaaaacgctctcgatcggtttttattttatttacaaaccgaattggtcgaaccaggactaaatgaaattgtagtgatggttagttcaattaaattgagaaaagaaccggttcttagtcctctttcctagctgcttatcagacagattacatatgaattgctttgtacgctggtaacgtcaaatgactaaatgttttcaaatatagatacaagttttttttttacatagtttcataaatcatacaaattggatcagcaaacaccgaccggaatctctagagcatatacatacagaaagagagagagagagagagatggtcaatgatcaactaagctttggtgattggaaagatatcaaaatccccagtcttgctgctatgtatataactgacattcagtgtgtttaggatgtaaccttctccacagcattggtttcattgctttctatctctctctctctctctcaagctgtctttactttagtcgaagtatcttttcctctccggagccataagttgacaagaactgaatcaatcatgatctgtaacattccagatttacgtcaataatttataaaattatgcacacaagtacatgatgattataatacaatttgtaacctggttcaggtgtgcagctacacaaggaagaaccaatagccctgtctcaccaaatgcacctcctaattgctctactaccgccaccattaccggtaatgttttctatgccaccacaagaaaagaactcccaaatttaagagatcaaaatcggttctaaaaggcaaactctattattacctggcttgaaacgagcaaaactgcagtgctgttttccttggagctcttgctaccacctgtaagaccggagaggatgcggattgaaacagcattgaatgctagtagagaaagatgcagcaatctgtaagaagacgtaagaatcttctgtcaaacgtaatccgcatttctaacacacaagccaaatatttccatgagcttcttcacttggtatcttttctatatgttaaaagaagaatgcgtacattccaatgccaactgctgcaaggaaaaccttaggttgaacggatagtagcagtgatcttgacctgctcacttggatccatggcacctagaatattaatcatggaataaacactattaagttcccaaaataaccaggtaaatgcaataacaaagtcagaccagttgaagtagccagggaagcagaggttaaactataaaaaggaaaaaagtattaagtccttctatctccaaagtcataaccgtgactgcaaatatggtttttgcaatttagtaaaagctttggattggcacatcaatgccacggaatgttgaaatcccaagctatcatacaagaaaagagaaagttttaagtacaggcatctaaaatgccaagtttaagattcctgcaacaaagcaaaactccaaggatatgacttcagaaagttattcaaggggtgtagaaattacgggagactaacatttcatatcttaccaaactgaggcagattgcgttgattttcgaaaagagtttacggttattgtcaacaaagtttgcgaaacctgtatcacacatttcaacaagagtttcaacaaggtcagaaagtaggcagcgataagcatatatatttattataaacagaaccattttgatccattgtcacgataaagtgactgctaactatttaaaatggtatgtattcaattactttcaccagagaagtaaaatataacaaatggcgctcacctttgaatgattctcgaataacctataacagaagaaaccaagtatgtcaaagctcgattttaaaaacgtgtgcaaaatggcaagtgatagaacttcatgctgaaatgactgtttgtgaaaggttcatataaacatcagggaaagtaacaaataatagagagtaagctttcttcattttcaaatgagccacgcaacaaccctattataatttccaataaagtattcacatatcttttggcaacaaccacctctgcaaatttagctttcacaattgtaccgtatatcagaatttatattgattcatcattgcaagaacaggacaaacagaaagattgtctcaccttgccaatgattaaaggaattaacagagtaactataagacttctgaatagttggtcagtaggaaacgaaacccctactcccccagctatgtatcttgatacccaaaatggaatctgattagaggtcaaaccacgttaacttcagtgtcagaagacgcaatactcattcttaatagaagactttgaagtttgaatcctactcatagtcatagatacaagatcatgagttgttttgagaacaaattgctaagcaattcggaaatatagaccaggaaacaatcttactaaaaatacccctgattctgcatgatcaactagtttcaaaggaggaacaataatatgcaagtcgttcggcttacagttaaaattcctaataagttagatgccactgtcacagcaagagcaagagcagcattaccaccagcaagctgaattggcaatatgataagtcagtggaacgcaagaaaaacagttttgcacaaaatattgattagacttatatcaaattgagtacgtgagtaagggcaacaccacttgataaggtggttggcatacagcaaaatatacccagccctgtaaagagcaaaaggacatacataagttttggactcctcaatcactaactcactactgagctggaactgaagaataaggtattcaaaattgaaccataaatgtaagaaacggatcaagattcaaagacaacgtcaaagtggaactgttggatacaagatcacaaaggcaatcagattactacttaataacgcagctatagttgatcaattagttgtcagatattatataacgagagacaatttaacaaaaactgtagatgtaatgtaaatcaatggaagccgatacaatataagcagtaacaagttcaggaaagaacgtggtctttgaagttttacttgacactaagtttaagatagagaaagagtaacctgtaacaagttcacgaggttggagttggaccaacataattagccttgagaaggatggagtgagcaacaaaatagagatctgaaagaaaaagagaaatagtttgcgtttaagtatgtagtataactaacaggagttaaaaaaaggaaaagcattaccaaaaggtttctattcattagattttcttattttcagaacttagcagaagagatctacagaagaggaaacattcacagaacatatgaaagctaaagatgagtcaagatcatactagcccaaagagtccaagaggccaccctttgacagcagcaccaatcgcttcggtacgtaaagtcaaccctgctccacaatacatgaaaagagtacacatttgataagctattcgacagaaacaaagtgattgcttccatcaccctttaacatagaaaaagaagaagaacaaagcaattgtacacttatgccacagctgatagaatcacctgatataataaatatcccgcatgtgctgatcttagtgaaagagtacttgtctgcaagacagcctagagtcggatttgcaaagcccaaccccactccactaacaagagctaaccaacaaagcacaacatgaaattgaaatgtcaaaagtaacaaagtgaggcataagaggtcactagaagcatcacattaaagtgataagtaatcttcatggaaaattgaattttgatgcagtcaaccttgtcatcagactttaaaagatctagcctaaactttcatctcaagaatcgttagggaaaatgaggattacgtggaaaattggaaaggaaaaaaagggcaagagcaatgtgtaatgttacctagaggcaagaaattatctgaagcaaaactcagcaattccttgccaaaatataatctttgagctgaagctgaaatgcctccgtcaccaccaagctgtgaacacaaaaaaaaatctccacattcacaataaagtttgatcatttacatgaatccgattccattctccacacgaacttggaataagcatagaagaatacataaaatcgaatggaaattgaccagagaccttgtcggaaggttggcatgctctaatggatctggaaatccatcgtctaccacaggggtcttgacagcgacggaagacgacggagcggttccccggagacggtggttgacggagacatagaaaggggttttgggttgaagccagggtactagctatcgccatgggagtagagagaattagaatccaaaagtgagcagaagaatgatcaaagtttggctgcttagttctgcattactcagttctcaagtatctctctcagtttaaacaaactccggcttatcggaaccacttcctgtctagcttcccactaccactggctcctgttatttatttattcttttaactcaaaaaatataggaatattcattttcaatttgaaccaatcacaatgagtttgtctttcagcctcaaacaaacaattgggtctaaacccaatattggagtagatacattgggccaaatcagagggcataaaattaaacataaaggctaaaggagagcgaacccaagtaaattaatctcacttatttcaagtgcattattattattttaattgtatcaccaacattcatatcccctctcacatggcattgatgagcagaatatgtccaatgtatgtagtaatgaagtacatttgtgttatatagcccatttgctcaaattaaattgtaagcaaaaaaaattattttcaaattatgttcattccacaatttatagatccgttgaatcaactgtatataattcgtatgtccataaatatttttaaggaatctagttctcctaaactacttaaaagaaataaaaatgcaatcagaactagcatttataagccaaaaataccaaattacgggccctgctcaagaaagaaaaaaaaaaaaaaaaagtgctaagcagaccatagaagagatattttgagctgtagaaaaactcaatgcaccattaagattgcttaaaccccaagcttgtgacttgtgaggagtttaacaaaaagtcgtcaaatcctgattacgacaaggcacctaatactttttagattgcaagaaaaaacaatataaaacaattattttgatcacattagcttcttacccaataacaaaccgccacgtatgacttcgcttgttcgataaacaatctctctgctccatataactgaatcaaagactttcacacgagatcaaggaagaaagatcaaaactctttctttcctttttttgttgaaaatcaaatctaagaaatgggtaacgcgattaggttactccggaaatgcttgaattctcacggcgtctccgcctcttccggcggcgtctcagctctttctcgtgatctcttaaacttcgagaccacttctcaggtctctctccattgttattctcctaaattttcttttttctacagctaatattttagtcttggatttgttctttagctctggtttgaaactcactgtgaattgtgtaaatcaatagattcatttaaaattttgcttaagagattgatcaggatctaaagattcattttattctaggttcctgagaagcttgggagttacgttgtgtcttcccaaaaggctcaagcaaactggtacagatcatgctaatgttgtctataaagatttgaaaatgttcatattttaatgtctttttcttccaaaacatgttttaatttgaaggtatagaaaaatacttgaggcatggaagcaagctaagcctcggcctaaaactcctgaggaagcctccaggcttgttatcgcggctctaaagaaccatcaaaaagcagatgttgaggtattaactaatcatgatggttctttcaagttgcaaaaatgtcaaggagttttggaggatgcattattgatatagttgacttgttaatggcattgacagggacttttgtctttctatggactaccttcacctcacaatctcgttgaggtccctacggaagctcctgtgtctttacctaaaggagttcggtttgagcttaacacgcttccggttagaaaacttacgaatctttaaaaggtttgggatatgatggtaatgttgttgctgctgatcaagaaattttctaaatgaaataaggtggatacaaaatctgtggcagatggtgatactgttactgtgtatgttagtagcaaagacccgcttgtgtcatcttctcttcctaaggacgtgagtcttgcagcggttaaaagagccaaagcgcgtgagaagaagaattatactgaagcagatgcacttcacaagacgatcatagcttctggttacaggtttgtgttttattgatatacttcacaagttgattataaagtcaaatcaaaattgatctacgaaattcataatttttcctaacctttttttcatgttatacttaggatgataagttttcagaatgaggaagtgcttgctaaaaagttcagaattagactaaggtaaaacactcttccactctagagagaacctcatattcaatcaaaagctatatgtagagttaaaaatttggaatgaaaatgaatcagcggaatagattcaccggagagcaaaatgccgtatggaaaagaggcgcatgatgagctactcaagatggttgaagggaaatgcttgaaggtgttagtatatacagaggatcgttatggaagatgtgtaggagatatatactgcaatggaaaatttgtacaggaagtaatgctaaagaaaggtcttgcttggcattatgtagcctatgacaagcgtgcagagctcgcaaaggcaagcttttataaacctttgtgcttttcatttacaattttctttgattattccttctgatgtttaacggtttgttttggtgttttgaattcagtgggaaaatgaggctaggcaaaagcgcgttggcttgtgggcatcttctaatccagagaagccatgggagtggagaaagaacaaacgtggaggcaattaatgataacaaaaccaataaaaacaacaatacaatactattcgattatatgattattgtgaattaaagaacttgtgatctgttgttgtaattgtaagagaagtatgtatatgttttatgtattgacaagtatttttttggcaatagagaatttctctttgaaccttgagacagaagttagcttagttgtttcgtttctaaatataagggtacatagtttatttttggggtttaacaatctttggttgagaataaaagtctgaaaaagtaaaaaccaatcttacaatttcaaatttgtttttagttgatatattgttttaagaaaatgtgaagaggtgtttttgataattcttcatcatcaggaggattatcaagggctctaaataaagagcctttcatagtcttttgcaatcttcttcttcgtcttcttcttgaactttattcgaaaatgccgaagaataaaaaaacagaatggcaagtaggagatcccgcgataagcgtagtgagcgatcaattctgtaatccatacccaatggatcttttggtgaagagaaaagttcagaatttttctaaagattattatgaagtgtttgatccaagtgggaatctgctcctacaaattgatggacaagcttgggggtttaaccgtaaaagagttatgcgtgatccagccggtttcacaatcctctcaatgcgtcaaaaggttacaaaacattttaatttttcaacaaacatacatataaaaatgactctttcttgaaatggtgtatgattgtttagggacttgcgttgaagaacaagtgggaagtgcatggaggagagagcaaagagagagaagacttgctcttcacggtacaacaatctcaagcggtttcactgaaaacatccgtggatgttttcttgccggagaacaacaatgtcaagaagacaaacacttgtgattttcatgcttcaggaggatactccaatatctcattcaaagttttcaaagcggatgctctcatcgccggggtaggggtaaaagttaaaaacccatacttattaagaaatttgcaatttttatacattggtgaaggattgaaatccttatattgcaggtaacacataagtttacatggggaagtttctgcaaagggaaatataactttaaggtgagagtaaatccagaggttgattatgcttttatcattgctttgcttgtcatggtcgatgacaacgagaattggtgttagtatattgtctgtcctcaatctctttgtttagtggttcctttcacaatttattggtgtatatgtgttcatttctcaagatatatgtatgtaagaatattttttccatgtaatgtgcaatcttgctggcccaaatgtttatttttcataaaagcgtgcaatcaaagatatatagagcaagaaaacatgaatcaaaacactacaaattgtcgttaacaggaagaaaaagcacacgtttattagatagatgtagacgtaaaagcaaacaaataatcgagacatgatcctctcgatgcatcaaataatcgctgaacgaagaagactctccacagatgtttaaccaatataaaaaaaactccagacttgagtagttcccataaatgaagtgacgagacgcagagaacaattgtagacgtcgataccaaacaaacccaatttgaccaaacctcttaagaaactttaaaactcaaaaccagacacaataaaatcaaagaagagtcggacatgaagtaacggacatagtgacaatacaacccgggaatgaataaaaagcaacgctctggataaatatgtctatgtaaggtcatcctcctctagctccttggccttgagcttctccttcaccctcaacaacatggttgtcttccatgaatcctgcattaacaccaattccatgatcaagaaccaggtagagttaaagagagattttattcaaatagctgtatatggtttacagcccataccagtggagtcatgctatcaaactccttgacaacatctgtgaactttgcgatgtcttcttcatcgatagcagaagcaaggtcctgttcatatgaataaatgtacaaaacttaacatactttatgtaagctgctccacaacttcttgaaaaaacggaagtttaaactttaccgctaagaacttgcattcccgtgttccagtaaaagttggatccagatcctgcaagaaagtagaagttagaaaacatgtcatagttgctcaaaggaccacaccagaatgtttatgttacgggtgtttgttgtggaagaagaagaacctgatacttctccagagcgttagtgatggaaacaacatcggctttgcataagtggcacatgccagcagtgagaagatggcccttaactccatacttgagcaagttattgttgagtgaatggcgtgctatgtcttcataaatcttgattgccttctcatacctaccaaagatacaacaacaagcctattatcaatcaatcggtcccaaagtagagaaaaggctataattgctgtgctcatgcatactgcatagagaacatcacaattccatacaatgacaagtttgtggattgacaattcgattttaacagggttccatctgagtactataagcacttcaatgctaagggatgagaaagcaaaaagaaaggtaatgtgccgaaaatcttactgctccagctgggcggcatattgcgcaacctttagattgcactggtttgcagaagtggtcacttcttcattctgaaagaattcagctgccttttcaaagtaagcaatagcctgctcgaacttctgatcagattcataatactcagcaatttcctgtcaaaagtaaaaaaccattaatgtacaaattagtccaaatacagcaagtcagcaccatgcttactttagtttagaaaaggaaaaagacaatctgaatccgactgaacatgcataaagaaacaggaaccatggaggaaatacagaagaagtgccccaataaaactatcttctcagtatccgtactaaaagaataatatctaattcatgctcaaaagagacaagtggtaccttgtaatatcttgcagccatgttgagccttcctatctcacaaaatatattcaccgctcgctctaggcaagacgcagcctctgcatataatattaggacgcatgaaaacacataagaattcataatcactcttgcattacagagatgacaattacaaaagtagctttatacataccattagtgtcaactttcttgtagcatttagcagcctcagcataggcgttagcagcatcatgtttgctatctgactgcagatgcaatcatgcaaatcaatgttatcaaacaatccacacattagtccagtatcatatatatgtgttgccaaagaattaacctttaagtgacagtcggcaagttttagataagcttttccagcttgatcccctgaacaatcacaaatgcaacacataagtaagaagatagcgttggagaattaaacaaatatcagaaaagaacatgaaacctattaaactcagccaaatagaacccaaattaggtactataattgtgccacttatcaatgacttgctagaaggccagaaaccaatatcaaggaatcagaatgatgaatctccgatttaaaatgttttcgtatgaaattatcaaccataaatttcttacagatcaaaatagacctaatataaacccagatactaattctacttctcacatgaccatagacaaatcaccgcaactgataaacctaagatcaaacgtttcaaatttcaccttttttttcttcctcatcatcacaaagaacaacaataaaaaaaaacacgacaccaatccgatgaaacaataatcaaaagcaaagaaattttatttatggaaattacatgatttggcgagcttataggaattagctgctttttcgagcagatcagcagcatcctcgtacttagatccgaatattccccatccattgagctttttctcagctttcttctcgaattcctcagctctcaccagatgatcccccattccttttttttccccgaaactctgacttgaaatttgatcgtgtacttctttacctccacagactccgattgcttctcttttcttcgtcgagagaaattgctttcgatttggattattcgctgcgatgaaagagagagagacgagaatcgatcgagagcgaaaaatcagagacacgcttcgataggggaaaagatttttcaaccgactaaagtgggccaaatttgtctatttaaaatatgggctttgttttgaaaagcccaagttagcccaatcaaaagtttttccgtactttgttattgggtcgctttaaccaagcttagaaaatatgggatcaggtttatcagttgggattgaagaaaagcttacatgaattatcaagtaaaacgatttcctgttatatctgctcgtccttctacattcttcattagccattattatagttctcaaatcacgacaaatattgctgacagtttccactaaacaaacctatgttccaaaatgcacaaactggtaaaaacctagtatgttttaatatcaaacacatgagtaacaacaatatcggttttaatatcaaacacatgaataacaacaatggctaaataacaaccgttacaaatctatgaaatgttcaattttttagcaaatcatttcatgggtaatcggtaatttttttgtcttttgtgagttgcagaggtaatcttctgttgttgggcttctcgacatgttgaatggtattgggcttagtgtcttggcccatagcattctgtttgggagactctgagctgagcagagagtttgacccaagctctgttgttgttgactgaagcttctcctttacacacagagatgatctaaaataaactgtaactttgcaacgagggatttctgcggcaatattaatgttgctatcagtcacattctataatgttaactgagtaacttcaatatgattcatatgaaatgattaaataaaaataactttagaagacagtgtttaattattcttatattgtttcgtttatcacgttttcaattattcattcgacattccgcattcgctgccctctcgttttcttgatgaaaagtctcgaaccgtctgctctaaagttagtttattacacgtgagccatctttgaggccgccaatgatatgattatatattggattttattatatccacgaaaattttaaattatttaggagtttttttcttttttggacaacttatatgagatgagaagcgatgatacacatttggccactttttcgtctagatacattcttcgtgaagaaatccaagtgcacacattcattagtgttggacggacccattttattttggatttttttgtataattctttggggtttttttgttaataattcacttctgtctataatatgattatgattgttcatcatattttagctgtaatttcctctcttgaacaaaattattattttcgtgatgtttttaagtacgtgacgaaagatcatttggtgatctcactgacatgatttgcccagcctgtcaggtttacctatggtcaaatatcattttctcgattttgccccaaacggtcaaggcatatatccccaatcttcaaagggtatttatgtacttttcgctattaaccgtgtggctatatgaagccgattcctcataacaactacaaaaaaggaaagcttcttcccgccggcaaattcttacgtttctccggcggttagaaaaatgacaccacagatcaaaactcatctcttgccgaagcaagaaccttcttcgtctgagaaccatggatcatcaacctccggcatcgttttcaacgtgtcaacgagtataatcggagccggaataatgtcgatgccggcggcgtttaaagttcttggaatagttccagcgtttttgattatcacgatcatagcttggctttccacaatttccgttggatttctgatgaaatcaactctcgccggagaatcaactacttacgccggagttatgaaagagtcgtttggtaaaacaggatccatcgctgtacagattgctacgatggttgctacttttggttgtatgattatattttcgattattataggtaaagtaatttgatctaatcatctaagtgtagaggtctcagctactatttgagcttaagaacagattggctgagtttggatttgtatgtgtttactctctcaggagatgtgctttctggtaatgaaaatggtggtcctgaacatattggagttttgcaagaatggtttggttcttactggtggaacacgagaatcttcgctttgttatttgtctacggctttgtcttgcttccattggtcctgcgtagacgagtcggtaagtttctctctataatcttgtgttctcaaaattatggatatctatgagattgttgatgattttctttttgttaatggttatgtagaaagactggcaattagttccgctgtatcgtttcttcttgcggttctatttgttgtcataagctcggtgctggcgatttccgcgctggtgaatggacaaacgaagaatccaagactgtttccggagttgagcaatggaggatcgttctggcaactcttcacagcttcccctgttatagttacagccttcacgtttcacttcaatggtaagaacccatctctttcaccatattggtaactgtttctctgttttctctgttttttcatgtttctgagtttggtgttgtgattcaaaatgtgcagttcatccaattggattcgagctcaaagatccattacaagtgatcccagcaactaagatctctgtcatcttgtgtgctgctatctacttcgcaactggactctttggttaccttctctttggagatgcaactatgtcggatattctagtgaactttgaccagagctctggttcttccattggttctcttctcaacgacattgtcagactcagctacgtgcttcacctcatgctggtctttcctctcctgaacttctcattgagagcaaatctcgacgaactcttgtaccccaagaagccgtccttggaaaaagacacaaaaagattcatcggactcactctggctctactgatttgctgtttcttgtctgcaatcgctgtaccagacatttggtacttctttcagttcatgggatcaaccatcacagtctccatagcattcatatttccagccgccattgttctaaggtagatatgctttgtttcctttactatgtactttatcagttgcttcaaacttcctataaaaatcttaccaactgctttctgattctgaaatggcaggaatatccatggtgtatcaacctcaagagagaagatcgtagctgcaataatgcttgttcttgctgttgccactagcattattgctatctcgacaaatttatacagcctcgcagcaaactagtcgttgaaaaaagttttgcaaacagtcccttccatgatcacttcaaagaaatctgtaaaattattagcttgccgtagcattcatatttatatctttgtgaaataggtttgtcagaaaatgcaatgtaatagctatacaaagtgcaatttttgttgctgcttgaaacagagaaagaggaaatgaacaactcttcaaaacttgtattctttaaattactttttgtagaccattatttgaatgaacaaagtacatctgtatcagactattcctttcttttggaacaaaaattgaagggttctaagttggaaaaaaagaggaacataaagatgatacaaaccttcgaaagcttaagattatgaagataccaagacttagagcatccccattggggagtcctaattaaggactccttacaattttttaatagtaaattttaagtaaatgagagtttagagtttttggttgaatctttataatttttagtgtccaatggtggaatccttaagtggaatccttaagtgagaaatttttcttagtttgtgaaaaagagtgttaattgggtaaaaggaagagtgtgtattaggttaaagaagagtgtttatttggtgaaagaagaatgtttattgggtttgttgtagagaacaagaagagtggatacttaaaacaataacagtggataaaagaagagtgtttttgtatgcatatacagagacttcaaaatttagaacaatgaaaacaaaattattgtttagcatacaagtgatgtcatagaatacacaataagaactagtgttttccgaatattattttgtggtgtacaagcattcaaaccaaagtacaaacttgtggtgacttaaaacatgtggtctcttttatacaagtaatgtcggcactggagtgatttagagaaggtggaagcattatttaagtctgtaacaaaacaagaaaccaacattaagaagagacatacaagaacattaacattaagacaaccatatggaacttaaactgaacacaagcttgtttgctacttaaactaaacacaagctttattcgaactaaaactgaagacaagtcatatggaacttaaactgaacacaagtcacattggaactaaaactgaagacaagtcatatggaacttcttacgaacacaagtcatattgaaacacaacacactaacactgaagactaaacattcacaaataagaaaacatagaatacttaaactaaagattaagacaacatatcacattaagacaagttttattaaaactgaacacattaagctgaacactcgtttagtccgttaacacaagaataaacaacaatatcattaaagccgaagtgatacaagtcatattgaacttaaagtaaagaaaacagacatacaagttatctaagctaaaaccacttagagaacatagaccataacatgacatacaagtgaataagcaccaaaagagtcacatttttatcttaaaaaccaaaagatcaaacacaaatttgaacataaagcaaagcccagaatctgtatacaaatccatatactgaattcgaaatcaattgttacagatcaacttgtaagaagcaattaccagatcaaaagcaccagactttaacttgcaatcaaattcaacctaaacccagataaacaattaagcatcaaaaggagcaaaaaaatcaaaacttcaatcacatataagaaccttaccagcagacgaacccacaagcaggatcctatgagcatcaacattctaaccaatccaccgaaaaacagcgccacatcgttgacctcagcaaagccggtaagagtagctcttccggtggattttctgacacctcttcgatcacgaatcttgtggatcgtatgagaagagagacatgataaaaaaagagacgatgaagaatttgatccgtcgaagtcgaaattcggagaaaacaggagaggagagaggagagaaagaaaaaaatagtttgggaatgggaaagaaaaaaaaacacgggaaaagttgtcatccaataatatacagccacgtcagcgcacctaatacacccaaaaataccttaaacaaggttcgcaccttggtttattacaccattctgatttaattttttgctattattcataaggattttcttaaaaaacttgcaaggtccctgcaatggacatgctcttatgattcttgacctatccttgtccgtaaaaaggtagttcagttggaagagacagcgaggtttttctcaactagcttctcgagtatgtttgacttgtatgttgaaatgtctgaatcttccaaggaatttggagtcgatttgacgatagagagtgctccattagagcctaggaatttagcagcttcacctgcaactaaggaaagttagaaattttgagatgcatttggctttaaacatatactcaaaaagatcaaaagagttaacaatcctgaggtccttatatccaatgaaatctatcacggagatgcagaagtagaagaatcacacaagattatgttaaaccaagacttgcctgatttagagagagcagcaagagcctttagggcttctttccttgtcttgtcatctttagcacttcccaacatatgtagtagctcttgagccccacccatctctacaaccttcatcctcctttcatctatacagaccaaaccaaaagagtacaatacatcagccagaaaacaagttcatcactggtgagactaaataagtatcttaagcaatccatcagagagtaactctgagtcttaccatcaatagcgaaacgggaaagccgagaagctcccattctcttaaacaaaggatccttcacatgtaaaagcgatattgattgatgaattaagttatcacctaacccaaataagtgacaatcagtgatccaccattaataaaaaaatgtaagagctgattagatatagagattcattcacatacctaagtaagggaaaaactggtatccaatatacgttgctgtgcccgcaaagaaaattttgagacaccaacctattttcctctcagcttcttcctccaatgtaaggtcatctagaaaatgaaagcaaagctaagaacataacacacccaaacctaaaggccctttacttcttttgatgagtccaagtcacactcttctctactcttatgactacttcatgattgtttctaagactaaagtacggattcatcaaacaaagcaaccactttggagtaaaattacaagcaaatgtgattgaaatcgagactctcactactagtgtgaagtgagaaatggacttcaattacaactacttaaccaaaagctcatcagattttcgaatcaatctacttcattctatcttaatctggtgtaaatttaagaccatgagtcgatcctttcacagattatagacttgattgaaaaaaagacaaaaggaaaaaaggaggcacctttcttgttcgacgaggagaaatttcgagatcgaggattcgcgtttcgtgccctgcaaaaatgctgcaaattttacttcagattccagaagaatcggtaacgacccgttaaacccattgatgaagagaaagacaaggaaaagcttataaacgggtaaagagaggaaatttcagatgaagaattttgggtaattacgttagctatgcgagcagtaagaatccgcatgatttgtcgaagctcgaaatcttcttcgtcgtcttcctttgtcgatgttctttggtccttgggaggttttagtaaatagaaaaaataaactagatttcagcttaagcattggagaagagttttttgattgttgaaaaataaaaaaactttgagactggcttgtttagctcaggtagagtgaagaacctgggcctcatagagcccgtaaaatagctaatgggccttcttgtgctttcatgttgaagattatatgggccctgtatctgtttatcttcatttccttcttttctagtcggctacgaatacagtatatttgttacggtgaaatcatgctatgtgcaaaatatatgtttttataaaatatagattaaaaaaagaagaaaaggtgatgttttggtagcccaaagccgcccccgtgacctaattctctatgataattttgtcacttagagaagaagagagtggggcagatggaatgggttttatttttgtacattcttgttaagatctcaatgttattttgtccttttggtcctttctaaatttttcaattacagtccatatatacaaattacatatcttgtagtttaactaatgacttgtctttaacaacacccatatatatatatgtaaccagagagtctgagagagacattgacaatgcagcatcccaagaatatatgtatgaggatttaaattcgtatgaagtgatttgatttgaacaaaacaacgcattttaacatagcggttagaccttagacgttagtcatataatattatcaaagctaagtacaagaatatcatttccctaatacaatggaagccgtctaatgatctcttcacacgtggtattggtctagtagcctctgcaatgttggattatccagtttttgttctttttggtcacaggatttcttaagtttttgttaaaatcataaaattatcaagatgtgcagttaggtgtcatacaatgatatttgattcggacaagggaatacgattcatatggggagaagacaaaggatatatagctgtcaagaacacgagaccttcttacatttttatattttgttttttatacagttatacttacttatacaaggaaagattgaagaaatgaataaggaaataaactaatttattagttttgattacctagtcatttttcacccgaattttgtgtgtgtgtgtgtgtgggtggaaatttttgtttatacatttgttatggcctatactttgactatacatcgtaaatttctcgaaacaatttagggttatattaaaaaaattcaaaaaaaacaagtgaagtggttttggcaatttttaaaattgactgctttacaaaatgacatttaaaaactcatttgacagtggctgtaagaaaaacaaacaaatcattgacattcttagaattttttttttgtaaagatcgttcctatcttttttatctctatataaaataacctgagtctacacatcaacctcaaatgtcagagttgtaaaattattttctgctcgagtgtagtgtgtagtacatatcatatttgtattattatttttctttatctaaaatactctcgactgttttttcacacgcatttaaattttttttaattatatatacaataatattaatgtgtggacacaaacccacttctatataagccgaagtaaaacacgaataatatgcagcagtacaaatatattttcttgcagaatatatgggaagagaccaaatctcctttgtatgtgaacttttgatgtccaaactctctcgctcacgtccctttctctctactctatgtggacaacaaaaccatttctttctcagctttagagattaataggttttgtttttcttattatgtcgtcaaattgtgcatgtgaatgtacttcccaaaatgcaaatcacgtgactgccattttctttggtaaatccgagcaattgaaaccctaaatatctatcgtttttttattattaaacaattaattaatgaggagaaaacagactgtaaaagtagaagaatatgagaaatggtagggatatctatgaatctatacgtgacaaggaagagcatgcctattgtgtagagtgttttttttttgtggtgatgattaatcggcacacgtgaattgatgggtactcttattagtttatatgtccttgtggaatatagacaattctatactcttatatgctcatcacatttcatacttttatttgcaaatattaaagctagcctttatcaaactaaaagttttttaaaaaaaattctaagatgaaacattttttttttgtttgagggttttctaatgaatgaactaaataaattattttggatatatacacaattgttttcataaccggtttcctaatagctcagtcataatattaattcttgtaatgctattaaccattaacccccaaaatagtcaaattctaagaagtttttctaatccacaactaatgcaaaatttggcgtttctactcattgatttgtacttatatgaaaaataaaaatattttgatctaatagataataaaaaaaaataaaaaagaaaaccaagttgtgcatttgaaattcgcgtataggtgaagagagagagagagagagaaggccatgcataaagatccccgtgaggtgtgtttggaggcattccaatatcacaacgaacattcttctgtttgcttttatcctcttcgtcaacttctttcgatgctcctattttaataatgtagataaacatttcatagtttaaacattatatatactcaagaatcactcatacgcagacatatacgccttcgaagagagttggtcatgtccaattacggcacaataaatgtagattataagcatacaaatcagctcaccaagattgaaaagggcataacctgataatacacttgaatatttacgttcacaaatggatcgtaatttgtaccttaaaattgatggatgtaccatcatttaaccggaaatattaagttgagccgaagtccacactaatcttcgacacttgtgaatagtctggtaaaactatgggtacaaaattcttgatgtgttggagtaatgcaaaacatacaaatattatatttacattgcttaacttattaaatattaatatagcaacaagctaatgtatatagaagaaaaaatcgatttagtaatttctttacgtttttacgtttgtaagtgttctcacgtaaatatatattaaaaaaaaacaaagaatatggaacatcgtgtaattaggcatagaggtaatcaagtaattcacgagataccaatcgaatttgtccgtatatcacattttgtagaaataaagagagactacaaggtagacatgtgagagacgatcgagaggatcctataaactttaaagaatctcagatctctacttcctctttctctctcacacacatatacacattctctatatatatagaagagaaccaaaaagtaggagaagaagaagctaaaacatataagaatggtttcgagagaacacaagagaggttcctctctgcgtgagaagtttcatttgcttcgttcaatcactgattctcatgctgtaattttattccacaccattctcttttcttactttgtttcttattttgatctatgatactaaatcaaaatcagtctagctactacttatatatttactatctctctatatatatgtgatttcaattgatatatgaacattcgtattcacatatatatataaacttttttcacatatatatactttggcatgccgatttatcattacttgatttatatatctctttacatacattaattagagagatcaaactaatttacttcgtacaaattacatatctacgtagctttaattttattttcatatacatgaatgaaactctggtttggcggctgatcattaataaattcgaaattttgactaatcgatgatagagcctttttcctttcttaaagtgccttcttcattgagaaaagagagagagaaattttgaatgagaaaacgtcaaaaactatatgaaacttagaaactatctatatatgtgtggttgctattttagtttttatttttgtctatatagttttacttctcggacaattacttgatgatccgctcctagacataatgaacatatactacaataaaatacatattataagggccgaagtatgatcgcgaaaagggactaaacttgtagtttgagtatttaaattaaactaaatcactaatatgtttgctgcgcgcacgttttgcaggagagcgaaacatctatcatagtggatgcatcaaaatatatcaaaaagcttaagcagaaggtagaaaaaatcaacaatgcgaccacgtctgagcaatctttccgtgaatcttccgatccaaatcctatggtacaaacaaataaattacccattgatgcatttctactaagaagcattgattaactttgggattttgatttgtattggtaggttacagtggaaaccctagagaaggggttcatgataaaggtaatgtcaaggaagaatgaggcaggcatgttggtttgtgttcttgaaacctttgaagatcttggacttgatgttgttgaagctagggtttcatgtactgacacatttagcttgcatgccattggttcatcaaatgtaaacacagttcttccttaccatcactttatatagagtccattaatcatgatcattataatcactaatggtatattgaaaatttatttacttttacttaaataattaaatacagaatgatgatggagactgcatagatgctgaagcagtgaaacaggcagtggcagaagcaataaggacctggagtgatagccatgcatgattcaaaaaggctagacatatatgatcaagtattcattagattttctatatatataatttacatttgttttacctaaaaagagatctttagatagacatatgatcaaggaaaataaatcaattgtatgtctctctgattatcaaatctgtcaattaatttctttagcagcaagttagttaattcatcactaatatgcgaaaacgtgtatagcttgatcatattggagattcaaaaggacactattcctattctctagtgaatttgaccagctcaaaagcaaagaagatcctctctatccatttcgcttcttcaactctgttcccttttctgtcgattcgattttaaaaccgcccaagggaacgataatcttttgccacttaaacccttcgctaggttatgaacggttaatacttaatatgtcccaatcgttggtttgatgggctttatatatgttactgttagtgggccggaatatgggccatgcgtaaaacatattttccttttatcaaacaaagaaaaggtctagcttggaagattaaagatcaatcaagtaacagctatagaagaaacattcattgataatctcactaatttaattagtcacgtctcttgcttctcgtttccatcaagaacgcccttgtgatctccacacatagatgttggtttttctgagagaaaggttcgtacttatccgagaaaacgacgtcgtccatgttccgcaccacgaaccctacacaagcctccttcagcgtcttgctcgaaccaagatccgagacatcaagaacgttaagaacactagagatgtccaaggaacttaacatatattgctcgcacaactcttgcaagtaatgaatcatgtacttatctgctgcaataaacaacgcgtagacatttttctccaacttatctgaagccaatgtaccggtgtatagaaactccaagagagcttgaagttgctcggaatttagttcttggagcgttatggcgtattctggagcggttttgcatccatctgagtctagaatgttcttaaagatctcagattttgaagcctacatatatataagcacccaactcgtttttagaaaacaaaatttaatggttgcgtcatgttaaaatattttactttatttttttttctatttaatttgtacttttgaaattgtttacataaacatcaaacgccattgaatttttatttaaaccctataaattattgtatttttaaaatgtcaacatcctattataaaactaaccatgccataaaattaaattttaaaagagagtagctagcgatcattgaattaccagcaaagctctatgtgcaggaattggagggccatcatcgcccggttttagaagaatatcagcatgaagctgttctttgaaacccgacacaaagctgcttaagaagactattcttttcttctgttcttcttcggtttctttcatgtttttcatccatttgatcaccttctctaatggttgcggctgaaattctcgcacaaatatatagttaaaaatcattaagccaataaattaatgtgttttgatttctaaaaaataattgaaatgttttataaattaaagactacttagtgcaaatacacataagaagcttacctcacaagaaaacaaaggagacgaagaaatagaggagccattattgatggtggaattatggttcgatttgtcatgacgatcttctttcgagccctcaagtttcttgagcagcgcaattgttgttctagccccttcgtagcatgatccacatattgtgtttcttggtggtcttaatatagatggcattgtggtgcagattgagcaatccatttaatgttcttggtttgtagtttcctcttctctacctcgcaatttttggagtaaacttgagaatatgaagaagatcaatagaggaagatgatggaggagcagtttcttgcttcgaacgcaagttggtaaagtatggttcaagaattggttagagatggctacgttcttgaaacatttttaaatatatttttcgttaataatcaactcggtacatgattgtttccgtaaagagttgttgagcataatttaacaaataaaacaacgtagatgaaatgattaagacatgaaggaatcttttaggggcagttgtatagttggaacttggaaccttcatgggatgttatatacttaattaatttaatgaaacaaatccaatatatttattaatttgtttattatatgcttgactggatatatgtatatgcttcgcatgtatatgatcgatgctaaccgtacataatttagtaaagttaactcatgaagaatgatttagagagtagataagaatacagagatttgagatacgatagatagcttcaaaagctaaaagacgtaaaaagttggtaaagaagaaaaggactttccaacctttcaacagcaaatatgtgtagtgtaagcacgtcgctcctatagcttcaacattaattgacttaatttttgggaaaaatattaattaataactcattaattttgtaagaatgtgcaatccaaatcttagcacgaattgttttctgaatggattagctagattagtgtatactaatcacacccatatagtaattcaggtaagatgataactcaaatttgaatccacatgaatattatgtactattagggccacatatataacaaaataagttattagtctatttggttttgggcttatataaataccaaggggagttcaaacttcaaatcccatcctaatgtccaacttcttacaaaaatatgtaaatagaccagaaaaacttttgcttggggcttccaagttcttcaggccggctcatcttacaattttctcttgaaaatggttcattctgtttttgcctattttcagacagatgtctgaatggattgagttttataataagtcaaagttaagactctcgcagtatttaattaactagtaaaacacttaaaacttcttataaaagaaagtcggaccaacatgggtccaacatcttgttatcaatagttgaaaaaggtatacatacataaagatattaggtatttagaggaagcatttcttacaacaacacacaaaagcaaaagataaagaagcattgtaaaggtagattagccttccttttcatcgttagtatacttaaacttgtgatggcttagtctcggcttctgcggcttttggttcaacatcagcttttgcatcaaccttagcctcagtcttagtctcagcctcggttttagtctcagtcacggtttcgaccttaggatcagcctcggcttttggctcagcttcagcctccactggccagtaagaagtcttctttccggtctttgaaactgtttggaaaactgcttcaggctcaacattacctttcactgtcaccttttgctccttgatatcaatgtcaaatgactcaacccctgagattatataataaattatagagtcaataaattataaggcttaaaataaagggaaacaatgattagtagaaagtatttgaaagacatgaaaaaaagattagagagaaataccttccattttgcctaaaactctattgacggcaccaacgcagccttggcatgacataccaactttgaggacaacggtctgcattaattagacaatttaatccgaaaatgtaagaaccatatccatatacataggaccaattcggtccaaatatatcaacagctaattttatcacaattattaactgttatcttttgtgctctagcttaataatatttaccttttttgatgaatatttcaaagtggtgctaatcggacattatagtacttacagatagaacctagacctagaccaatcaatctcttttcttccctcttgaaatttgatattaattcattccaaaatatttattatcataaaaactgattaatcggactctcataaccgatatatatagacaattgctagcatcttttttggagatggacacaaaaagacattcctgcttccagatcaatgtctctcaaaaacattattccatcgtttcatggccaagaaatggagaaaaaaagaagaagaatatcaaagtcacaaaattacctgagccatggctagaataagaagaaaggaaacgattaagctttgagcctttgagatcgatggaccgaatcagagaatgagatgcttgtttgttgaatgagaagaaatggtgtcttctgaatatttatagtaacgcaaaagcaaagattcggagaagttagcgtaaaggaaacgagaacattatgaattagtgcatttaccatatttccaataataaagtataaaggtttaggaaggttagttatacctgatgtggaaaaaagcttaccaactttaaaatccactaacagaaagtacaagtacaaagaattctatgaggtctccttgtactacacatgttttgttgcagtaccaattacctaatttttatatatatggggtcaatcaaagtttacttttattagatagtagtatttgactatgaacttagagaaaactatttttatcctaatattttattttcaagctttctaaagaatatcatgaacaataaaacacaaatattatatgtcaatctataaaaatatcatattatacatgtggagtttgaatggtaagccgaactaactcattttatctttaggtgactaggtagtggggtgtattgatacataaataatgttgtccttttcacggattgttttgccaaaaactaaattttttgaatgatggacaaaagtttcacaatttgcggttttacattgttatcattcaaaattgcgaatatcttatctatcactattcatattgaattttataattctaaacagtaagtagctgaattttcagaatcggtcatgagaccaatatattctttgatattttgttgtttaaaaagtggctaaaaatcgatgtgtaccgttttttggaatcctactcgagtgagcataggaatgagagactcaagtataatatggtttcttatatggattcccaaacttttttttgtagttaacattatcaatatttccattgtggctttcctatgcgacgtccatcaaagaaacacatcagcatatatctatcaataatgcgtgtagttttgaaatatggcactcattctctgtccctctcaccgaacctattcgaggaactcgtgtaatgacgatcgcaatttacgtgtttcaacacaactctaaagatctcatcacataactcgaaatgcaagaatctttatattccaatcgttattgaaattacgtatatatcatacaatgctgaatcatactttgtctacttggtggttacaaagatttcagcctcacatcacaatcacctaaagttgcaattcctttattaattggtcaacaactcgcaagtctttgatacataatgctctaatactttgctcccacttctaaaaaacagttcccctctatacaatatatttaatattatccttacaaaaagaaaagcaataattttgttgatcccctacacctcatcaagttctaaaaaggtagtagaatagattatgatatgggcccagtgctgtcaaaacaaaatcatgggcccagttgataaaataaaaaatatgggcccaacgatactttcccaatttgggcttctcttaaatcctcaattattatcgtctcaagctctctcgagccttcttcagaactcttcttcttttcgtgcttttcacattcccgccaacagagagtagaaatcttctcccacaaaacctcagatgaatcatcccaagattccgacgccgggtaaacaaatggaagctcctcgctccgtcggaggaagaatacagaggaaaccgctcgcggattgtactaacaccgtctccagatcttctcaacagtcatcttcttctgtaaaattcgcgaatccgagtctcacttcttcactaaagagattagtagaacaaactacgctcaaggagaaacccaaagatgttaatacttcggcgactgctcccgaaatcgcttctcggcctattaccacggacgttagacccgtaactcgccgtatgtctgctgatctggcttctccggcctcagctccttctcgtccccaaacatcgcgatctgatatgggtaattgatttagctgcgatgattttgttccagttttgttatactgtatcaaattttaaggaatttcatctgaattgaaattgttcgcaactctagggttttagttttcgggttttgggtatttttaggaattattggaagaaggtttagattgatgcttgaatttatcatgttttctgttatagtggaagagcactaattgggtcacttcaaatttccaaaacggcaccaatattgagtggattgaaaattgctatcaagctagttctcagtctctgttgattttcaattggtatttttgcaaaattggtttctgtgtctatcttatactgatgttaaataattgtcttatgcttaggtgttagtgacaaggattttactgagccttggtctgtttacacggtaagaaggaaggcctctggacaaaaaagaagtaaagacgcatcttcctctactagtgcagcagctcgcattcgtctcgacttgtcatcaagctctgggtatgaaacccattcgatcatatatttgctatgggaaaattgatttggcatggctaatagtagctaatgtacatatggaatcaggatagaatgtagttcatgctgactaatttattgatgcctgttcttttgaaagaatcttgtcagtaagaaatagtagatgagataacttttgttagtgttacagttaactttcatcaaatttgtttagcattttgtgggctgtttataatcaaccatgttgttgttagttaattttctttgaaatttgtatcacaggaagaaaacacgtcaagctagtgaaaacaaaaagaagaccttgaaagtggctccaaaaaaggtgaattcaggaaagctctggctgtttacttatcagaactgtaataattctatgttgttatcatctttctgcgaaaaagtagtcaatactttgatctattggttttatggctctagcaaagtgtatatcagtgcattgtatgtttcaacattgattgttcacaacgttcttctgccacatgtctgaaaccagtgctacacatagtttgaagtgaattgcctagtccttcagtttcatgtatattcttctttttttcaaaagttggatttagaatattgtcacgagatacagtgggattactgtttaatgagatatgcaatttggaactcccattgttcagttatagagccttatgactattggtaacatataagtttgctccaaatctaattctgcatttgtggttacattacagagacagcggacggtaaagcaagagaaagaggatccggttagtgcagcttgtcaggattatatcgagaagcagaaagcttactttgcagagattgatgcatttgagctgccagtagaagaggtatctaatagcgactcagactaagtaagaagagataacaatcttaaggatatcatagagacaccataacccgttcgtaatcactgtatagctaaggagtattctcacaggaaatgtttcactggtcacttagtacacatgacacgtcaaatctgtgtatacaaaatatctatcggtttataatatttaacatcgtttcagtgggagaacgttcttggttctacttagacatgaattgacgaaaaagcctgtccacaatacacaggtaaggccacgactgagagacaaactatatacttacattcacacaccaataactataacactctctgttcaatgaggcgaagcagctcatagaaaaaaccaagctttattcacataatcaagctttattcatgtcgctgatgattagagctttacctgtggtctcatgtctcttcataccctccattgacccagagaacagagctcttgtcacactccccattgaagaactacagccaagtcttcccccgttggagcaacacagagtcgaggttggtgaagacctaagctcatcctcttcgtagttagcgtacagaagtggcgattttttgtcgtgactcatacgttttttcaaagaatgtggtggcgaggaggaaaaggaagatgaagatgacgtagaagaccaagaaaacgatgagcttgccgtcttcttgctaccgtgattgctcctcctgagatcactgaacatggagaaggacagaaacttacttagttttgatctcaccttgctttgcgtccttggtgtcgacaaaatcccggaggagtagtatgagggcggcggtgtgagaggcagaggaagagaggaatcggagcagaggtggtttttgggtgttcctggccttgactcccatatgaatggtatggaggctccgccatagtaggaggatctctcttcatcgattgcaaagtcatcttctagtctttctgacatctgttttttataaactctcggtttatgtttgagtcggcttttgatgagaattgatgtacgaaaattgaaacaacaagtgctagtttcgaagcttctttagaggtgacaaagagtaatatgtattgcgagtaaaacaagtttgccgatgaaacaaaagaatcttctttgcacggttgtatataatcgtggatatttattctgcttttttattttctttaggaaaaattcatatggatgagcatattacaagtatatggaagatcatacataggggaaaaaattggttagataataaatgaaaggtggctatcttactgtatgcattacttaatgcgttttcattaataataagagagtcgtgaggtgaggatcacattattggtaaacagttactgtagtaagcattgcttagagtatttaatatgttaccttttgtgggattccactctataaacctttttatttggtgttcttataattaaggaaataattattgaccaacaaatccacacgttttaatatatatcaagactactaaccttgtttgtcgtaatttgaaactactgaccaaaagtttggggcatgttcatccaaaagatataatggtttacatttaatgaaatgataatttagataggatataatagggaactactcagagtgtcagaccaaaccatctgaatacgtaccaatgtcaagtgctaactggtaactcccaacaatagtaattagaaaagatatatatatttgtcggttctaattagttggaagaaacgtatgcggagaaataaatagaaacgtgagagatcgaaagacgacggtgatgaatttggacggttgagtgagggaggtcgtataatttaatggtcgtttccaatcgtattcgtacgtggtccgttttctcctactcggattttgctttaatgtgatggccacacaaattggttagaaaactataagggaaagctccacctatttatttcactcatacatttactatacactaatatcgcacgggaaaattataacaattttcggatattcgtatttgaacagaaacaaacaacacatacgtaagaatttccttcacaaaaaagcccaatatagacgaacttgaacttcgtaccaacggcccaatatcgcttccttaatcaacggcccaaaattttcatttattaattaatcagataaccaatcaatagaagccacgtcgccacagccattagtagtagcatcatcaaagcctgcattcttgttcttcgagtctctctcgtgagtgactttcattaccgagaaaaacacaatcatagagaagctctcaatcttgtttgcttctgatcagtaactatgattactgtaaatagatcactctttcattatctttccctttcacttgtacaaaccaattcgttctcgagctaacggaaatggcggagaggcaacagagccctgcggcggagacgattcccggtacacccgtaatccgggaagtgagaaccggaaccgggtccgagaatttcaacccggagaatacaaggagaggatgcttgagagctgaaatcgacatttctccacagttatatggtggtcgtgggttctgggttcccttcaatcttgaagacaattacgtgagttctcttctagtttccgatttacaaagtctgttcatttaaagtttgagcattaatgtcactgaaagtttgaaatgtatgttctctaactgttaagtatgctaacaaactgaataactgatagctgattcgatttggttactgagtagatattttgtaataagtgatagctaatttgatgtttgcatttgcggcaattgattctggaactagcaagatgttatgtaagatttttttttggtattatatagcatgatttgttttatgtttttttggtttgtcattcttcaggactgtgtgggagaatttgacataaagagaatggaagaacagacagtggagcttgagaaggatctgattatgaaagagttagagactctggatcttcttgaagctcttggatcaaccaaaaggatttttgaagatttgaagtggcagcttcagcagcaagcactgagatgcaaggagacccctcaacatttgcgttcacactccaaagagatggtcgatgagcactgccatcgtaatcccctgaagtctccggatctgatgaccatggaaatgaagcaagctggtatgaatctttgtaaaaccatggatgatcttgcgttgatccactcttatgctgaatctctgaatatgaaaacgaaggaagagaaagatgtccttggagtagcgtctctagcggaggaacttaacagtttgaagtttaaaccagcaggtcctgatcaagtagagagattcaataccgagaatttaccagtgaatccacaatgtgaacagattaagatggtagttgaaacctatgatacagctttccataaacagagcaaaacctgcccgagaactgcagatatgagattggttgctgcaagaaaaatggaagaggcagcaagagcagcggaagcacttgcgcttgctgaaatgaccatattatccagcagaagaaaccaagacgctctctgcttccctaagacaccatgttttccattaacacttaaagcacagatgaacaaagaattatccaccaatgtctcaagaatagagatcttgaggaagctggaggaagctaacgaagaagttaaacaaagtaaacaagccttggaagttgcgttaaaccgggtagaaatcgctagtgtgaagcaacttgaagcagaagaggcatttcggcagtggaacatagagtcatggaaagaccagaaagctgttggagcaaaacgctcgatgaaaagagaaagctttcctcagcgctctttcttgagccatatcaatcagcacgagccactgatcgatctccctgagccaatgctgaaacgtaacgtctcaatgggtaatgctcttaaccgaaaagatgagaaacagttggtcacgccgaggagaaagtttaggttcatacaaacacatcaagcttccattagaaaaacagagtaagctaaaaaaatacccaacctttgaaaacatgttttgcacatttcgattcctgtttttttttattcttggtttgatcattgatgggtgttgttgcttccatcaaaagcaaaacacagatgattagagtgagatgtgttgttttgactcaaatgtgacaaaaagaaaaacattatagtaaaaactaaagcttctagtaatcataattaattatgggagttagtgaagggcattgatcatatgatttaggtggtgggcactttcttaactaatgcattttaagtgttagattagctaattaggtgatccataatcaataccgtaggtcctcaactgtttattttttaataacgttggtctttataatgtttctagattctcaaaatagaaactgaaacattcaggttgaactacggagataaaaacacattttacgatttgaccagtttgtactttatactgtataagtttggagtggtcagatacagaatgatgacgtggtcaaggcttttaagacaatctagatatctccaataacttaatgccacgtgttttagtcttcacaacaaagatttcgtctggaatcctcgtattggcttagagcgtgggaccaaacgaaaccaaaagaaggaaaaggaactaaataaataaataattaaaaaataaagttgaaaagtaagagtggcgtgggttagcaaaatcattgtctcaggctaaaatgtgccactcccaacacgtgggctactcttttccaagtgtcaactatctgacggtacgtttgcacttttttaaattaggttgctttgcgctcgtttcgtgtcaataatccaaagacaacgtctttatctttatttattaattttgtttctcctaaacattaaatgttgtagctttttgatcatttttcatgttgtaaaatataatataataccctctgctttgcttataaaacggaaaggatgcatagtacacaaagatccagaccaacaaaaaaaaaagagggaaaatctccttgttcaatagtcaataagttagccgctatcgatctttagaaagatccgtcgatgagtccatcccatggcgaccggaccaccgcatttgcctcgacggatctagtcatgttgagcatggtaccggtattcaaccatccttaatttcattctttgataccttttaggcatgatactcttgatatatgattctataaaggtatatatattgaaactattttatgtaagaagtttattattgagggcacacgtgcagacatgtttcaggcttaaccatatggagaagggatgataacgagatctctctagacgtggatgggattttcggttcaaagatggaatattcatataaattcacatgcggattatagttaaatcggaataaagttttgataagtggactctccttacctaagtggggatggtagtccagtcttgtatcaatatatatatttgggctaacttagcatgcatatagaatcattatcaatgtgttagaatattctccacctatgtttcgttcatcccaattcccacattacttcgaaaggtgtctcaaaaggcaagtcattttttctggctatgtattattaaatgaagcttcggttactaatacttttccacaattttcccccctaatttattataagtgtttgtaatggagaaaggtttgatggaattagtagtttccttttatgtatgaatgtgatatgttttatattgtaaagtaggttagcaactatttcactagaaatctgcaaaaagctacattatttatcaatggccaaaaaaacatttgtggctaaaaatgaatggccactatagataccctatggctatctagctagccgtttccatgagaacaatttatgagtttggagagcatgtttgatccatagaagcagaatgtggaggcttgaaggaggatcgagaccagcgagattggtgaagaaccttcagattgagttactaaaagtgctagagaaatagatgatcttgcgtttcgttctcttgatgtagcgacccctatcacaagtataaaaatatggaagcaaaaacaaattctgaaattacatattattaatcttttgtgccatgggaccgcttatacaggctaagacagacaatatcttaaaccctaaacattttcattttcaatgaattttacattcttagcaaaacaaattaacaaacaaaaaagagaagaaaaaaaacgattccaagtagctatcgaatatacaaaccgttcaccgtttcttaatttggaatgatggactaaaaccaagttaatttatgttaagagtacagactcgagagcaggctgaagagtgtgccatatggaattagtattgaacaataattatattacttttgagagaacatatttatacatcagagattaggatttttctatctacaattacacttaagacttttacatttatataataacatttttcctttacataacccctcaagattggactgactactccactcttggaaaaaatgttaatttgaaaaaggttaacgattgcaagccagtggatttgtcaaggcatcgacgagttggtctttagatgaaagacaagcaacttgaagtgttttttaagttattagaatattcctaattaagtgatattcgagggcaagatgtttcattctcaaatggaacatcggattggcacataaatatgttgcgtccacattaaatgacgggagtagatgatgtaattgagatgccaggctatgagatccagtgaatttcagaagaggtatttggcactgagttgtactaccatgtagctttaaagctacctgaaagtactgatgctagaaagagaagaagaataacaacaatgtatgttctcatgaagaaataccaaatgtaactatctctttttcaaaatacctaaaacaacaaaaatattacgaaggatggttttgtagaccataaagtcatttaataaataacaaaaatgtaatattacactttttgtttctggtcttacctacatcataaatacaaagtcttctgtttttctttctaaataatctattatctccaaacccaaaacaccgaattacgtaaaatatagcgcaacacatattaaagtacataaaatatagaaatattttgacgtaaattgtagaaacattatgttttcttttatgatatgattttaatatccccttcagagcataatttttctttttcaaaatccaaagcttctgtattttaactttaaaagaaaagtaaagatttattattattacactccatttctttcatattagttgtagtttaaggtttttacacacatattaaaaaattataaaaatctcatttaatctacttcttttatataaaaacatcaattattttaaccaatttaaccaataaaaaatatatgattatataactagttaacaaatattaaatacatttattatttgcatagaaagttgaaaataatacttattttggaaaaaaataaaaacccttaaattacattatttatatagaacagagggagtatatgttaaatatagatttatgttttgaaaagagattttattctattaaaaattgtctatcccatatcgttttccttttttcagaaggtacatatccctattccaattaaacatacaaattaatttttatggttatatatagattctgacgccagctaaatccatgatgagtcaaactcaacttaattacataccaagtaatgtaatataaagtatggttttcaaaattgctaattcataggattgtgccacgtgtcaagtcaaacgatcagatgtttacatgtgtcattcaaaatttaacttttttattctctaaaaaaatagaaaatcttaaaaagtaaacaaatttacatatactaatttatatgtctatatatttataaacaattaacatttatctaacaaaaggaaaattaacaaatttgtctttaactcatgtaatcataagtgaaaaataaaacattttgagaaaaatagcttagcttataggatttaacttttcaattattttcatttattaattttaacttatttaatattaatttgcatgatgtaaaattaacttacgagattacgacatatatacaaaatatattttcaacaatgtttggtttctaaatatttttgtggatttttttatttatttattaattattagccctaggcgtttgggtattcggatcgggtatttcgggttcgggtttttgggtttagaagtttaggacccgttgagctaatttaagattttaggtcgggttcgggttcgagtttatttatatattgaaatatcaaattttgtgtgcaaatctattaaattacttgaaaatttcaaaaattcctaaaacaacacgagtagttttgcttgaatatatttaaaaatacacaaaataactaaaatatccaaaacatcctaatattttctatatataagtataaatataactaatatatacttatatttgagatatgtttggatacctattcgggtcgggttcgagtttttcggattttcaagtttagacccgttcgagtatttgaaaaatttcgggtacacccgcctaaataggcgggccttatctagttatatatacagataacgaaagaagtaatcttcacaatctcaaccaaaagacaaaacaaaacatcaaccctaaattttgtacttccatgtcgtcgagatcgagttcgtggatgttagacccgatcaccttacgaaaacttggctgtctcggccaaggcgagcatggctacatctctctcgttcaaaccaccgatggtttactcatggctaagaaaacatctctccgcaaatactcagagaatctcgagaaagaacagaggatcttacatcacttcaactcgatcaatttcaacatcgtaagacccacaagccctatcgtctattacgaaaccatgccgttcaatgtcaagatctgctcaatttacatggaaatcgcaccacatggttcactcggagacatgataatcaaagccggtgggagattaccggagaacgtggtcgggtactgcactctcttgattcttgaatgactcaaggatcttcacaaagatggttacgttcactgtgatctcgggccagagaacatgcttatcttcccgacctacactcatggagagctttgtgaactcaaactcgctgatttcggcttagcaaaagagcctaatggacctaatccattggatggatctctcttcgagggatgtcctgcatatttggctccagaggcggtcgggccatgtcgaattatttcgtctgcggttgatatttggtctttaggtgttatggtaatcgagatgttgggggttaatggaggaggaagaaatgattacttgtcacagacgctatcatcgatggcttgggactttgtgaggaaatgcaaagtgcatgactgggagagtagagccaccgcagaggagctgctgagccatcctttcgttaaccaaagtattggggttccaccgtttgagatgcttcctgttccttattgcttaactgatggagtggttcaaggaaggtttttctgagtagaaataaatggtagattgacggtggagatgagcccgatatgaatgattttattttcgtttttttttttggtgctaccttattcttgaatcaattgtctgttacttcaattctatatatttcttgttgtttctaaatgattaagggaaaataccgggaaatttagattaccgaaaaataaggaagagaaagatgacaattatttgcccttacttaatatattaatcctaagtcgaaaaaccaaacctcattgaaataattatatatcgaatggaaatggtgattagggagattcttgaaaggatattgttttgctatatgaatgtggtctagttgatccaatgtagtttagttaattaatgtttcaatacaatggagtattagtgaacataatagggtggtagtgtttccacggttccaccaagcgcgctatctcagttacttcactcaagtgttaagctttgtttgatacgttcctaggatcagtctagtgaaattttcgttcatctgaggctgaaaaggttaaaatgtatattgtctaatattttttgttgcctttgcaattcctttcttgtctcttttattctccttttatttctagctagatagtttttcagaattatgcaagagtaactaagaagtgtctaatataattaccaaaatgagagtggacacgttctttatgattcagtacttaattcaccatatctaaacttaaatctttaaaaagtcttcacagtgctgagacaaatctaacaaacgcctattatgagtctaatttactatacagactatactatatatgtataaacataaaattcatctcgaaaaatgaagtgggtttgtgaaaaaacgaaagaaagaaaatattatggaacaattcaataaatttatcactagcctttaagagcttgctagttccagaagcatacaccgatgaacacttaattgcctcacaaacatgacgttgcaggcgacatggtggtagtttcataggagcaacaactcaagacgaccgtgaaactgttacacacttctaacacaaaatttgttcttcattattgtgtttaggctttgatatctttagaaaatggggtcattataaaaacttgaaaacatttaaaccaaaaatgtatacatccacttctgtctcttgtttaacaagatcccaaataaccgtgatgtttgttttggtatgtagaacgaatttcgatttctataaaaatacacacaaaatttcaagagtaatttagttacaagcaaacacattcatatgatttgggaaattgatcatcatcatctagagaagagtctggtgaagaaatttccagagggaggattttgaagacaagagacatgagcatatctccctaacttgtccacttgtcttgcctcaccctttgtgtcctttttgcatatcttacatgttttgtccacccatccctcctccacatattgcccatccactataacatgtatttaaaacaataggttacagtttatttcacatagtttaattataacaaataaattcatcattctttcttccaatttaaatagttctctagactttaccttcaacgtaggatttaaaaaagtccttgtatgttcctccgatttttctcctcaatgccccatactgcatatcattacgaataatatcaaaacatataattcgatttttgattatacaatactatcataagtttgaatttcttattcatgttaagaaattagaactcgagtcatcacatataatttgtatcatacaaaactcatcagtgtgtggttaaaaaagaagacgaacctgttcttgggtcatcttgcgaccagatttggtggcttctcgagcctcgtagagaagctcagcgtctttctccgatcgaacttgtgagaagtccaaggcatccgttaattgagtaaacaacgaagtctcctcttcattcttcttcttatcctcatctttctcttgctttgctgagacaacgacccatctagggttccggaaaatcctgggcgaggttcttgagatggatactttggtcgtggagatgaacccactgctgtgttgaagaggcagtgctctaaaacccatcttatggttttcactcaaattccaagtaaagagattccaaattgtgctacatttttataaatttggcaaaacatacatgtggttgtgtggtggggattgaaatgtaacgggggccacaaatgaagaatattgctgtgagtctgtgactattaatgtgtttacgtgggagtttagtgatctgatgatatatgaggtgtccaattttgtttacttaattactagtgtgtatttgctaatacgagattttctttgtacatctcagagatcaactaaagtcaataatattcgcagccatataaatttgtattttttggtagacaaaaaatcatagattatttcctaaatagaaaaatggaaatctttctaaaatcaaggttatttagcaatttcctttatttcctttgttttagagtcaaatatatttttttgggggtcagaaaatcatatataattttcctatatagaaaaatggaaatcttagaaaaatctagggctatttaagcaatttcaattttcctaaacaaaattcgacgctgccgccggtaaaaattgagctcgtgaaagctttacccgggagaagtgaaaaatcatcagagtttttgagaaattcttccaagcgacggagagatgtcggagatggaggtggagaaaccggatttgacattgtacaacacaatgactcaactgaaggaagtttataagccgatgaatcccggcaaaatcggaatctatgtatgcggtatcaccgcttacgattatagccacattggccacgctcgtgccgccgtgtccttcgacctcctttacaggtcagttccatagttttcgccgtaggattgttgtttaatttgaatttctttaggtcacgaatttggggaaaaatcccaacaatttaaaactaattttgtctattgttagcttcgattaacaatgtactaagcttagagacatttgaagctggtatttatctctctagtgtactggttgattatgcagatacttaaggcacttgggttatcaagttacttatgtcagaaattttacagatgttgatgacaaggtctggtatccttttctgcgttttgaaactagagcaatgaacaccaaataatcctcctgtttatcaaactctgaatactgtacctgcaagtaattgaaaaggctaaaaactgtggagagaagccgttagatttgagtaatcgcttttgcgaggagtatcttttagatatggctgctcttcagtgcctccttcccacccaccagcctcgtgtcagtgatcatatggaacagatcattaagatgatagaaaaggtttgttgtcttttttcttcttgtttggtttcctgcaatgttctttgttaaaatatggtggtataatgatgatgcttccttggtacagatcattgagaatggatgtgggtatgctgtgggtggtgatgtgttcttctcagtggacaaatcaccgagttatggtcagttatctggtcaacggctggatcatactcaagctggtaagcgtgttgctgttgactcaaggaagcgtaatcctgctgactttgcattacggaaggtttgacaagtttaatctttttgttcaattcttatttcagttattaaactagagcagctggagtttatgctgaaatttttatgcaggctgcaaaatctggtgaaccaagttgggagagcccttggggtcatggaagaccaggatggcacatcgagtgcagtgccatgagtgctcattaacctgtctccgaggtttgacattcatggtggtggcgcagatctcaaattcccgcaccatgaaaatgagatcgcccagacatgtgctgcttgtgaagatagtggtgtgaactactggttgcataacgggcatgtcaccaacaacaatgtgaagatgggaaaatcattgaacaacttttttacgattagacaagtaagtttcttatttgtttcaatatcataaattgagtgtgtgttttctcacggctaatgcaaaattgttgaatctgtgtagatcgcggctaactatcatccactggctttgagacatttcttgatgagtgcacagtaccgttctcctctcaactattcggtttcgcagcttgagagttcatcggatgctttatactgtgtttatcaggtgggtgccttcacaatattttttagcatctcttaagggaaaacggtatgaatgtttcttaactttaaagctctatcgccatatcgagaagaaatgagtggagatgttggaaagactcaacagtctgcagaagccaaagagatgataaagaaggtgaaaagtgagtttgaaacaaaaatgtcaaaacgacttgaacactgcccatatactcactggtgcttttcaagacgcattgaaattcatcaacgtttcaatctccaagctcaagaaaatgcagaagaagcagcggatgtcgctggtagtgtcactggtcgaggttgagaaggcagtgagggaagttcttgatgtgcttggtttgctcacgactctaagctacggtgagcttttgaaagacatgaaacaaaaggcattaacaagagcaggaatgggagaagaagaggtcttgcagaggattgaagaaaggaatatggcccggaagagcaaagatttcaggagaagcgatcggattcgagagctgttggcatttaaaggaatcttcctcgaggatgttcctggagacactgtgtggagaccttccaccccattgaccaagcctaaatctggtttaggtttaggcatgacagccatcgtttttgctatcgtttttactttcttaggcttcttcttctatagccgttgaactctttatttatttcactatttgtttagattgtgttgtattagtgtgtggtaaacttattaactttaaacattgacctgcaactgaaaaattattggatcaccaaatctcaaacgtttttatatgtagtcagtcacattttgtgaaaaacgttcgttaactaaatctaatctaaataaatgcttaaaactcaagagcaattcgtatgtgaaactaaatgggacagatttataataaattttctttttgtttaaaaatggccgatggtctaattaactacttatagtagtattactgagtaaatattgtaattaatgaaaacgatagtatataggatagtatatatgataacgtgatgattcataagcatatttattattttatcaaattaaactattggagttggagataccgatacgactccactacatctatgaaaccattttcgtgtcttgactttggtttggttcaacgaagacacatagaggaagaagtcgccggagaagtgaaaagacgttgatggtgattatgaagaagatgaaagattcagtcttgttcctcgtcgtaggcctcttctctttatctgttttggtctctcagtcgatcgcagggagagtcaaagctccattgttgcagagcaatactggtggattagttttcagcaaatccttcaattcgatctatgatacttctatgtacggacgcttgcagctcaacaatggccttgctcgaactccacaaatggggtaggttcaaggaattagctctttggattttgattttcgtggcttgtttctccttacatgtaaaggaacaatttttatggggttttgtctctgttctgttgtaaagtttgaaactttgaatctgtcttacaagttaagagttttgaatcactctgattggacttgtgctttgttaatcgacagatggaatagctggaatttctttgcttgcaatatcaatgaaactgtcataaaggaaactggtaaaactttctttcttttgatagcttctaataacaaaaagctactcacatgtttcatctgattttattttgctatatgttcattagagttgctgatattttatttataatttaacagctgatgctttggtttcatctggcctggctgatttaggatacatacatgtcaatattggtatttgtccctttgacttgtctcttcatatattttctatctgagagtcttgaaaccttactgctttaacgtttcacaagtttcggtttcttgcagatgattgctggtccaatttgttacgcgattcagaggtaagatcgctcgtattacttcagcattgctcttctagcttgtgtggtaatttctgctgatgctcgaaaatactatatgtagtgagctcatgtcctgaagttttactctcgattttcatgtagaagttcttttctctgtgactttgtaaaggacattaaactagacgctggatgcttacgttcttttgtaaatcttgaaatccagggtcaattggttcctcatcctgaaaccttcccatcaggaattaagcttcttgctgattatgttcattcaaagggtctcaaactcggtatatattctgatgctgggtaggttaatattcatgtacctattttataagctcgatgaagttatatgacatgatctcatgtcactgttttgaatattgcctctttcagcgttttcacttgtgaagttcatccgggatcccttttccatgaagtggatgatgcagacatttttgcttcttgggttagttttcagccaatgttgttcaaaatttaaagtagtcaataacctttttaagtgaaccttattgaggattatcttgtatttctaattacaaacaaagaccaatatgtttttgatacttggtggtatctttgtcttggtttctcattggtagccttgatttccagggcgtggattatctgaaatatgacaattgtttcaacctgggaataaaaccaatcgaaaggtttgatctttatgatttgatatggtaccttttactcacaaaatatttatggtataattttctgaatcacttgatacggattctggtttccacattccagataccctccaatgcgtgatgctctaaacgcaactggccgctcaatcttctattcactatgtgaatggtacacaactacacgtccaaaatgtcttcacacaggacgagttaatttgaaacccacagcattcttccaagttattaatttgtattttgctactttctgtaggggcgttgatgatcctgccttgtgggcaaaagaagttggaaacagttggcgcacaaccgatgacatcaacgatacatgggcaaggtggatatctcttagcataatcttgtgatttgtgtagatggacattaagttggtaggaggggaattactttgattgaatcatgatctgattgttttactctctttttctgttgttgtttatgaagtatgactacaattgctgatttgaataacaagtgggctgcatatgctggacctggtggttggaatggtaaacaatcatttaagatctcaaaaaatgttttccattggagtaacaactattacatttgaagattgatcacatttgtttccattgcattagatccggatatgttggaaatagggaatggagggatgacatacgaggagtatcgaggtcattttagcatttgggctttgatgaaggtatgtaactaattcatggtgttttctttatatcctagatctctcatctcatccccatggttctcttgcaggcacctctcttgattggttgtgatgtaagaaacatgaccgctgaaactttggagattttgagtaataaggagattatcgctgttaaccaaggtgaactttcaatattcttttacttgttagcttcactgcatacatgattttccacaaatccattgtccaagaccgagaatctgagaacatttctggttgcagacccacttggtgttcaaggaaggaaaattcaagccaatggagaaaatgattgtcagcaggtatgaattgggagtcacagaattatcaaactcatagagaaagcagaaaaaacaaactcaaggactcaaattggtgataactgtttcattgcaggtgtggtcaggacctttatctggtgaccgtatggtagttgctctctggaaccgttgctctgagccagcaactattacagcatcatgggatatgatcggtcttgaatctaccattagcgtttcagtaagagatttgtggcagcacaaagatgtaacagagaatacttctggctcctttgaagctcaagttgacgcacacgactgtcatatgtacgttctcactccccagacagtatcacactctgatgtatagttctttattgtgaggcattcaaatcccaaagaacagagattgcctttgtgtttctgtatactcgtgtatcttgtaaaacgtgaaacctgttgttacccggacaactttaaatgtttgtcactctctaaacaaattgccagaagtgacaagaagtaaaactgaatctcatataaaaatttagataaaaagtctgaaggatcttgattccaaagaaaagacaaatgccaaatcaactcttaatctataccacttttgtatattctgacctaccaacaatgaagaagagatctctaatgaaacattggtcaaaacaagttcctgatggatcttttgaatcctatatagagttttgaatactaaatagagtttgtccatgtggttaagagaacctagtaatcctgaaggtgtcaagataacaaccaaagcttcggtcacagtcactaaaagtcaagagccgttcatggtttgggaggatctgatactctcttctttgccattttccaataccaatgtgcttgaagttctaggttctactaggttttctggtggtggaaattggcaattgtcatcaagctccaaattcgcagatctttgagatttcagcacactctctggtctcacacattcttctcctttgttactggtacaagaagtagacacttcaccggaaagattgcagcaactactggctccatcattgtctattgcctcagaggaagcttctaaatgattcgttgatgaggttccagtacctgattctctgaacctgtcagagtatacctgttgactctgcaacaaccattgagaagcaattcagaagcttgcagcaataagttaatttttaagccaaaatgtccgtcaaaggggttaatcgcataccatgtcaggaatataagtgccggttcctctcgtctttctcatgttttgacagccattaggtaaagaatgcaaaggaaaaggctgcatagaggttgatacattgagacttctaagatggaactcgttctttcggtaagtcacaaggtgacgaacaatatcccaaccactcaggtgagaactaaccgggatatagccatgctgaaatgttccaggtaagctatgcccatgatacatttgcccatacacaagtcttccaaaggaactatcgaaatctccactaagttcagataattctgatcttccagtaccgaaagcagtaacgggatcattcacatcttgcctttgtcccttaccatttctctccaaagagttacgaaagaacttctccaatctccatcccatggtgtcaccaggtagtgaaagaacatctcttagctttcgagctccaagtgtaaaagcatgtcttattcgttggacatttcctaacaaaatgtttttaaaataattaatatttgacaactgctatattggttgtataacttttatcaatagagtaccttgtgtaacacttttgccgaggttgttgctgtattttagaggatcaactatgttgagatgtttgataggaaactcaagaccatttgagtcaacagctttagttggagcagaatataactctacacagtttcttaaaaacttctcgtcaagtaataactcatgcccattttctggagatgctgctggaaagatagaaagagaaagaaccaaattaaaacgtcaaatagcgccaagaaaatgccacgaagagaagtatctgtgatttttggcatcatccttacctgtaagttctggaagggacgatattggcacaggaccattgacactgatacagtagttgttccaatcaaatgaaccatagtaatccaagaacttatacagaacctgttgaaagacaatgctatattctcatcttttgcatatatgtagaggatgctgaaggttcagaaaaagagtgattaccgctaaagggccagataaagatgaatgaaacaggttgatgatgtacaaaactagtactgccaatgcatatgttgagatcaatccagtgttagcaccaagaattcgactctcgtaatagcaccaagctttgacaaggatgatgctacgcttgaaaagatgatctctcccaaagagttggtcaacctgagaatacataaaaccagagtttaaccaacaactaagaatcaaagctaggcaataatctgtttagtaaacctctggagcctgattttgaatagctgatagtacctgctccagaaaacataaagcacagagacctgccgtttgattaaaagagatatcaacagcaatgttcctgatattgcattttatgaccttgacctatcatatatcagcaaactttcttaaggaaaatttgggcaaccaagaaaatacaaaaacgaaaccaaaaagtaaataaacaaagagacctgtgcagggataaactgaacatctgttgcatggaattcagattctctttcttcattctgaagcctactgcacaattgtccataaaaatcgtcatccatattttgcttagttaggacagtcagatcgatatccccgtccgggagataggtttttagtggcactgaaccaaatgaaaagacctgtagataaacaagttcccatagaaagttaacaaaacagcataaatctttaacatgtcagcaaagagaagcggagtttctaacctcaattccctcatgactcatgataagagttcgtacataatcaatgatctcattcctacttctgtctgaaacaagggcaggttggatagtgcaaagtatctcatgagctctctcctctgcaatcatccaagaatctgcatctatcggcaatgaatctcctttaggtagtgccgttgatagtgacaatgaggatgatgaagaagacgaagatgatgaaactgacaatctttcttgaatttcacccatgtgcgcataacttcaaactaacatcagagtgataacacaggaatcctcaacaactcaatgagccccttatataattatgatatctacaaacaacagaacaaacagaattacaaaatatttcaaattggcctttttgtcatcacattagacagagaaaaagaaaaaaatgaagtcaaggtaaaagttgattgtctaataactagagctcccaaatttgattaagaacaatcgaggctaatccagagagtgagtgagattacatcctaagcaagagacataaaaaaatgaaacagagcatgccaatagtgaattcagtgttaggtaggtaccctaatgtttagcttctcagagcaaaatcgaatatttataaaggaaaacaaaacaaaacagctaaactatcctgcgtgagtgatgattataccttaggaaaaaatgactattagctcagaagtctcagctctgtctcttccaaaatcatttttttttgttgacaaaattgagaggtttaagtagtgaaaggcgtacctgcggttttagaccagttgtccagagattctttgggctaatctttgaatattcaagaagctttaattcctgctaacaaacaaacaaaaaaaatcaaaacttggaacagggtttaagatttgtaacgaatcgacattttcacacgaaaaaaaatatgacattttggttttcatctttaagcttcacaaggaccacgaagatggattaagacaaaagagaaaaccccaaaaatcaaaaaacgagattcacacgaaacatcattttgctttctccgataacgaggattaagaggcaaattaagcttgtattcattggattcctaaagattaagcaaagattatctcacctcgaaacaaaatttccagctttagttttttttggatcttatggataataaacgttacaccaaaaacttttttgaaacacaaaggggaaaagaaataaaaacccagataaaaacagatatgagtcagtaaaatgaaacggaagggattgtttacgaataccgatttgtattcattgatcaggagaagagaaaccgatactataaacttttttttaattgaggggagaaagagaattatcaccaagacaaaaaattaagggataatataagcaaaaataaaataaaaaattatggaaggttcataatagtggagactctaaaacaatctgccatttttgtatcaatgagaaaaaaattaacttcacctgctcctctcaaataattttcaacccaagaaaaaaaatagattttcttcattcttgttggagactcttagtctctatgatcttcatggtcaatgtttttgaatgattcaacaaaaaccctaatttctccaaattccaaaacccagaattccagaaacagtagaaactcaattccatgaaagggaaaaaagtgtatcgtatctttaggtggactcgagtatagacgattacacaagtgggacccaactaatcataagattgacgacgtggcctactaatacgaggtttttatctcttccgtacacgtggcataatatcggacggactaatttagatagacgattaaaaaaaaaaatcaagcaaaacaatcagattttttttttcccgctatgttgttgactctctctcctaaaaccctatcttcttcttccttcttcactgtgcacaaatcgcaaaaccctaaatgtaaatctccagattcatgtcgattcaagagcttgaaatgtagttttgatcgaattttagtgaaatccgaggttcaaattgagaggaatctcgaatttgaaacgggagagacatttttccgccatgaaagcgctagaggacgagacctcggtgttttgtcagcgacgctatacaagagatctaatggaagcttacgggtactcgacgcaatgtgcggatgtggaattaggtcgcttcgttatcttgtggaagctgaagctgatttcgtgatggcgaacgacgcaaatgatgataatcggagagtgattacggataatttgagtaaagtagagagaggtactggagatgagaggagatgggttgtgactcatatgttggctaataaagcgatgattgagagatatatggttgcggatttcttcgatatgattgatattgattcgtttggaagtgattcttcgtttttgagagatgcgtttaatgcattgagattgggtggtttgctttacttgacgtcgactgatggttactcttctggtggtcacagaccttataagtgagtgaaagcaataccattagtctttgtggtattttaggaatcatgatatgatttagggactaggagattgaaagttgaaaaatttcttggtttgttttggtgtagttctttagcagcttatggagcatttattcgaccaatgccgtttgggaatgagattgggctgcggatgcttataggtggagcagtgagagaagctgctctgcttggttatcatgttacgcctcttttctcgtactattcttatcacggacctgtgtttagagtcatgctgagggttcaccgtgggaagctacatgaggacaggttgtttctacatttagaatttgactcgaaaggaattgagttttggttatgttgcgtttctaattggagttgttttgtgtcttttaactgtaggaactatggttttgtcacgcactgtaatctatgtggccattctcatacattgagattcgatgaacttggtttgatgggatgtccctgcagtgatacaaaggcttcttcttcactggttgtgtcaggaccaatgtggctcggaccgcttcatgatgcatcctatgttacggaaatgctggaattggcaaaggaatggggatgggtcagtgaaggcactggcatggatctggacaagcttctcagtataatgattgaagaaagtgatcccagactaccacctggatacacaaaaatggatgaggtcctctaaaaccatgattttaatttcattgataagatagacgcatttcattcacattacatgataaaagatttgttttcgtgattagatggcgagccgtgcgaagatgaactcacctccgttgaagaagatgatgagtgcactagttaaggtaaatagtagttagattctcacagctttgatctctgaagaaactgatctgaaggtacaaagttaaaaagctctgctccttggatttttgcaggagggttacgctgctagcagatctcacattattcccaatgctcttaaaacagattgtcccatgtcccattttgttaggattgccaaggaaaatttgcatagttaactttttgttataatcaagtttagagatttttttaagcctctgattatactttacaaagcaatcatacccaacactcgactatattatttgttgctttatgctaagtagggagatacaagtacttagcatcgcttaagaacgagcgaagcttcggtcattaaatatttctctgaaaagaaggtatgaagttgcaaaaatcaaaaaagaggaaaaatcttggtcaaatcaactggtaaaatggtctgaaacgtttaaagctccaatatggcgaaatcatctttaacaaaatgtagaaaacatcttcaaaaatttcagacaaaagagagattgaaactagaatataagaagtttcggattgccagcttcttgaagtcttcaggcacgaggagcagcaggagcaccaccggcagggcgaggagcctgaccaggttgtgcaggcttgggtgtatcctcctgagaattaatcatttttgagacaattcagaaaaaaagcttgcaacataacattaaagaagctacattcaccatcaaaacaaaacgtagcatgtaaagtgtcacggtttggaacaggacaacaatcatatgaaacaactacaacaatgagatacagtgtcgagctcacattcgaatataattgctgtatttggagaaagtgaaactacataattccgcttcaaaccaattcacctttcaaaccattattatcaaaatgccaccaagaccttttatctaagactgatttaagcaaatttgctgaaggacacgaatggattcattgtactgagaggttaccttgcgtctggcaaaacgaggtggtggggtacgaactctacggttggtgcgggatcggactctcacaacgtgagaatggatagcacacgagacacagtactgcgtcttagcgtaaagctttgggagagtgtaacctaccaatgcaatacaaatacaaaaccaattacactctgaagtctcaaaacaaaattccaaatacacaattaacaatgcataacaagaatctatcaacacataccttcgtagacgctagcttcttgaacatctctaatagcagcctgctcaacaatgttccttacgataaatctcttaatcgccttgtcctatcaacaagagagccaaaaccagatcgatacattttcaatcttaagacaaatctagaaccgggaaatgattatgtaggagaatgaaccttggggcaacactttccacagttggaacacctgattggtttcacatgaccacggttatgcttgttcctgccaccattcctgcgcttgaaagtctgcaataaaaagcaaactcgaattcaatacacaatttcgctttcaaaatcactgtgagcttgattctgtgttctaaactatgaatctaacaaagaaggagaaaacttgccatgtttatgcagagagcttcaaaagcctattgcttcagttctctttgatgcggcgacagggaagaagaagagtgcaggaaccctaatatttgcgaaatattctattatatatgcagactcttctaggttttattaggaatgggttatatttgggcctgagcaagcccagtacattgaaactttgagaaattaattcactaaaactttttaaaaatttgtttacatgttgaaaactaatcgtgtctatgcatatatcatatacgtcactggatgtcgaaactaccgtaattttttatgggacatgtgaatcaggagaaaaatgatggtgctgcggatatgctctcaagacatgcttctacgatgtacccaatatatcaaacttttacagtaacaccaagttggttggcgaactatttggaccacccttttacagtctaataaaagtgagatgctaagaagaagaaaaaaataatctactcaattttaagagtactgatttatggaagaaaactaaaaaaactgctccggaaatttcatttatataatcttaaatattaaactttaattattatatatttatagatttgttacatcttatatatttacaaatatttcatttagtcaaaccagagcaaaagaaatatagatttatttttatttttacttctaaaacaagaaaaaaaagcttaacaaacgttattttccaaggtacatacatagcatcttaaacttaatattgcatcttcggtactgccgtatttatcaacaagacaagaaacccaaaaaacaaaagctactacagacatataaaactcagttaatatcaagatcacgagtgtgcttctcgaagacgtccgctgcatatttccagttgattacagtccatatgttcttcaagtactccgctcttgcattcttgtactgcattacccgcacccattgatcaatgttaatattcaatcaaacagttcttttactaataaaaccgatattactctacctgatatcaaatcaaggagtattataattgagattagagtacctgtggatagtaggcatgctcccacacgtcaatcccaattagaggaactaggtgtgatcccttagtcaccaatggatcctgtatgttcgaccaatctatcaaatctttttcttttctttttcccaaatccttgtgagatagaccatgttacaaattagcttaatcactacattaatctacctggttggctgtggtttcaacgacaagtctcttaagctctctgtctaatccaaaccactataaaacaaagaaaatataaacattggttttatctacacaaggaaatacaaaagttcctgtttattaacaaaaatgaaattatagatatttctaatactacactatacactaaccaaacttattgtcccgtttagattttcctttttaacaccttttttgaaattaatgtttttcaatttcatttcgaacagagtcctatatacatcacatatccaattcaaattgaaatgaattttgatattctgtcagaaatttttataaactttcatctgaaaaccaataattgtgttcccaacattgttaatgagattctgaaaaaaaacttaccacccatccagatccctgtacagcagcgccttccgcgttcattttttggatcaatccttctagtgatccgaaatgagcatcgatcgccgaagccaaaggatcatgcggtggtttgccacctccttcctatatatcaatttgaccccttagaagagacaattaaactcatcagaaatagacacatggagtgacgacaaaaaaacatttttgtacatgaaccggggctaggtttttccagaagattgcatggttaacgtgccctacaagcaaagcaacagaaaaaaaaaaatcaaaatccttacgatcaacaagcacctatcggaagaatttaatgagaacttagtcgtttaaagctagggtttgacctccgccgttgaacttgatgaggctttggagtttgacgacggaggagtgatcaccgtcagccatggcagaacgaaggctgttgagggctttgttgtactgagtgacataagtctggtggtgtttctgatggtgtagccgcatgatctcctcactgattgctggctctagcgcatcataagcatacggaagatcaggaagcgaagcagtcttcattgattcgagacacggttccatggttgctcctctggcgtcgtgaagagtcgtagcgaagatggcaacgaagataatgataataacggtggtcgtcatgatctttttatatatgtagacactagaaaatagaaataaagcgagaggtggatttattcagataagtatataaaagtattttcttagcaaacaaaagtatataattttactaagccacgtaaactttgactgatctacttgtcaatctctaaggcttcatggctttaagcgttttgcatagttgctcgatttgtgtcgcaaccttaggttgatgcatatttatgttgtttttgcatgtgcttttgtctttgtgtagtttatggcaggagaaacgtaaaacgcacctaacattccaaacctcagtccaatgatccaatccttatatgcgaaagatcaacgcacataagtataacaatagtttagtggtctgggccataccgaaaaggccgaaactttcctcaaaaataaaaaacgacgggcccaatctattctaaaagacattgtccaccgtggaatctgacgtggcgtatcttatggtctagattataaataacagagataacacgtgttcaccacaatttaaatccagtaccagcgtgtgcccgcccaagccatgcacacagctaaaccgcgtcgccacgttctccatctcgtaccggcttcacgtaatagcaaccgttagatttacatcgaacggtccatatctgatatctaattagtctatatcgtcaacactttacagggaataatcacctacttaagccacctcagacttttgaggataacgtgaagaataagataaacgcgatttctaccatctctaaatctcaaccgtccgatcaaacaacttacacaacttccgtgctggagaaataaaaaaattaggtatttaataattcatcattgccattggattgtgtgtggctgcgtcagtaaaacgtattcttaaaagcaaccattggtgtgattgactctataagagaattc

SEQ ID NO: 1365 - DNA, 101539 bp, Arabidopsis thaliana
aagctttaattcctgctaacaaacaaacaaaaaaaatcaaaacttggaacagggtttaagatttgtaacgaatcgacattttcacacgaaaaaaaatatgacattttggttttcatctttaagcttcacaaggaccacgaagatggattaagacaaaagagaaaaccccaaaaatcaaaaaacgagattcacacgaaacatcattttgctttctccgataacgaggattaagaggcaaattaagcttgtattcattggattcctaaagattaagcaaagattatctcacctcgaaacaaaatttccagctttagttttttttggatcttatggataataaacgttacaccaaaaacttttttgaaacacaaaggggaaaagaaataaaaacccagataaaaacagatatgagtcagtaaaatgaaacggaagggattgtttacgaataccgatttgtattcattgatcaggagaagagaaaccgatactataaacttttttttaattgaggggagaaagagaattatcaccaagacaaaaaattaagggataatataagcaaaaataaaataaaaaattatggaaggttcataatagtggagactctaaaacaatctgccatttttgtatcaatgagaaaaaaattaacttcacctgctcctctcaaataattttcaacccaagaaaaaaaatagattttcttcattcttgttggagactcttagtctctatgatcttcatggtcaatgtttttgaatgattcaacaaaaaccctaatttctccaaattccaaaacccagaattccagaaacagtagaaactcaattccatgaaagggaaaaaagtgtatcgtatctttaggtggactcgagtatagacgattacacaagtgggacccaactaatcataagattgacgacgtggcctactaatacgaggtttttatctcttccgtacacgtggcataatatcggacggactaatttagatagacgattaaaaaaaaaaatcaagcaaaacaatcagattttttttttcccgctatgttgttgactctctctcctaaaaccctatcttcttcttccttcttcactgtgcacaaatcgcaaaaccctaaatgtaaatctccagattcatgtcgattcaagagcttgaaatgtagttttgatcgaattttagtgaaatccgaggttcaaattgagaggaatctcgaatttgaaacgggagagacatttttccgccatgaaagcgctagaggacgagacctcggtgttttgtcagcgacgctatacaagagatctaatggaagcttacgggtactcgacgcaatgtgcggatgtggaattaggtcgcttcgttatcttgtggaagctgaagctgatttcgtgatggcgaacgacgcaaatgatgataatcggagagtgattacggataatttgagtaaagtagagagaggtactggagatgagaggagatgggttgtgactcatatgttggctaataaagcgatgattgagagatatatggttgcggatttcttcgatatgattgatattgattcgtttggaagtgattcttcgtttttgagagatgcgtttaatgcattgagattgggtggtttgctttacttgacgtcgactgatggttactcttctggtggtcacagaccttataagtgagtgaaagcaataccattagtctttgtggtattttaggaatcatgatatgatttagggactaggagattgaaagttgaaaaatttcttggtttgttttggtgtagttctttagcagcttatggagcatttattcgaccaatgccgtttgggaatgagattgggctgcggatgcttataggtggagcagtgagagaagctgctctgcttggttatcatgttacgcctcttttctcgtactattcttatcacggacctgtgtttagagtcatgctgagggttcaccgtgggaagctacatgaggacaggttgtttctacatttagaatttgactcgaaaggaattgagttttggttatgttgcgtttctaattggagttgttttgtgtcttttaactgtaggaactatggttttgtcacgcactgtaatctatgtggccattctcatacattgagattcgatgaacttggtttgatgggatgtccctgcagtgatacaaaggcttcttcttcactggttgtgtcaggaccaatgtggctcggaccgcttcatgatgcatcctatgttacggaaatgctggaattggcaaaggaatggggatgggtcagtgaaggcactggcatggatctggacaagcttctcagtataatgattgaagaaagtgatcccagactaccacctggatacacaaaaatggatgaggtcctctaaaaccatgattttaatttcattgataagatagacgcatttcattcacattacatgataaaagatttgttttcgtgattagatggcgagccgtgcgaagatgaactcacctccgttgaagaagatgatgagtgcactagttaaggtaaatagtagttagattctcacagctttgatctctgaagaaactgatctgaaggtacaaagttaaaaagctctgctccttggatttttgcaggagggttacgctgctagcagatctcacattattcccaatgctcttaaaacagattgtcccatgtcccattttgttaggattgccaaggaaaatttgcatagttaactttttgttataatcaagtttagagatttttttaagcctctgattatactttacaaagcaatcatacccaacactcgactatattatttgttgctttatgctaagtagggagatacaagtacttagcatcgcttaagaacgagcgaagcttcggtcattaaatatttctctgaaaagaaggtatgaagttgcaaaaatcaaaaaagaggaaaaatcttggtcaaatcaactggtaaaatggtctgaaacgtttaaagctccaatatggcgaaatcatctttaacaaaatgtagaaaacatcttcaaaaatttcagacaaaagagagattgaaactagaatataagaagtttcggattgccagcttcttgaagtcttcaggcacgaggagcagcaggagcaccaccggcagggcgaggagcctgaccaggttgtgcaggcttgggtgtatcctcctgagaattaatcatttttgagacaattcagaaaaaaagcttgcaacataacattaaagaagctacattcaccatcaaaacaaaacgtagcatgtaaagtgtcacggtttggaacaggacaacaatcatatgaaacaactacaacaatgagatacagtgtcgagctcacattcgaatataattgctgtatttggagaaagtgaaactacataattccgcttcaaaccaattcacctttcaaaccattattatcaaaatgccaccaagaccttttatctaagactgatttaagcaaatttgctgaaggacacgaatggattcattgtactgagaggttaccttgcgtctggcaaaacgaggtggtggggtacgaactctacggttggtgcgggatcggactctcacaacgtgagaatggatagcacacgagacacagtactgcgtcttagcgtaaagctttgggagagtgtaacctaccaatgcaatacaaatacaaaaccaattacactctgaagtctcaaaacaaaattccaaatacacaattaacaatgcataacaagaatctatcaacacataccttcgtagacgctagcttcttgaacatctctaatagcagcctgctcaacaatgttccttacgataaatctcttaatcgccttgtcctatcaacaagagagccaaaaccagatcgatacattttcaatcttaagacaaatctagaaccgggaaatgattatgtaggagaatgaaccttggggcaacactttccacagttggaacacctgattggtttcacatgaccacggttatgcttgttcctgccaccattcctgcgcttgaaagtctgcaataaaaagcaaactcgaattcaatacacaatttcgctttcaaaatcactgtgagcttgattctgtgttctaaactatgaatctaacaaagaaggagaaaacttgccatgtttatgcagagagcttcaaaagcctattgcttcagttctctttgatgcggcgacagggaagaagaagagtgcaggaaccctaatatttgcgaaatattctattatatatgcagactcttctaggttttattaggaatgggttatatttgggcctgagcaagcccagtacattgaaactttgagaaattaattcactaaaactttttaaaaatttgtttacatgttgaaaactaatcgtgtctatgcatatatcatatacgtcactggatgtcgaaactaccgtaattttttatgggacatgtgaatcaggagaaaaatgatggtgctgcggatatgctctcaagacatgcttctacgatgtacccaatatatcaaacttttacagtaacaccaagttggttggcgaactatttggaccacccttttacagtctaataaaagtgagatgctaagaagaagaaaaaaataatctactcaattttaagagtactgatttatggaagaaaactaaaaaaactgctccggaaatttcatttatataatcttaaatattaaactttaattattatatatttatagatttgttacatcttatatatttacaaatatttcatttagtcaaaccagagcaaaagaaatatagatttatttttatttttacttctaaaacaagaaaaaaaagcttaacaaacgttattttccaaggtacatacatagcatcttaaacttaatattgcatcttcggtactgccgtatttatcaacaagacaagaaacccaaaaaacaaaagctactacagacatataaaactcagttaatatcaagatcacgagtgtgcttctcgaagacgtccgctgcatatttccagttgattacagtccatatgttcttcaagtactccgctcttgcattcttgtactgcattacccgcacccattgatcaatgttaatattcaatcaaacagttcttttactaataaaaccgatattactctacctgatatcaaatcaaggagtattataattgagattagagtacctgtggatagtaggcatgctcccacacgtcaatcccaattagaggaactaggtgtgatcccttagtcaccaatggatcctgtatgttcgaccaatctatcaaatctttttcttttctttttcccaaatccttgtgagatagaccatgttacaaattagcttaatcactacattaatctacctggttggctgtggtttcaacgacaagtctcttaagctctctgtctaatccaaaccactataaaacaaagaaaatataaacattggttttatctacacaaggaaatacaaaagttcctgtttattaacaaaaatgaaattatagatatttctaatactacactatacactaaccaaacttattgtcccgtttagattttcctttttaacaccttttttgaaattaatgtttttcaatttcatttcgaacagagtcctatatacatcacatatccaattcaaattgaaatgaattttgatattctgtcagaaatttttataaactttcatctgaaaaccaataattgtgttcccaacattgttaatgagattctgaaaaaaaacttaccacccatccagatccctgtacagcagcgccttccgcgttcattttttggatcaatccttctagtgatccgaaatgagcatcgatcgccgaagccaaaggatcatgcggtggtttgccacctccttcctatatatcaatttgaccccttagaagagacaattaaactcatcagaaatagacacatggagtgacgacaaaaaaacatttttgtacatgaaccggggctaggtttttccagaagattgcatggttaacgtgccctacaagcaaagcaacagaaaaaaaaaaatcaaaatccttacgatcaacaagcacctatcggaagaatttaatgagaacttagtcgtttaaagctagggtttgacctccgccgttgaacttgatgaggctttggagtttgacgacggaggagtgatcaccgtcagccatggcagaacgaaggctgttgagggctttgttgtactgagtgacataagtctggtggtgtttctgatggtgtagccgcatgatctcctcactgattgctggctctagcgcatcataagcatacggaagatcaggaagcgaagcagtcttcattgattcgagacacggttccatggttgctcctctggcgtcgtgaagagtcgtagcgaagatggcaacgaagataatgataataacggtggtcgtcatgatctttttatatatgtagacactagaaaatagaaataaagcgagaggtggatttattcagataagtatataaaagtattttcttagcaaacaaaagtatataattttactaagccacgtaaactttgactgatctacttgtcaatctctaaggcttcatggctttaagcgttttgcatagttgctcgatttgtgtcgcaaccttaggttgatgcatatttatgttgtttttgcatgtgcttttgtctttgtgtagtttatggcaggagaaacgtaaaacgcacctaacattccaaacctcagtccaatgatccaatccttatatgcgaaagatcaacgcacataagtataacaatagtttagtggtctgggccataccgaaaaggccgaaactttcctcaaaaataaaaaacgacgggcccaatctattctaaaagacattgtccaccgtggaatctgacgtggcgtatcttatggtctagattataaataacagagataacacgtgttcaccacaatttaaatccagtaccagcgtgtgcccgcccaagccatgcacacagctaaaccgcgtcgccacgttctccatctcgtaccggcttcacgtaatagcaaccgttagatttacatcgaacggtccatatctgatatctaattagtctatatcgtcaacactttacagggaataatcacctacttaagccacctcagacttttgaggataacgtgaagaataagataaacgcgatttctaccatctctaaatctcaaccgtccgatcaaacaacttacacaacttccgtgctggagaaataaaaaaattaggtatttaataattcatcattgccattggattgtgtgtggctgcgtcagtaaaacgtattcttaaaagcaaccattggtgtgattgactctataagagaattcgtcagcgtgaagcaatctccaatctaatcgcagcatatcttctccgattcctattcgtctctgcaattgaatcttccggtaggcgaagatggcgacgtctgcgaggatttgttgcggaggaggaagtgcatgcgccgttcgttgtgatcgtcgcacgttaaatttgaattctcgatcgtcatgtgttgttccagtgacgaatcgacggaatatgtgtgcgatcgggaagatttcgatgtcgatggaggatttgtcaccaccgtctgcggcggtgaagattgaaaggatcggtggaaggaaacgcggtggatctgttgtgtcgagggagaagctagatgtgtggttgagagattcggtggttgagatcgtgaagaatcttagagagtcgccgttattgatgcatttatacgcggaggctaatggtggtttgacgacgacggcaacgaatccaaaggcggaggattggacagagatggaaggaaagtggggtagaggagaagagaggacgccggaaggagttatattggtggagaagctcgcagacggtgacatagcagatgatgatgatcacgatggtggcgcgtgtggggaagatacaagcgcgtgggggattgtggcgcaaggaagaggatcggatactgggccggtttgttatctattgaaaacgacccgggtccggtcgggtatgggtacggtttgcacccatttctgtttggttaaggtcaagagttttagggaaacggctatgtcacagttgaataattcgtggttggtgcagactggtcaatgagcagtgattgtcaaaggatttgcactgtaaattatttatactctttgggttttgattatgaaacccttatggatgatcaaattacatttgttattaatacagaacattttttaggaatttggattggtgatataaatgtaaataaaatggtcaaagttggttggttatagtgatttgtttaatcaaagaacattgttagttttgttgctattgtagtatagaggatttgaatcaagacaagtagacaacttaatccgtgtaagatctatatgcaattatgcattcattaacaccacaataagcaaaagtgtaggtggatttaaaacttctgttagtgatcatagtgcaaagcctatagctgatactgccagaagttgcattagagttcataacctccgtcggaaaattccggagtcgatctccggagatggaaaagagagaaaatgaataaaacatggtcgtgatggaaaattatggattgtttgattggatcatttatatggatttggatattggatttagattttaaggcccgtaaatatatggaaggtataggcctttgttcctatgggctatgaatgatccaatgtttattttcttcttttttatgaattctctgaaagaatccaataaattgaaatgacatacaataagctaatctaaaggggccaaggagtttcattgtttatgactttgacaagcgatacacatttagcagcacaagacatttcacgatcggacttacggaagtgaatgattacacttaatcaaccacctctaaattattggcatcaccatctaagactcttaagttatggcttaattatgatcaccattatatatattttttttttaacatttcacaatcttatttttttatttttttggtttatacaaggttcctttttgggatttttttggaaataatccaataaatgaaaatgacatatatactgtataagctaacctagaggaattaactcatatattaataagctgtatatattaatgacatgaaaaaatgtgtatagaaagatgaattatttttttctccaacctagttataaaccgaagaattgatcggtaatataataataagctgtatatggaaaaagaaaaaaattataaatggaaaatgtcccttaagtaacttattttttcaggttccatttcaaatggaaaaaaaaagtgttagcatatttggcttagaaagtcaaaacgttagatgccatctcactttaatgctatcatgtacaatattgaaatggatttttaacttatgagttaaaatgtcaaaatgttgcaaattaccgaggctagacaacgtagattgtagtactaatttcgtctttcccaactccaagagagaaaaacgtggtctgtttcagacaaggcatgctccattcctcttttatcggccattgaaactagggttcttctgttaaaaatgtacttatattatccctcaaaaagatactaatgaataatgtattttaattacagattcttgagacgtttcttcgattcccataatccaataaaagatcagacccattaaattgttgagttttcacagagtcccatgcacatggttacaacaaatgaagcttcttaagttattttatactctctttgttcagagagcatcatcacacgaagtcactaagttttatcttgattcttgtttttctcaaccctaagtttttatttgtctcacaagaaagctcttatcttctacgactgctaaaagatggttcagaacctgaaatgaagactacaggctttctttcataataatacttaagatttcatcgaaagagtcccatattatggaacccggtgaagacaaatccgatacagccctaaaaatgttacaagaacaataaatagaagaagctacaaacattgaaattgaaactaacagacacaaaagataacacataagagattatcaaaaaacaaacacaaacaaggatttctcttaaaacccccaaatgaacaaaccggattcctcttcgccggaacttggtgaaaaaacatgttagtctttaaccttcttttcaacttgaacccaactcatctgagctccctgaagggcatctgatcatcctcaatatgttaacagcttctcccatatgtggtctacttgatggaacctgagaagtgcaaataagccctagctttatcactgcaaccgcttcttctaccggaaacttcccttgcagccttgggtcaatacattcatctgctcttccatcttcaagagcttctctcaccatatcacacaaaaccacaacatcatcttccatatactccacaggctttttacctgtaaccacttcaaggaccaagactccaaatccataaacatcacatttctctgttattttcaccgttctacaagcaaactctggagccatgtatcccaacgcactctgtatcttgctactcagcacgtacctatctagcataggtaacagcctcgctaatccgtagtctcctactttaggctcaccagagctgtctagcaacacgttgctcgatttgatgttgtagtggatgatgtttgattggtgcaagtaagctaagcatttcgctgtaccaaggataatgttgaaccgatcattccaagaaagcgaactattacctcctggtgcttcgtgcaactgtttgtataaactcccaccagagagaaactcatagatcagaagctggagagaagttgtccagtaatatccttcgagtttaaccagattcgaatgcctgagttttccaagtttcttcacctctctttcgaattcgtcctgagacttgacaagactcgagacagtgagcttcttgatagctacaggatacccatctctgataactgttctgtacaccgctccaaatccacctcgaccaagctcacagtctttgttaagcagagcatgtgttccagtgctgaaatcaggttcaccagagaacatcaccagcttccctgagttgctatcagtagtgggagatcgactgaagtcatctccgcctgagaacgtgagcggtactgctgatcttgaaaccgttgatgcgcgcactctcagattaagtaccgtgatggctattacaccaaccacaatggctgcagcagcactaatggctatcaaagaagatatactaagcagtatccttttgtgaccagcacctggaggcactatttcaccattgtaaggatcgaaagttgcattaggattcaacacaatcggtttaggggagatggcaggacaagacttattgacaacagcaccgcaaattcccgggtttcctgatactgaacttggggataaaccgttgaagattccacctgcaggtagttccccaaagagatggttatgagatatgttgaatgtgtgaagatagccgagattagccaactgtttaggaagtgttccggccagttcattaaatgataagtcgacttcttcgagtcttgtaagtttagcgagctctggtggaattgagcctagcagcttgttatgtgacaggatcctgtagaaagaagcatgaaacagaacacagttaagacataatcttcaatgggaaaatcttaacagaatgcaacctaaagcaaaagagacttacaaagaccgaagggaactgcaattcttgatggaagatggaatatttccctccaacaagttattttcaagtctcaactcctccaaagaaacagctccacctgtttctcgaggaatcattccattgagctgattgtgactcacatcaaggacgctcaagtgctttagttccccaatggtactggggatggggccggtaagagagtttctggacagatgcaatccctccaggtctctaagatctcctagaccagctccaatctcgccagagaatgcattgtgggagagatccaaaacctggatcttcttgatacctccagtagagttatcattctttaatgcagacacatcacgagaaccatcttgaaatagccacatgggaagctttccagttagtgaattcccacttaaatctaaggccaagaggttgatacagttggctgttgagaccggcaagctaccaataagcccattcccagaaaagttgagaactttcagtgctagaaggttgcctatggagtctggaacctgccctgaaaacttattcatggaaagatccaaagtctcaagactcctcatttctcctatccactttggaacttcaccttctaacgcattctttcccaagttcagagaataacacaaactgagctgctgaaatgtatttggtaagcttcctgatagagagttttcactaagatcaatagtcttcagcagcatacagctcccaatttcgctaggaataggaccagataaccggtttctactcaaatcaagcgcacgcaagttgttcaatctatctatcttctctggaaactctccctctaactcattcctcgacaaatcaagtgatcttagagtgttcaaagaccaaatccccaaaggcatagaaccagaaaaaccattggaagacaagtttaaagcagcaagagacgagcacgagcttatactaaccggaatcttccccgttagtttgttcttcgccagagataaaactcttaatgacccacattgcctgaaaaactcatcaggaagcgaaccagacaagccattgctactcaagtcaacaaccttaaggttaacaaggctcagcagcatattagggttaatgattcccgtgagattgttgttggacagagagagcttatgaagaaactgaagctgaagtaggccacgaccaattcgaccagacagagagaagccatctagatttaactcagtgactcgattcgtcctcggatggcatttgactccgttccaactacaaggagtgtagtcatcttcgttccaagaagctagcttttgctctggatctcgtaaatcggctttgaagacaatgagccctaaaacgtcgtcgtttaaaggcgggtctagagatctcaccggagctactgccgacaccaacaagactgtaaaaatcagtgctttgtacatctttccacaaccctcttctccgttgaacagattttagttgcggaagacctccattttcagttatgtagagctgaaattagaaagaagaaaattggtgaacacaagagaaaaaaaaaaacagtacatctcaaaacaaaaactttgtttgttcgtattcttaggcgttagatttagtagaagaaaagaacaaaaatctatctcaacggctacatttcggccaacggaggaagcaaaacaaagcaaaaaacaatgaagaaaaatccggtaaaacaaaggctagttatatgaatagaagtagctacagtttacttgaaattcatagaaattgaagaaatattcaaccttcaagtgaatggctgaagtaaatgttgagcaaaataacttgagtttttttaagtaaaggagtcattggacagttacgatctggaaatgaggaattctcacctagtaagaattttctccgggaagatttccgacgaagaatgttgcagctcagggggaaaaaaaacaccgtaggaaaagaaagtgagagagcacgagcttcttcttcttcttcaactttgttaggttttgtagctttaaaagaagagtgaatttgggaagaagagaaaaaagccaataaagaaaaaaaaagagagcagagagagtaattaaaagctgcctttatcaacgggctggaaagaagagagtgtggggcccgaggaaggtgggtggactcattaaaactctttaattgacacgtgtatttattttgttgggtttgacgaatccgacttggctgacacgtggcttttatttttattttgtgttggtatagtaagtgggaaaatgaataaatgattggccaactcataaagaaagaaactataaatttgaatatgactaaattatccttcccaaataatagaaactttctttaatgggtttacatgctgctctgtggcctcttggtatgattcaactaattagaaaataatctttcacataaaatggaaataatgtggaatgtggttggttctgttattctcatgcagagaattggtattttgggtaaaaaattatgcagaaagagacagtggttaaagtggtcaccatagttttggtttttcatttttttattttgattctctattttgttttttgaagtaagaacattaaagtaagttggtgaggaatgatgatggtgtcctggaaaaaatattttgtggtgcttagagatcattaataattgcaaccataatgttattgttcatttatgtacaatgtcctggtcagtagtcaatgcatcaaacttattaattatgggtttacaaattttcttgaaaaattatggggttttgaaattggatcacaaacctaaggattttggttgacttggaggagctacagatgtaaattttggatcttctgtttgtgcaaggaatcatacattatgtaaacttttcctacagattgaaatgcggttgaataactaagtgtcaaacacttattgccataaaataaaacattaaaaaaaacagataatagaacaaatgatgttgaaaaaaatattataatccgttaagcatgctcttggaatttttttaattgttgtctttctcgtttgagatttggtccgagtcaagacattttatcagacttcggtctctctcccatacctatgttttaaaattttatattccttttgacagtaaaagttatttattatgaaataaacaatgaaaaataactcttttccccatggaaggaaaacaacccttcatggaaattttggaatttactatttgtttctatttgcaatttaacaaagaggccttttttactttttaatgtattctaaaaatatagggtcaaatttactactgtttttaagagctttcgaggaattttttgggcagtgtgagccggaccgtagcgaattcacatttactgttcttcgctttccatctatatgaagaatttaccctttgtttgttttctacagttagtatttatttccacattcaatttttactcgaatcttcctctgtcatatcaggattggcatttaggaccagccattaaaaggtaaaatatttactttccggtgatgtaaaattccaaattttcttatatttatttaattattgattacttacagtttcattttttattccatggtaaataactacggataagatgggtccaactcttccattagaggcccattaatgagaaacgataaatgggctcagataataataaggcttatcaaagttctacagtccgaattatatttcaggaaagaaaacaaattgaactaaagaaatgcgactcgcagctacttataacgcgttacaaggctggcccatgcaactatgcagctatcatatcggtcaaagatttcgtattaaaatttgaggttttcacgataattaaaattgacaaataataatatacacatcgaacaagcccatagtttaaaaattcaaatactaaaaatgataatatatcttaaattttagagaatcatggggacttcgtaactgagattctgatacagatttgtgatccattttgaaaattaaatatgattataaatttgcatcttcattatacgcacgattagaaaagccaaacaaatgggaaattaaaaattaatatttggattttcgttatcatcgtacaagatcacaaagcactgtcactgacataaaacaccaagtttcttaccagtttccagagaatcaaataccaagaacaaaaccacaacttgttgtatcttaaattataaggaagataaaatcatatcaaatcatttcttgatatattgttatcctatatatccatatataaattaacaacataattatatatatatatatatatatatatacacatccattctcaaatctttttaatgtatcatttctctgtttttctctccttcttctgtaagtttgtctctgttttctttaggtttgagaattaaaagcagtataatgtattagtgtctgactcatttattctcctccttcttgtgcagatttttgttctttgttgcttgactcacaaggaacaaaaacgatatctctctgtaatcgtaggagatgaataagggctgtggaagtggaagtgattcttgtttatcgtcaatggaggaggagcttcatgttttagcagtagatgataatctaattgaccgtaaacttgttgagagaatcctcaagatctcttcttgcaaaggtaaactatcattcaaatttttttccttctaaatttcaagaaccaagatttcttctatatggtaacattgcctctgaaatgaagaaattgattttactttctgtacagtgacaactgcagaaaacgggcttagagctttagaatatttaggcttgggagatccacaacagactgattcattgactaatgtaagctcaatcttccccatgaaacattctgattggtttggagaggagacatttgtataacatccaatatgaccttttgagactgttttttcaggtaatgaaggtgaatctcatcatcactgattattgtatgccaggaatgacaggttttgagctgcttaagaaagtgaaggtgtgtaagaaatttctcacaaatgaaaagtcctcttgacaagatcaatatagagttatatagactaacaaaatctctttctttgtctctgtttctatggtgtttttattattggcagcaggaatcatcgaatctaaaggaagtacctgttgtgatattgtcttcagagaacattcctacccgcatcaacaagtaaacttatcattcctcagacacattgcttaattgttctgttctcttgttttgttttcctcaatggtgaattaagattctgtaatctcttgatgatattacagatgtttagcgagtggagcacagatgtttatgcagaagccactgaaactatctgatgtagagaaactgaaatgccatcttttaaattgcagaagctgaaggtagatctgcttagactcaaatgctcatagaattttttttttttttttttttttgtttgtgttctctaatataagagaaaattaaagatgtattcctaaacaatgacaaagattgtcttgatctttaaagatttgtggagaagagataaaagcccaataaggatctctctgagtagattagttttatgaattagaaatgttctttttggtcagattgcaagaaatctagaattcattattggcagtttagctttgtgggtcctgtttaatcgtttttgggcccattatatttgatcagacaattatttcaacatttaattcccaagtcttcgcatggacttccaagatcgcctttaacgttgaaaagctacaaatattgaaaacaagactatgatgacgaaatcaaggtgcatctgcttcttcttctatcgtgtttatcaaaacacttaccctccaaaaaaagttaaatcaattgtcggacgatagaaaacataaacatgatctaacgctttaaaacatgttctcacttttgttaaccaaaaaaaaaaaacaagcctagtccttatcttcttcttgtcacatcgattaagtattaagaaatcaattactaaagtgtttgttatggggatggagcaattgcaaagtttagtttaattaatccatgttttgccaatatgtcaacgcaaataaaagaattgagacgaaagtcattatatgattggagattgtattacgtatacgtcgcattctgaaatatttcacaatctttgttttttcaaattcgaatcaacataggatccaatctttctttacatgtccctcttgctctataatatatttttatgtgtgtatatagatgcatacacaaacaggtgaagcaaaaaacaaaatttgtaaggtaaaaaataagtgttacatatgttttgtgtgaatacttaaaagaaggcataatcgaaccacaatagaattgatataatcaaacgatggaggagatattaatgtcaatgatattcaacggaatcaatctggtcaaggagcttgagttcagtttatcatcacaagagtcaccagaatcagatttgtcgagttctctaagctcgatatccactctattcggagacgtcaacgagcggctgaaaaccctactagcgtggaggaactctctgtcacagtaccagcctgaaccggaaccggttttaatgttggatatgacgaattgacgatgcagattgaaccgagtctgatgcaggaccactggttaatgtatccagttatgcagacagtggagggtaatgaaacctcgagaccaaggcatcgaagaaggtaaatacaaacattcagtgccggtctaacatatttggataccctaaacaaagcttaaaaacagcctttttgtacattatgaaaaatcataaataataataaactatacattaaacctctaaaaatacactttaacaacaactttttttcaaaaatacactttaacaaaaaaaaatccaaaaattgttgaaaagttcaatttttaaaaaacatttcacattaaaccaaaatttactattagaaatactaattagtttgtaagaacccaaagcaattcttaaaagaccctacagaaaatatttatggtaaaaagacttagaaaattttagtgtaaaaggcccttaaatattgaggcatgaatttattgcttcaaaatataatgatcatcatatatcaaagagtttcaagaaactagttagaaacaacgagttgtttttgttttttacccaacaagtccttaaaataattttttacttgatttttgttgtagataggttcagaatgtgaggagcttggggtttttcttttgttgtgttgcaaccaatgaatcaaaaccaaaagagactgttctgtgtcacttgtatcatgtctcgtgtctcatctgcattttgtccctttgtccaaggttttgtgtttttatgaccagtacacgacacttatccctaattatattgggactccttttagtgcattgttccttttataatatttttcaaaccctataatacaaagaaattaaagattagaaaaggaccaattcgtcgacttgtactttgtacacatatatagtcgctacttgagatgtttaagcccttgcgtaaaaggaagtgaacagtttctatctgcattttctcctatctcctcactctctttagcaatatatgtatatatacttgttgaggaaaaacacatcgtaggaacaaaacacatcgtaaaccctacttggtgtatatacatgtaattatgcgtatatgtatcatagggattaagtataaaataaaataaaaattcatagcgatcaagtatttgttattgatgcagtagaggggggatgtcgacaaagaaataataatagagggaaatgttgctactaaaatagtagtggctaaaatcactatagtcagtagacgtcgtcacgtcgacttacctctgcgcaatacgacatcgtatttccaagaaaaggattgtgagttggaaaaatcaaagtgttgagaatcaatctaaagggagggatgttttaatccagcaagagttttatttatagtactatatgtacagtacatacactcattagagaaaagggcaaaatatgtattatatgttttccactctacatggcctaattaatgattaaaactcatggtcttagtcctatagtagtggtaaactcaagatagattcgaacatgaactgaagatagagaagtgctcattttcgctaaactcgaaatcgccgccacctccaaacaccatgagatcctgagaacccaaaacatcgatagatgtactcgttttcccattgacgtaactggcctgatgatgataatcttcttcgaaaaccatttctggccacaccaatgacaagtcattctccgtggacgaaccatgatgacgatgaggattgtcttcttccttcattgaggtagataaactaggactcttgtgatcttcggaatccatgaagatctcatcatgatggtcacaagtcttgctcttgggagtttctgcgttggtgttacacgtgtggtttcctatgtatgtgatactgaacatcttgggttcgagctcaaccttctggacttgctttgttgccttgcacccttgggtatacttgtgtgtgcatctaaagtaacttctgcacaacataaattaaaataaaataatttaggccaaaatatatatgcctcaagcccacaaccaattaagctcagaccacatttatggtagatataattgcggtccatgtgtaataatacccggcaacatgtcacatatcagatacgaatatatatagacaaaactatataggggtaaaaaggaccttgggaatttggcattaagaatctccttttgtccatatttcctccaagaaaatgcgtcctcaagtatagtcgactctatagtacacgtctccgatctctttctgctcataatattaatgaaatcaattaatcatttggctacttatgattcttgcaaccaaagctaaatgtcttgtttgtttgtgactaaccataacagtaagtaaatcctagatgatagttttttccatgagtatggatgatcactagatatatggtacatatgatcaacgtaatcggtctaatagaactacgatggattgattttatatcattatggttaataattgagtaagagagagaaaagggcgaaacttactttcttttgtagcatcctcttttacccttaacgggtcccaatcttttccgactatcgccggaatcttcaaacttgccgtcgttatcacatgaagcattttgagatccctcaacggcggcgagggatgaggaggaggagatgggttcgaaggtatcaagaacggagatggtgttattgaaacacactaagattttagccactagatcctctagaccggacccgggttgagagaggagttgctgaagctgagttgttaagtcatggccttcaacgagttggttcataactttaagcttttttgctttattagtatccatttgttagttttgaggaagtttttggtgagtggtatcttatttttctttcctcttggtgtggtttgtatgattaaaggaaagaagagaagtgtgtgtaaatataaggtggaaataagatttgtaatgatgggcactttttattttgttggtttctttgatttttttttttagaggaagatgcgaggaaatgagaaggaagaaagagagatgtgtgaggaaatgagatggaacttgaacttatccacccatttcttttgcttatggtgagcttgacgtaagctcaaatgacgtagtgatgaatgatgtcatttcatccctaagtgagaatggaatatatataattttgctgaaatccaaacttagggtcctttaatgttttctataaccggataaaatttgtatcaaaaactagactaattaaaagagttatgaaaaactatccatttaaagattaaacaagattctaaatttcatttgtaaacttttttgttcctcgagattgtactaccaatttttttttactgatgtagtaagatcagttggaatagtgaattatttatttgaaatctcgagttaaatttgatatccaaatgatatgatccgtttttctatgaagataattttgaatagtagtttatatatcaaaaattcaaaaagacatgtatatagtccttatcagctatcaatccagatgtataccccctaaatagacctactatttcaaatagataacgagacacgaaatttacaatcaactagtccgaaatgaattgcccttgtaatcaaatacttgaatgacagatataattgggagttgggacggattatctaaatcagattgattacgttgaaagaatcaatatataaactaattaactcttttttttttgttaagttagactagtaaacgtatcacctcgctgcactaatatataaactatatggagtatcaaagctaaacttttctacccaatttttttataggaacctatcttatattatacttaaatttaacatattctataaaaatagcaacacaatctatcgttgaaaagtattttctttcacccggaaacactttattccgttttcgtggaaaaggtagagttgggcggggcattgatttaaaactttaatattagaagattatttaaagaggtgtatgtggtcgatcgactcaatggcccctaggccctagctatctcaatgcatacatgcgatgcggatgggttctcctcgcttagagatgtctagttggtctatagtgctccctcacagcctcactctcttctatatgcaccaagccaccaaggtttttttaatgatacatttatgcccaagtataaattaacattggtgatattttttttagatatgacaagtttttgcatacccattatcaaaaagtcggataatagtccataaatttatcttacggaagcattataagagaatgttaaattattacattttttcacgtcgaacttttaaattaatgattttgaaattttttcccttcatacgaagtctattaacgccagttgagctaggatcatatcaatcaatttcagaacacataaacaattgcatgggttaagaatcgacaaagtattacttttttgtgtataaagataaattatgactaaaaagatacttaatccgttttaaaatataagatgtttaactaaaaacacgtatattaaaaattacatatttttaaaaagttcaaccaaacataaagaaaatgcataatataactaataactaatcataaaatattgcataagaacttgaaaatattactttattatgaaactatttgtttttttttccaaaacatctcgtactataaaatggaaagaatatagtttaggataagatttaagttatttccgggatagtaccacttaacttcagaccaaatttgtacgcaggttcataaatgagatccgttattaatgccgtaaagtttagtggttgtgtctcaactttttcattaattcaaaaaggttggctctctagcctaagttaatatgcgagatactatgataaaccagttggttctgtagcgtagtaagttagtatattctactaagaatagttgtgtatattgtaatcacatttattaggccggcattttttttgtatttgttagtctttttactgctaatccattgtttctcacgtagccgaccaatagaaaggatccaataaccatatgataacaattggttattagagtcacaggaataattaatttctgttatatacagtttctatgtagggatgatgtgagaaactgtcaatggggaagaggagttgacaagggaataaacaataaaaagaataattaaaaatatactataatcaagcttttgttttatcaaatctgaagcttagctgtctttttaaatatagttaattgagttcctccattaacgaattgctaactctatctctactttttaaaagtatatccattttgcattatttatttactataataaatcttttaaataaataaatatagaatatacatattttgggacaaaaatgtgattttcaaattccatttgtaaacttttgaactttatccgtgattgcattgccaaactatgactaaatctcgatttaattatttaaagttagccataatacatagagaaagaacaacgcatatatctctatcacacagacctatcatgattcatgaaatataattgtgaacggattcatgtatccaaatacgaatggctgtagtttttgttgaatggtttgtattttagtttctgataaaaaaaaaaaatatatccaacaattatttttaaaatagttttgaattttctacaaaatggccaacagtaaggtaataactttatttaaaataaaataatcaagaaattgtcatccaacaccgttccatatttatgtgtctcacctcacatgataacttctcgctaaatgttttaaattttattggttgtggacttgaatctaattgcacaaaacaaacgagcattagtggattaagatttgaacaattttatttcccattagagatatttatttaatactccgcagtccgtttaaaagcattgaacggcccttcattaattgaactattgaacccattagttagattaaagctactgttttagcattatcagtttgtcactaggagtattatattgcgctgttccctaatctcatgaatgtctatttgtgtttccattccactactgcttagcctatatcaacccaaataattagtatcaatgatcaacgtgaattttgcaatttttttttatgtaatgcacaaatggatcgaagtacaatgaagataacaataaaagtcatcaagttgtgtgtaggcaactattttgtctatatatgtctccaaaagaccatttaataaggggggctatagacagctaattgatcaatatatcactacaagacaacatagggttttgcatgttggggttgtactacttattagaaatttgtcattattaattcatatctatatgtattagtatatacaacataagaattatagggttctgaaatatttattcgaatcgattgactatactctaaaacaactgttatagttaatgtaaaaaaaaaactcgagtcggggaagcggtcaaaacggtgcgttcgaaatcgtagaagctgcataagtgcggtaggtcttatcaatacacaaatgtataactccccaagaatttcaattgcgtttattcctttggaaataggaagatctttggcgcaagaataaatgattaaaccgctgcaatggtaatgaataaaggttgaataatggattaatgcgattcgagtgactaaaataatatatacatttcaactttcgtttttttctagaaaggttcatgaatcaagatatgtacagttgattgtgatgcgtaaaaagaattattgcaaaaggagtgagtgggtatcgtatgctggtaccaacaataattgtacaaccctaaaacgttacttttgttttcacacaaatattttttgtgcgatcaaaaggggaaataaacaaggaaataatggggaagcttcatatatcatatctacaatgaaaaagttctcattagaaatagaataaatatttgttcagggaacagaaacaaaaaaatgagaaaagactttagaaggaaattcaatggaaattgcaaaccaatgaaaaagcattactacttttgttatgtttttaattttttattttttattttgataaagattacttgttagtaattgttatgcttcttccatatatttatctctctctccttcaagaccagtcgcaatctccaaaaagtcgatttatctcccaaaccgtaaatatgaattcataacagtttttacctgcggttctaactttttttttttttttgcagtgaaaaaaatctctataataaaacacatgcttttattgtggaaaacatgacctaatgaaatttctaactacctacatgtgaatttcttcaaactcatatcaatcagtaatgaaaaaatcattgtagctagggaaaaaagttgaagaaactcccaaaaatctcatgtaaatcttcaaggtactctaagacttgtacggaaacgaaaaaaaaaaaacacaatgggggctttgatttggttttgataggtttgttttaaaccctcaaatgagtagttgttgacctcttttcgcagcccgtgaagaatcatgggaccaaaccatgcatgtcgggttctacctaagaaatgatgtgattatttacattagttatgtgttatcattcatacgatatcgtttaatttggattatgtgatatgattgtatgattaatcacatgtttttttgtttgcataatgtttctctaagaggcatgatttttgacatgagttatttgattgtacttagttaaggacacactcttgaaatgttttttccccatcacattgcacaaaacggcacgttgttaaagtgttatacatgtagaatggtttattttatgtgaagattgttaaaaaacggcatgttgttcaagactgtgtgcatatgtagaatggcgtgaagtgtggaaaatatatcttcttttcctatgaaatcgattatagccattttcgttacggagagatcgaaagcagaaatggcaagagaagcaacgacgaaattgaaacataactcaaacaagacaagatttctgaggatagctggctgtgtctaagaatgggtcggagcatcttcgatgtcgtctctcttagaggtaaaaaaaaacttttttgagtttcgtttcactctgttattcaatctctttacattacagcgatttctgtggagtttttgttttcgttcagtctgtgattagttctagtgtatgtgctggttaaagatttgaatttttacttgtttctcagtgtaagctcatgaaagtttcttgtcgattgtgctgtttctcgtctctttgacaataatgaagatatcattagcattacttagttgctgatttatttgtacagaaaagtctgaggttttcattgatctttgttacttttgatggtttccatcacccgagggagcaaatcgtttgtgtttactttgttttgtgcttcattgccaattgatttctctggatggaatgttcatgttttgcattgtaagaactcatggtaaatctttttgttgagcaaatcggttctgtatattcagttatcttatgagtcttgaatcagaacagcttttgtagaaaacagatttgtatactcaatgaattgatttattatctgtagaaaaccttacaatcactcaaaaacaaaattgaaacaatgtacacactgtttttgtatcgcaggtaaagtcttcaagtatgtggggaaagcttggaacaatgcttatctgttttcgtgccatcaagttttcttgctgaagaacaatacatcagagagtgatccagaggagttgatgggagaacgaagcggtgaaactatgtgactatgcattgttgaagctattggagaacgtatttgtgaagccatcaggtaatgcagcggagaaccaatgggagtatgaattggtgaagtgagaggtgatcgtagaggtgaattttgcgtttggtataacgcatgacgcaaacccacaatttcagaaggctccgttgtgctgtagatgtgatcatgttgttcaaaggttagacttaacttctcattctctttctgcaaatgttctaattgttcttccactatctcctcttcagtgtcactatctagttctgccattttacttggaaattcatggccttctgaaaatacgtctgaatctttttcagcatcaccttgtttaaaggtctgccttagactttcttgcttatcttgagacatctttaaatgaaacgtcatcctttcttgctcaagtgtgtcatcaagactgagcctgaatatatcatcccttggttcaagtgtctcgtccaaatccatttttccattttcgcctttctccaactgcagcgatgatccatcttctgccattacgcctacttttagcgctttggtttcataatcatccaccagccaagacccatcctcgtgaagtacagctctctcttttgaacttccacgatcattgaaggaaccccttgaactagattctgatcttccatcagcatcctcgtctgcttcaagctttgtctctacctcatacccatggcgacgaaacgttaaagttctccctgacgtccattcaaatgtctcatccagtttcattgattcatttccgcattcctccaagtgcagtgatactgtatcttttgccatttcgcctacttgtacagcttcggttctgccatcaatcaccagctggggatcctcctcatttaacaactctcttggaatttcatgatcattgaaggaaccctttgaactatattctgatctttcatcaacgtcgttgtctgattcaagcatttcccctagctcatactcaggtagacgaaatgttggagctctttctgaagtccattcaagtgtctcttccaatttcattgtttcgttttcaaatttcgtcaggtgcagcgatggttcatcttccaccattacaccaacttttagagcttccgttctgttctcatccactagccagggctcctcctcatgagacacagctatcccttttaaattttcatggtcattaaaggaatcccgtgaactggttattgatctttcattagcatcctcttctggttcaggcactgtccatcgttcatactcatgcagatgaaatgctgcagctttttcagaagtccattcaaatggattgctattatattcctctaacttcaaccccgctccatctcccattgtctctgcccatgaattttcactttcacatctgcttccttccggataaaccggttcttttgttccgtaggaattttccatatcttcattttgagactccatttgatgagataccgagctgtcttcattctttttgcttatgaaagtttcacccgccttctcaacaggaacaacagatccatctccaaccatcttacttggctcaagtgtttcatttctctcatatctatactcttgtaattcagaccttgctatgtcaaaaacggtgtcactcaactcttgtcttttgcttgagttctcatactcatagtgggactgctcaggtatagcaacttgagactcatgaaaaacgaccctctcttctgaacctccatcgtcattgaaggagccccgtgaacttgattctgatcttccgtcagcatactcgtctggttcaagtattgtccctagctcataatcatgcatgcgaaatgttggagctgtttctgaagtccattcaaatggtctgctgtaattctcatagttgctttcatattcctccaaatgtaaccccgctctatcttctattgtcccttcccatgttctttcacctgcaaacccgctttcttctagataaaccggttctaatgttccataagaattttctacattctcgtttggagaatccatttgatgagataccagtctctcttcacctgtcttgccttctatgattgtttcgaatgcctcgctcaccttctcgaaagaaacaagagatccatcttcgcccaccttgctcggctcaagagtttcatttgtctcgtatctagactcctctaacttacacgtgactctgtcactaatggtcatttccaactcttgtctttcgcttaaattctcatattcatacttggagtgctcctggatcctggatattgttactgtagcctcgcctgattggtcaagatgtcctataaacctctgattctcattcaccaaagagttcaagggagaatgtgttgtagctgacttcgcatctgaaattgtgtttgatatgtgctccgtatcttccttgactgatgtatcctcaaatggttcaccatagcttaagctgctgtcacatatagaatctcgagtgtacctagatttatccaaatgcaactgcggtttgtctccgatctcttctaatgtactttcaccttcatattcttcagtttcttgagtctcctcccattcaaactcgtaagtgtctccggtattctcagactgtacacgtgtttcactgacgtattctttcttgtatagaagttcctcactatgagataccgatctctctgcaactctctcatcttcttcacttgattcactcatcctttcgttctggtttactggaacttccaaggactcacctgatccttctcctacaatttcttctggcttaataatttcgttcttctcatattcaggctcttctatatcacaaatgttattatccatctcggttgacttttctgaatgagcttcctgagattgctctagatgaatcttggaagtctctccaatagtctcacttgatgtaggttgttgctcgcttaatctgcggttccccataggttttagatgaggctgtaatgcctccaatttcaaatctaaaaatttggtggatatattccttatgtcttctttaatccctttatcctcaaatgtttctagaattttttgactcaatataacagcatcgttacttttgcagattgtttctccagaatcgtcgtctaaacacgtcagatgacttccatcaggattaatctcttcatgaccttctgatgctgaatcctggtgattagtaacagtctcatctgcaaaatccatgccataatccacaaagctaggtgaatccaggacagtatctgctttctctcgaatagagaacttaagtacaccggaacaactgccacatctcacttgatatctttgacgttttccttggggagacacttgaggaagctgtagaagttccaagcaataggaacaagttgcaaaaggtgcaccgccggctgaagggagaatatggcgcttcactaccggattcctttccctgacataccgttttttgttccttagaatgctcttttcactacttgtgtcactcttagaaatccctacagaatgctcagagtatgtagagcggtgtggcgcagcagctggtacataactacgctcagagtacacagagtgatgcggggtttcagatctacttggttcataaagattatgatactgaagatcatgtagctgagactgagaagacctgtgatagtactttccatcagatgtctcacccggaaaacgagtaggtgaagcaacagaagattcttgaaaccagccttctctgctatactgctcgaattggtttggttgttgatgataataagactgctctgatgcagaaacgtaagacccgtgaaaaggactactgtagccatattcatatgcagaagaaggggaaggacttgctggatagaaaggaacccgaggtggatctgcgtatcttccctcatgttgtgcccattgcgcagcattgctgcgtgtgttatatggagagcttctttctgaagtaaacacatcagaatcaccggtctcactgaagtcatcagtccttctcatccattctctgcggatatcagatgtctcaggcttgtaaacagtttctggatgataacctctttcaacagaagtcgatggccttgaattgtactcccggtgagtagttctcattggagttctactaccatcttctggagattctacctcagcacttaaactacggttttgagaagaaaggagagcctcaggaatagtgtttgtgtgatcattgccgtcaggttcccaacgttttgctgcatccaaagaaagaacacacgaaaaaagaaaacacttatgaatgaggtgggttacttgtaaacatgctacttaagaaggctgttgtaccatgaagaatcgagtcgcatccaccacatttgtaagaagtagcatctaaaggttcctggagaagtttgtggcacttaggacatctcacgattctagattgagaagataatccgggcacggttctactcctcatacctctgaacatatgcttcaagtctttactacttgccaactaccaaaaaaaaagataaaagacaagcacttcagctcaaatccagaactcaagaacctgtaacaggaaaaatcaaagatctaagagagagagagaggaagaagatgagaagtcaccttagaacggataatggagaggagcctaggtgaaggtgaagaatctgaggatggttcaaaagttttcttggtagaagaagactgggatctgctctgtttcttcttcttcatcatggtttggtgattgacttaactctgatgaatgatctttttcttttttctttctgggaataaaactttgttgatgatctttcaagcaagcaagtaggaggaggagatatattattatatgaatcagatcaggcactataatgaataatggtcaaggtgatgaaggttttaacagacttgtttattgactattattttgcttctttcaatttatttcttttcaagaaaattaagatctgagagttgcattgagtagtcaccattggatttggaagttgaggtccagttcctctagtattaacgatttggattttgaaaagtcaactttggagatcgccaagaaacatccctttattataatttctagatcaaatttgctttttttttttattttctgtttttaatttgtttgtatctgttttattcgaagaaagaacaaatcactcatcatcatgatttaatcataattttttaaaaagaaagaaatcaacgtgcatcttactaatttgccaacataaagcatatggttattgaccaaaaccctttcgagtttgaaaaatacgttaaactttcttctataccgtgtttgacaggtttgttcaggttttcaaattgaagaacacacagtaatatagaaaataacattaaaatgtaaaaggattaataaaacaaatatgcacaagaagcacttcgtttagtgttgaaaatatcagaaccatttgaaaagatgcatctgcacaaatgagctctaaagaagagagccatgactgcaaataaaccttcatcatcactaaactcctcttcatcttcatcttcatgttttgtgtttttgtcagccaaaagacaagattttgtctgagaacaaaacgttaaagagagtcatcagtcttaccagatcagatctttattcaaagaaagagctcatgatacttactttatccgcaagtaacttctggttttgacagacaatggaaaaacctaactctgttctgttatgtgttttagagtttaaggttttctgagaaagagatcagcagctgcagctgtcttcttctgaagctctgaggtttcagcaccaacaagtttatccatttgtctcccatctttaaggaacactacagttggtgtagcttccacattccattcattactaaactcctgcgttttgttttttcaccaattcaatctcatatcataaaactgcagtcttatctatcttctcaacaacacgcaagttttcagtttacttacagcgagctcttcgacatcaaccgttacaaatatcattgaagggtatctagaagcaaggtccctgaatactggttctatctttttacaaggtacacaccatggcgcgctgaaattcaccaccagctgttttgattgaatttatcaagctagtagttacttaaatggaaaataggaagaatcatagaaaagcgaaatttatttaaagaagaaagcttacgatcttgccatggttgttagcttctgtgatcttttcttcccatttctcgattctgcttaccggatggacctttcctttggacccgtgttggcttcgggtttgaccataactgttgttgttgttgttgctgcagcagcatatacatgaccataactgtaacacacatatatggacacagattcttcatcttccctttgaaactatggctaatgaaacattgaattgcatgctacaagaagttttattgattacctttctacaacaagaagttcttgcacaacgatttcccatcaactctttacacagtctaatccagatttgcctctcattggctcaagattcactcctgaattaaaacttcatcaaatcaaacgaaaatcaaaaccattatctctttaatgttacaacaattatgaaaaagagagggaattcaaatgaggtaaatttgtgaccttgatggaatctaggtatgaaaaaacaagggatttgggagaggattaacctttaaatccttacaacttcagatgatttgtgcttttgcattcagaatagtttcaccctaaaggcaacagattcgaagatcacaattttctgtgcaagattcaaaaagaaacacaagaacattcgataaaaagcattgagggcttatgtttggttcttcgatggaaaactatatcttcttcacgatgcaggtggttttgatgaaccataataactgattgctaattttgtaatatagaaattggtcaaagacaacatagatatgcaagtctcatacagcttttactctggattctgtattggttttctttccatcatgattaaaccggtactaaccgcaaagacaaaaactttttcctccctcaagtcaaaaccggtttatataggacaaagccatccttctctgaagaatcacaaaccagaaacagtaacatactctaacatttattctgcaaaagtttgtaagggtctttaaacagattcactgtggtgttctatatccactgaagatgtttagtttgtgtgcaagtacgatagaaccgactaagaactctatttttcaagcttctcgatttcttcacgctgctttctttctgcttcttgaagttcgaattcttcacgttccttcctttcggcttcttgaagttcaatctcttcacgttccttcctttcggcttcttgaagttctctttcggcgtcttcttcctcttcaattctgtcaagattatcaaactctttggttgctgccattgcttttaccacaggatctcttaactcagagatcaaaccaccaccgactctgtactcttcttcatcaccaataaggaataagcgttgatcaggaccagacgccatcggaatatccaccgccagtagtttcatatcatactgagcaaaaacagacatgaacatcagaaatacacaaaactcgcatacatcgtgatatagaaatgggaacactgataggttcatacggcgatatctctcacagtaacatagaacaaaaacagagtcaaagaagcaaatgaagaacaaaataaccaaccaaagcaaagaatcaaagacaacctaggttttgttttagagaacccccaaacctcacgaaaatactcaacactttaaacatcaaaagccttttctatttatactcaatgactaacaagttgaaggggcattgttaatgaactcttatcaggaacctaaaatgtttacaagcctaattgtaaggttaccttggaaaactttcaagaacagattacttacaatcatcatgatagtaatgtgatcaatgatcaatctaagaagaatgttcttcatctagagggaaagtagagaaagtaaatacctggcctttcttcttcttgacttcgacactaacaagtccctttcgctcagaaccttgaaccgggaataggaggaagcaacgcttgttcctaattgttggcttgaattttttgaatgttattccaccacctgacatcacataagcacgcaaatctgatcctgctagaggagcacccataacttcaagaacatcagccgctgtattgagcttcctcatagtgatcctgtaaactttatcgggattgatcgtgaaccttgcgcgaaggtataaaccctattaatggaaaattcacagaatattgctgtgagcagtgataactctataacataagagaatgggaatgttatgacaacaaaccaaagttaacaacagtatttgcaatttttgatgaaaagttgaagactataaagattaacaaaacaatacagttttccacggaaaagatccacacagaaactatgtcatagctctgagttcagagacccactactgaatcaatcctaagttgtatctcaaagttatcagaaataagtatagagagaagctaaaacttacagcaaatgcaacaatggcagatgagagagcaaggaagccatacttggccattccctcagagaggccaacgaatgtactagcgattccaaacatgaccctccacaagaaaatacaaacaaaaacagctcctgctccaaacaccaaaaggttattcttcttccaaaatgcatcaacgtgcaaccctaaagccattcggtatctagcaaaagtcgaactaacagctttgattggcttgtcaacaacctttctagcgaaattcccatcaacttttcgaaatccagagctcgaaaacaatctaaacgccgatacaaagttcatattaacacggggcttaaccaaggctacaccacaattctgcaaaccaggtacgagcttaggactgggtaaaatctgggataatcccacatttttcgaagtgggtctcgacaaaaagctgtggaaactggtcttaggttgaagctgagaaaccccattagagggaagaatctgggataagccaaagtttttcgaagtgggtctcgacgagaaggtgtggaaaccagacttaggctgaagctgagaaaccccatttgaaggaagagccggagaagacaaagctgagagttttgaccatcccgtcgttgtgaacaggttgactcgactgtaatgcaattgaataagtttgtgaactgctttgaaatcggaaggtttcaccatctttttagggttttagatcgaactgtatagggtttcacaaaaacaaaaacaaaaagtgtataatcctacttttgatagacgaaatgcagaaactaagagcgagaaagagttcgctttatggatcaacgagtcagaatttttgcttcgacgccatgagaactttcggatattcagtcaccggagctgataattgtggtgaaccaaattgaggagatacgggccgggtcgggtcgggtcgtaagggaaagaggcccattaagataataataactatactttattttgcttgtattagaaaaaggttaaaatatacaatgacgacagttgactaacgcaaacaaccgaataaagaaagaacaaaatcggaaattttcgacgaagataaaatcatacaagttagtatacagagacgattctcatagccaagtcattgatttgagaagataacaagattattatagcatcaggatcgagattgttcgtcgtccattgaagcagcattttccttcttcaaagatcgcttttggttcttctcgctgttttcgttttctaatcggtgaggattttgttcaatctcattgtgtttttgtgttcgaatcaggaaatgttcgcagttcttattgtttgatcggattcttaatttgtgtgtaaattattacgcgattgttggattatatatgaaactggaattgtggttttgttaggattttggagtatgtatgaagttgcttaggggtttgttgatcgtaatgtatgatgaatagatagggtttttaggttgatgagtttcgatcatggtggaatttgatttcttacatggcttccttgtacatggctaacattgacggctaagaattgtggtcatgacatgttatcgccactagtcttacctcagagaagataccttgttaatttgttaacacttttgtgttgaattagcttaagtttttctaaggcattgtattagtctatgttcgactaggattctgaatcgttaggtgttgtaatgtctctgctatgagtttgggattgattgcttcaagtttagtctttcagtttcattgttttggatcttgtggacagtgtgtttcatgaagtgagatcaatcttaaagtcttatttcttggttattgatttcagcttgcaacaatttcaacgtttcacatattaaggagaaatggatcctcggagaaacttccaaccaggtggctatgactctcggaataccttcacttcaggatcttttgggcctccagattttggtgaaagtgatgaagcagagttggtttctgtttcttggaatcaggattacagttgttttgctgctggcactagccatggttttcgtatatataactgtgaaccgttcaaggaaacttttaggcgagagctgaaggatggagggtttaaaattgtagagatgcttttccggagtaatatcttggcgcttgttggtggtggacctaactcccagtacccttcaaataaagtattgatttgggatgatcatcaggggcgctgcatcagtgagtttacttttcggtcggaaattcgtgcagtgaagttaagaagagatcgaattgttgttgttcttgagcacaagatatatgtctacaattttatggatctaagacttcttcatcagattgaaaatatggcaaatccaaggggactatgttgcctctctcatcacatgaatacatctgtcttggcttgtccaggtattcgtcgaggagaggtccgagttgaacattttgggcttaacatggttcaaatcattaatgctcatgattctaatatcgcgtgcatgaccttgacattggatggcttgctccttgcaactgccagtacaaagggaactctgattagaattttcaacacgatggacggaactcgtctgcaagaggtctgatatgtgataactatgaactaactagctttcattttcttaacaccattattgtaccatatgttatttaagtaaatattttggtaaggattctgtcaaggtaatggttgagcaaacaagctgtcacgatttatttagaaagactttggtagctattaataacaataatggaatcttatgcagaacatatgtcagttttgtttgcatattattgatgaattagtccaatgctgctttgttacaggtccgaagaggcgtggacagagcagatatctatagcattgctctatcaccaaacgtgcagtggcttgcagtatcaagcgacaaggggactgttcacattttctctctcagagtgagagttataggggaggacgcatactccactgaacatgagacttcttcaaattccctgcagcctcttgtttctccagccagtggtgccaaccctggttcgtcattgtcttttctgagaggtaagacagaaattaggagatatctgaaaaaatgactgttaccgtgaaagtacatatgatatgccttgtttctctttaagaactgcttatggagtgaaaggacagaaggctagattatattgagtgagtacataagtgaaacttccaagaaatagctttcttggttcatgagaaaatcagtgatctttatagaagtgtgtccctaaaccttgtgaaattttatgtgtcactaggaaagttattgtttttttttttttccatttcatagcttttctctaaaccagcaaatcgagaagtatatttcaaatatataattgtgcagttggatcatctcatgcttctgtctggtacctaacatcttcagacattgttgcaggtgttctaccaaaatatttcagctcggaatggtcattttctcagttccatgtacctgaagtcacccaatactttgcagcatttggtgctcagaacacaattgcaattattggcttggacggaaggtagctaatctctctgaatgtatattcacatcatccacaagtattatatgcttccatcacactagtcagaatagcaaaaacataaaataaccaacaaccacacatatgatttatcggccttacagtttctacaggtgcaatttcgatccagtgaacggaggagagatgactcagcttgaacatttccattttctgaagcaagatagcccgagatagtcagaccacgtgcttggtttgagttttatgtacataacaattggctctgtatatagatttggtgaaaccgcatacgattttattcttccaagctttacttgattgaaggaaaatgtattcttgattggaacaatgtatatacaaaaaggatttttttttggttataacactaatttctacagagaatcaaactgcaattcgattacgtttattaaaatttcaaatcagaatgttgattataggacagatataacaaatgcaagatggttcagcttacatggtcatttcaaggttacagaaccggatttctccatttaatttaaagacttatacatttaattattaatatttagtaactttaattttatagagacaatatagaaaattatgcaatggagatgctttaaaagtattaggtgccagagttaaaaaaaaaaaaaaagtattaggtgccttgtcgtcaccagattccattggattttacgactttttgttaaactcacaagtcgctagcttgtggtttaagcaatctttttttttttatataaaatttacatatattaaaaattttatgtggtttttttttacataatagttaatgatgcattaaatttaagcaattttaatgatgcattgattttattaattccccttgctcaaaatactttctatggtgtgattaacacaaattatattattattcttttagaaatttttgcttgtaaatgctagttttgattgcattattattcttttttcttttacgtcatttacgagaattttcaattttgttttatcaaaaatttctaattgaatatttgatgttgcacataaactgaccgtgatacatgtgcttgttctgtatatagatttgttgaaataacactagagtatgctaccaatgttacggatcacggtctccaagcaattggtaaaggatgcaaagaattaaaacatcttgaaatactaaactgtcctgttagtaaaacaggtcttatagaagcaggcgagagctcttcttccattagatatctttacgcatcaggtaataaagatggaaaggaaggaggagtgcaatcttttgcacaaaataatgataatatattttcttttcatttgttgttaagattctccgagatcttctcgagatcttttttggaaatacgataagataggctgaataattcttattctgaaattttttggtaatgcgaaacctttgttttatatgttcaagaagaaaagaaatattaagaattttttttttgttcagtcacacaactttagaacaaaattatgttaataattttcttcattttaaatccaaaacttcaaaagttagaaaacatatgaagtaaaataaaataaaatgtgctaagctataaattgattttagtttacataacaaattctaattgaaacttatttttttatatcgtcaaaaaacaacaactaaattctgaaaaaatatcaaaaactccaatttggaaagtataaattacaaactaacttgttttattttatgttttaatataatagtttagttggtttaataatagtaagtgttattttattattttttaaaagggaagggtttaaaaacccaccaaaaaatcccttaaatggatgcttaaaaatctctggtcgcgggcttagccccagtagactagttagatcactgtgtggtctgggcattgagttatcaaagaaaaaaagggaagggtttaaaaacccaccaaaaaagttgagggttttgtacatgttttttgtaaaaggtgagggttttttttacccacttttcatagagctgaggaacttgataagatatcaaacaacaagagtctccaactcaagcagagacttcaatctctcacaacaacactgcagctgtttcaggcccaaaaggagacacgaagcccatctctcattcatcggaactctgcaatactcaaaacagagaaccatcacgcgagccgcttcagctaccatcgctcgccgccaactcttgttgttgtttgatatcactttctcttcttcaagcagttgctactactttcagaagaaagctgagaagaagcttaacagacggagaagattcgacactaagtacgaggatgctgctgatctgctcgagaaagcacgtgattcctataagcttgccaaatcatgtaatttccataaataataatcagccggccttgatttttgtttcatctgattgatttgtgatgatgatgaggaagaaaaggtgaaacttgagacttttgattgatctttggtttagcaattgtggtgatccttccatggtgttgtgagaagttgattttaggcctctttgatatgtgggaattataaattggatactcaacatttagattactcgataatgatggtttttggccttatagtaaagtcattgataagtatcttcttgcttatgtgtttgatttgtgattcttcaggggatcaagctggaatagcttatctaaaacttgccgattgtcacttaaaggcaaattctttggcaaacacatatatgataatggacgaatgtatggatcatgtagcaacagctttttagattttaattgacatatatgtactacaggactgattatcaactcttgtgtgttttcctttcgctatgcatgtttatcgcgtccaaatataaccatgaccttattatatgcagaggctgcatcttgtctagagagagcggcgaatatattttgtgagatagatagtaaggctcaacatggctgcaagatattacaatgtactacatgtctcttttgagtatgaattagatactgttactcttttagtacggatagtgagaagatagttttattgagggggaggcacttcttcagcatcttctccatggttcgtgttgtttatgcatgttggatcctgtcggatttgtttctttttttctacagtatatatagtaagcttggtactgactttctgtatttgtactaatgtgtacattgtcatttacttttgacaggaaattgctgagtattatgaatctgatgagatgttcgagcaagctattgcttactatgaaacggcagctgaattctttcaaatagaagaagtgaccacctctgcaaaccagtgcaatctaaaggttgcacaatatgcttcccagctagagcagtaagattttcggcacctgacctttttttggctttctcatcctctggtattgacgtacttacagtactgagatgggaccatgttaaaatcgaattttcaaaccacaaatttgacattgtttggaataatgttgttgttctctacacatgagcacatggattatagccccttctctactttggggcggattgattgattgataataggcttgctgttgtatctttgataggtatgagaaggcaatccagatttatgaagacacaggcacgccattcactcaacaataagttgcttaagtatggagttaaaggccatcttctcactgctggcatgtgccacttatgcaaagctgatgttgtttccatcactaatgcactggagaaatatcaggttcttcttcttccacagcaaacagccttaacatcagcatcctggcgtggtcctttgagtaactatgacatgtgttctaacttgtactttcttgcaggatctggatccgactttttcaggaacacgggaatgcaagttcttagcggtaaagtttaaactctggtgttgtaagaaattggggagtagcttacataaagtatgttaagtgttgtacatttattctcatgaacaggaccttgcttctgctatcgatgaagaagacattgcaaagttcacagacgtttccaaggaaattgatagcgtgagtccactggtatgggcagtaaaccacatgcaactatttggatgtaaactctgtctggttcttgatcatgacaacaatgttgttgagggtaaaagagaagttcaaggccagggagctggaggaggatgcaagctttacttgattgaaggaaaatgtattcttgattggaacaatgtatatacaaaaaggatttataactacactaatttctagagaaaatcaaactgcaattcgataacgtttattgaaatttcaaatcagaatgtggattatatgccagatataaatgcaagatggttcagcttacatggccattgcaataaccttatttctagaatacataagctgttttctcctacggccataaagagtctatagttttgaagacagggcagtcttgtggtcgagagcaatcatcacttttccaattgccttcctgtctttgaggtccccgaatgcaagattggcctgtaatcaaaacggtaagtgtttaattacatgttttgagttttgatgtcatgaagatgagttaatgttttcacctgggagaggctataggtatgagagatgtgaatagtgatcaatcctcgggaaagccatgacaataactctttgatggaatcttcaaggacattgggctgatggatcctgtagctaccccagtaaagaccatgaaccgtccagttctgcaccaattggttactacaacttatgaagatttgattctctcaagtgaaaagcttcttcttctctataatacaacacaaaccatttgtttaccttaacaagtgctatattagcaggaatgacaggtatttcgccgctggcgaaacctatcaccagaatctgggctccccatttcagaactttcatggactccttggttagtttccctccaacaggatcatacagaacatcaactcctttaagctttcttgtcttgataaactctttcacacttgaaataacattctcagtgcctagatcaacaacatgatccactcccattgacttcaacagttgaatcttctcagttcctctaccaaaaaagtaagagattcaaaaaccagaaccgatatcatggaagccaaaagtgaaatgagtctaaacaagtatattacctagcaactgcaatgacaatggctccacaaaccttaccgatttgaacagctgcaaggccaacgccaccagcagcacctagaaccaataagacctgcatcaaaaccaatgaaaaatctatcaagtctcaacctttataaactcaaattcacatcaagcaaaaaaactgaataaaaaagatgagatttttttacctgaccagatgttaaacgagctctatgaacaagtgctacatgagaagtcccaaacgcaacaggaagcgcagctgcagcaaccatgtcacatctttccggtacaaggaacaaacgagattgatcagcgacgataaactgagcgaaggaaccgagatcggcgaaagaacagacacgatctccaacgcggaatttggtgacggcgggaccaatcgcgtcgacgattccggagtaatcagagcccggaatgaaaggtaacggaggtttctcctggtatttcccgagaatctgaaggtaatttgcgtaattcaagctcgtagcaataactctgactctcaccgacgtgtctgaattcaaagacgggatcggatgagtcttgcttacttctaccggagattctggactacctggattcgtcgcagttggatctcccaatttccggcaaaccaaagcctccatttttgctatctctgataactctctctctctctctctctctctctctctttctcctgaagagtgaaagaaccagcttggcaatgggacgttatcgtaagcatatgagatggatttgatacgacgccgtttagatcatcgtaattaatagtataatttaataactttaagaccgtataaaaccgaaccggtcctctttggatgatttgcttatgactaatctgaaaattcaacggcgaagagaccaagagaacgatcacagatcaccgttggatcagtcgtcgtcgtcctaatctaacggccaggagactcttctccgatatcttgtgcttctttcccgttacgacttcgtcggaccccaaaacctaatccttaatctcccattcttcaccatggttaccagaagaaggtcaaagcttggatcttgagttttcaaaaatttcaaattcggcttaaaaatatgatttgtagctttgagattttgagactttgggttttacttttacaggtcgaagaagaagaagaagacgaaaaggaagaaacagagtagcaaggaaaaagaaaagtatcaaactttcataaaccttccttgtgatctcttacaactggtaatttctcgtctcccgttgaaagataacatccgtgcttctgctgtctgcaaaacatggcacgaagcttgtgtttctcttcgagtgatacatacatctccttggcttatttacttctccaaaacagacgattcctatgaactttatgacccatcaatgcagaaaaactgcaatcttcacttccctgagttatccggttttcgagtttgttactccaaagatggttggttactcatgtacaatcccaattcttatcaactccttttcttcaatccctttactcgtgattgcgtacccatgcctacgctttggatggcatatgatcaaagaatggctttctcttgtgctcctacatcaactagttgtctcttgttcactgtcacttctgtcacttggaattacatcaccatcaagacatattttgctaatgctaaagagtggaaaacatctgtgttcaagaatcggttacagcgaaacttcaacactttcgagcagattgtcttctccaatggtgtcttctactgcctcacaaacaccggatgcttagctctctttgacccatctttgaattattggaatgttcttcctgggagacctcctaaacgtcctggaagcaacggatgctttatgacagaacaccaaggagagatctttctcatttatatgtacagacacatgaacccaacagtgcttaaacttgaccttactagctttgaatgggctgagaggaaaacactgggaggcttgacgatctacgcaagcgctttgtcttctgaatccagagccgagcagcagaagcagagtggaatatggaactgtttgtgtctctctgtgttccatggattcaagaggacttgcatatattataaggttgatgaagagagtgaggtttgcttcaagtggaaaaaacagaacccttatgagaatatctggatcatgccaccactcaacctcattgatctccctttgtttgatcatcgtatctagtaatagttagagaattcttgttcataattattcaaacacatgtacaatctattttatatacagattactcatttactgataataaaagagggaaattctcagaagcaggtaaaatgatgaaacaatggtaacagatacaaaccagaaaccgctttgggttttgatctcacactcataagctgattaacaatgttgaataaaaaaataaaacaatcaaacaaaccaaaccaaacaaatgatcaagcaaaagaaaagaaaaaaaaagaagtctgctgcctataataaaactctacgcagcaacattgtatgatcatcagtagagaacccaaacttgcaccttccttctttgaaccagtgcgaaaaataaacaaaaagtagccgcacacaaacacacagaacaagaaaatccggcgtcaggggaaaaaatatcaggtggttcgttaatgacattgtcttcttcacttaatcatctggaccaagcagtgtaacctgcagatttaagcaagcctgttatgtaaacctgcagtcttaaaactgtataaagtgcaaaaccatagtgatttgcagagtctgagaaaggcgacattttgactacttttgcttacactgcaatcgaaagcgtattttcgagcaagggctatggctgcgttacgttcgtgttctgactcaaaggttagtatgaaagttagactctttcttggttgccagaacactgccttggtaggagccttaatattgcctctaactccacagagctgaataattatcataccaaaaaacttgtaataaatgtttttcattgaatgtcaaagagatgtttctgttaaatagaatgaagaaagagtctctagatacctgcatggatgtcgaatataattctctcgcctttgtgatccatcctcgagacagctttatcctcgtctttccaacggtaaaaacgtgcgatcgagatgcatagtcttgtccattcatctgcgatataaccacctgaagaagagtttgagaacatgaactcaatgcaaacatttccaagaaaacaagaataagttctgaaaatcttgaagaacgttgtaacatacactgaattcactgttagactttcgcatcagcgactctacgcgggatggcaagccagaatctgcatttcagtaagccaaacattcacttatagtccacttaaaaatctttgtatcgtctaaagtttccgtaataccaaccaggatcaactggatcatcggttgtaactgtgaacttttgaccatttgaaagaatgtctgcctgtaatatcctcccaacatcaaatggttctggagcatacatcgattggatggcacctaagagcaagaatatgaactgctcaagctaaaattcatttactaaaaaccaaatgatgaagcaaacaaacagataggtccatttaccagatatagcttccctgcgactagtttcacatgctgcacgataccactgaatagaacagttggaaagatctggagcattgtcttgagcattgacacggattcttaagcaagagccgagactttgtttgccttcaagaacaaatggacaagacttggattcctcaactctcttgattattgctatcttgaaatgtttgataaaggcaagaacaaagaagtgagcacagtccaactctagcgaagacgaagagaactaaatgctcacaaagacatacctctttatgaagtttaacagaattcatatacttctcttggattcgattccttaaaccatgaagctcgtgttgcatgcccatcacctgaaattacaacatatgcagtagtaacttttaacgtggcacatcaaattatgaagttaaagtgcaatgaattgatgtagtacctttgttgggtgatgcatccgtttgatttgcctagcctcttgaacttcctcaaccaatttctccacatcctaagaattgaaaacttgagttcactagaaaactttactactaactataaatctagactagaaaataatactaaccggcccctgagctctagaagcttcagaaatccgttcttgttcttcaaaagcctctccaagtctcagcacaacggcccttgcagtttcgatctcagcacaagagaatgacttttcttgatttaccagtttctttgcatcttctgaagtctgtcaatatgagagtaacaataatcagcttcctttgtagttgttactgttggaaatgtaagcaagcgaaaacagaacattttcggcatcaatatcaatctatactatagaagcgagacctgcttgaggaagtttcctagtttcttcacttcaaacttctcctgaatcaattcaccttcattctgagttaacttcacagctagagcttccacctattctcatacatcacagttttgacacaagtcacataaaaacattagtttcagagtgaacaaggaaccttatcttaaaatctgactaaatcaatcttaaatcttaaccatggagatagctgtctccacatcctgtttgttttgcccatccgtgcgtcctctcatgtattctaaagcatcccttagcttcttcaacataacatgtccctccaaagaagccacctctcttaacttagcctaaaagagagtttccaagaatatatttcaacaaaaagagagagtgagaattgttatatgaaatcaagaattgtagaaagtaacctcattagccaaactaacagctgcagcaagattcttgtcgaatttactagcgaggtcacggaccgaaagccgcttgtgctgatcagacaacaactcgctctctttctcgacagtctccttcacagatggacctttttcatcttcctttggttcctctactatctgattatcaggtcctaatttatatgttggaaagtgatcagaagcaaagctcacatctactgatactggaaccactgataaagataatgtcccttctatttcaggacacactttcgtcattttatctccggatctttatctgtttcaacaacaataaacaaagagcaaatcaaaaaatcattagatgatttgaattggaaggaagattactagattagctctaatctagttcataggaaaagatttaaggcagaacaagaaatgcattatactatcgattacactaaatgagaaagaatcagaacatcaaagggcagttaaaaaaacagaacaaacattttatatatatttttaaaaaagtggagaatttctaactcatgtaaccaaacattgatgtcatgaaacagtatacgacaaaaatcaggagaaatgaaagtagaatcaatcaactcaagaaaaacacaaacaaacttacggataaactcaagaccaagaaacagagaatctcaagagtgaagaaggaagaaggaagaagaagaataaagacaactggttctttagtctatctctctctagtcttcgtcgtcgtttggcatcttttttcttttttagcttttacaaaagcgtcaaagacgacaggataaatgggcaatgcagagaagaaaaaagagacacttttgttcctctctctctctcttcttgaacactgcttgttctctctctctctttctttcacgccatcatcgttagaaaacccaaagagtgcaaaaagagaaagaagaaaacgattataatttgttgtcaatgcctggtctcgtcttttgtttgctgggatgaaaaaaagtgaccacgcgctgttacatggtgtttgaaccacacgctctggcgcgagttgtcgtcggggcccgaccgaccctttggctccactggatttctcttctttttctctttttcacattattgattttgtgttttctagtttagcttttcgtgtggatctaattatgttcctttaacaaccattattatttcttctcaatcttaagcaaactatctaagaaactaaactttcaaatccaatatatgataaagagttaatgtagagatacatgttatatgactctaagctacaaatactaattttttaacaaaatgtataaaaagaatcagatacaaaattcaagaaaaacagtggatatatgtgtccaatccttttacaacctgtaatactacatttttagatccattactaaaattaggatatctcaatttcttaactaaccaatcaataatatgcaaaagcttatccaaagttacaaacattattgtattagaccatcttggagagtggtgagagatactgtaacatttggcgtgtagtcatgagtactacatttggtggaatctatgtttttagttgaaaggtcaaactcaaattagttttcctcctaagagctatcaaatgcgttaacatcacgattcacgagttacatatatagctagtatataattagtactataagttacaattgttttcgaattacattaatttcttttttcctagtcgaagttcacgaatctttttatcatgaccggagtctctaagattcgaatacagttttttggagcataatcttcttcgaatgacaataatagcaacaagttttttcgttacagtttcatttcatcaattcgtatggcataataatcacttatacactaatgtttttgctaaaatttatccatctcttttcatattaagattgaatgaattaaacaattagttaggttgatatttatcaattttcgtggtccatggttgtttaattcaataactcatcacgcattttatcatgtttggacaaataaatagaacaattggacaaattatcattaaagaccagtagagtgggtctctctagaattataatactttaatgttaaggaattttcttaattaaattccaagaatttaatatcctagcctcactaaagtgacaaaaaaggctaagcagagcatgtgatatttcaggtcacgttaacatgaatagatggttcaaacatcataatcgcacttttactttctgtttgtggtataacaagagagtactctgtactataatgagagatgcatttgactttaattagataccaatcactttagttataaactaattttcgtaagctgtaaagcatttcttacttaattcttagataatacaactctactttgtgtcttaatgatgtgtttgtgttatccatgactataattaactctgagcattaagcatatgcaacggggtccatgtagaatccaatgataccaaacctactcgccatcactttttttcacttcttgtctcctttttccttattttgttggcttttacttatttagttaagagtttgtagtgaatgaacagacgtttactagtattatctagtactttgtgggttaattgtggatgaagacaataattttgattaggcaataaagaaatgggtttggtctttggtgggctagtagtaagcccataaagaagaaagaggttcagacaacggaaaaataagggtatgacgtggcaagatatcattggttggaagaaagagattggcgggtgaagttgtttgtgccgtctacgaatttagggtttaatttgtgttaatgagccaccgtgtttcgattctatcatctcatttctcacctgcctccgccgtcatggcttccgagaaagaagctgctctcgccgccactccttccgattctcccaccatgtatgcctttttacatctttctctcctcctctttcgatcttccttctattgttgattctttctctttgtatgtagatcactgtgatttgtttgggttgactctttgaatgaaatgaatttctatttgactttggatctagttgtagctttattgttcctgcttgtgtagctgaaaatttgtaaggacaaaacaaatgtaatggctgtcctctgcgatgtagtagttgtgaaattggttctttcggttaactctgtaacgattgatgagtactccgtattgaacgtgcaatactttagtttgggtgtagtgacttagagtttgtgagaagaagctcttttagtctttgtctatgtttgttgatttccatagcctatatgtagattttagttatatatagtgaaactgagatttttctctgctgttagatagaatttcaagattttaggttccttctattagggaactattgtactattatatctcctggaagatttgaattgttttgttctgttaaaacaattgttaacatttatttagcttatgctggaatatgctgcagatttgacaagatcatcagcaaagagattccatccaccgtggtttttgaggatgacaaggtactttttagttctataaccttttttatacaagtgtctcctctgttgcatctggaacatgtagttatgcaatactctcaagttacctcaatcttctttccattttaaagcactgtgactacgagacataagcattctgtgaatttcatatattaagatggcctccgctttactatgttttagtttcttctgccattggttaaattttctaaattgaaatgtcttgtgttaacaactgaaattagtttcttaatatccctaccactttaaaacttgtcagtagttagttgtacacacttcattagaactactgttcctagcatgtttactcaaatcatgttgcatgattttgcaggtcttagcttttagggacataacgccccagggtcctgttcacatcctccttattccaaaagtgagggatggcctaactggcctctctaaggtacctatcactgaaacaaaatccagacagcaatcaaataaatgaactgctaaaaccatggcaattgttgaactcgatcccattttgaaacacaagctaaataatgtttggttctgctaccgcaggctgaggaaaggcacatcgacatcttgggccgccttctctacactgccaagcttgtagcaaaacaagaaggcctagcagagggtttcagaattgttatcaatgatggtcctcaaggctgtatgtatttatatatagttccacttcttcagttagcctattcagaaattcaacacctgaagaaataaagggacctcatgattgatgcttctcacattcttgtggtttttgtaggtcaatcggtgtatcacattcatgttcatctcattggaggacgccaaatgaactggcctcctggttaaagatcatcttgaagtggattgttgtcctgatgataagagggacgcttagagtttgctctcgtctactaatgtctctataaataaaaaaacgtgggacatgacttttatgattgttatgcaaaaccttattttatgttatgaaaaggatatttcactgttttctcttctggaatcttgtggttgcttttctctattattgactctgtaaaaattgactgcgtttaaaccagagcgccatctttaaggaagaataccagagagtagagacgcatgaattgaccttgtaaacatccacgacgtgttcatgagcttctgacataatattatatacaaacttggtagcggtcacgtctttgacatttttatgtctatatagaccacctcattgcctacaagtaaatatttggtggattcttaatttctatctgatcccagtttcacgtgtagacttttctttatagtcatatctcttatcttagattccatttccaagttcataatttgattcatggaggaagaaaaaccaaggaagagcctgaccagcagtgtcagcagaggttcactcaaaaccaagaatccgtttagccgtgtgaaggacgaaggtgagaacagaaacaagacgggattgtcgatgaggaagtcgtggtccacggactcccttggtctgctcagccagagcaaccggttggggaagacggtctgtatctgtgctcctacaaagcatgaaggctcattccgttgcaggcttcaccgttcatcagccacaagccatggtgcagcaactgcagaacttcatctcccaaagcccttgctttcttctcgtcgtctcggtgaccaataatgtcacatagtctctctttcgttattcacaaaaccagtatggtgccgtcctgattgtctagaagattgttttttcctatccatgtgatgaatccatttggtatccatgtgttcatataaaacatgtgcttatgtgtatgttgatgcacttttaaatcttttttttttttggtggtggaaatttcacatatatgtttcttgacaatagtatatagctaaccttataaggagaacacaaaagtatacaaattgctaagtgtatgtgaatattttctctgttgagttgcagaaactaattgacattcatacataatggaattgctcattgatttctccatcaagctatgatcaattcgcaacgtcacatgcctcttaaccttaagaaccgccaaatacctgaatcagaaaaaagaatataaacaaaaccataaatttgataacatatgcatgtaaatgagtcattctaaaccggaacagccaatacgatacggaggtcatatatgatatatttgcgttgaaaagctgaacacagatactaactatacgagtctaaccagcagacattaataatcatttaagcataagatataaccgattgattatgcataagagccaatacgaatactaacgaggtctacgaactcaagttggactagcaatgcaatagttcaccaggttataatgtgaatacgattcaggtttaagacattcatctaccccagctaagcagctactatatatgttgttatctagacgacctgtgatgcttctaattctaataaaaaatcttcttggttcttcaaagataaaagaaaaaagtactgaccgatgctaggaaatcagtggagagcccaggcttgctttgagatgtctcattttcaattgatttcttctgtctaaactggaaaatcgccctaggtggaaagactggtgctgcttcagcattgctacccgattcttcttgaatctttcgtttctgcccaccgcaaatacagaagaatacaaaccaaacatctggttagagtagtgagatttacaaagggagaaacgaagaattgaattcctccaaacaagaaggcctattatccaactctaaaagttagcatttacttaatggatttatagtttataaaaagatcacaagctataaatttcagacaagcagacatcgaacaagtaagatagagtacttctgaatttacaatattagaaagtgtgagcaccttttccattcgtgcatctatctcggtcatggcacgagacttctctattttagatagataaaagtctttctccctctttgcagcagaaagaaccatatttaatttctgttcccgtattgcacttttgtatgctgcacaaagcaatccctttgtagattagagatcatatcatagaaaattgtcaagaatttcagcagagatattgtgcggttaacaataccgatttcttcagtaagatcatcccatttaaatttggtcaagtatttgatgttccaaatatcatagtatactgatgacttctttttcccccctgaggaaagaaaacagcaaacattaacaatcatataagcttatagatttaacctgtcgactatgcatactgatatgattcattaggaataccgatttgttctccatttagcatatctgcaacccgtttagctacgctcttcttagcaaactccacccacctgcagttaatgaacagaataatatatcgaaaactattattaaaagaatccaaattatcaatgtggagaagtgttttgaacacaacaaacagacaagggaaaagccaataactagcgggggaaacacatatccttaagcgtacccttcagaaaacctttggccacgaaatccaccagcccgcttacggtgcacttgtgcttcagaatctgaatagcaatagacaaatgtatcagctaacttttcaatacagaaacacattaatatgaccaagatgtgcttttgacattaaacgaggactcgataggataaaaaacctcaccttcaggtgcaagataaatccttccgagttctccatattgagcgagaatatggcgaagtctaacgtgatccatgtgtggtgggatacgacttaagtagcaaacacctctattgtcagctttcgaagcttccttaagcaatttctctttcaacttctttttctttctatcagccttttgactcttcatcgtttccttggactccttctcctcggatattccatccgtaagctcgtgagattcctcactctgcatcttcttcagcagctgctgaatccatcacagaaaacaatttttcaactgactaatgaacaaaagtctgaacttttatcatatctacaaaagttctagctacattgaaattataggactaacaccaacaattgcataaacgtgtggacttgcaattcgtaacttgcagatgaaagggacccttaaaccctagacacacgaatcaacaaatttcaattcctggacctccctttaatcgacgttttgcagatgaaagcgcactaaatttaatgaaaaaaaaaatgaatcttcataaaaatctctacttttttgtcttcgtttctgaaggaaaacaggaaactttaccgaaagtgagaaagaaaaagaagctagtgccgtcggcgaacaactagtactctccgttcggaagaagaagaagacggtggtgtgtaaaacttcgttcgcttgtttagggttaaataaatccggttcttgtaacgataatgtacaaaaccggtattcttggtatccggttatcgttatttcggttaatcaggtcaaatcacattcgggttatcgacttatgagtagtctacagaacctgaattctgaactttgttgctgaaatgtttttgtaaaacgatattgtaatgttttgattagtgttagagaggctaattctatgcaactggcccaactctcgtattaaaagtttggagatgttacttattagtgaaaaagtgagaatgttttagatcttttagtcaaaactctttacaatccaaccaacatgtatatatatatatatatatatatatatatatatatataaagaagagaagctaaggtgcagagaaggaactggaggtcatataggatcaaaaacctttgcagtctattcggattcggaatcgattgtggacaaatcagtagtttcgggtttagtcttcttgccaaaaatatggcataaaacccaatcagtattcgctactgtttgtgggaggctaatttcatccatgaaccaattatactttaaagcttcttcatcatcagataaacaaatattatcagattcttcttcttcttgcgcaataagagtaaaccgacgcttaataccaactaatgcatcattattctttggatctagcacattggtttcttctccgattggtgtccagagattatgagagttactagtaacttggttgtcacgttttctgcaaaaatagtaccaatgttcttcacttggataacctgaaagaaggaaacaaagaaaattcagttggctctttcacaggatgattaaagatggacattgtctttataaaagtttagatccacgaattctcaccaggcagatcatgcggatgtcttgagaagatatcatgacactcttcaggtatcgtacgagctttcatgggttgtcctaaagcttttttcttcaaaaaatagtttgaaatctcacagtttgtagaacgaaacctgaatcctacgggcaaagctctgtgtgttggctccattcttagcaaaaaaaagaaaagaagaaggtgaaattgtgattgaagcaaactgaaactagaattctaaaagcttgtttattgatcgaggatgaataaaagttgctatggtgagctacctatttatagatcccattaataaaaagtagtcctttttgtttaataattagtagcttaaaattagagtaagtaaacgtttttttaattttatttttttaataagatacataaagttttgttttatttatcttatttataatttcttttttaaatagcttttttagttatcttatttataatttttaatttgtaatttcacacaattattttttatagttttaaaattaatagaaggaaattttctttttacaaatgtcaaaatctaagatcaatagatttgacacatgtcacaatcttatgagttactaactttgaaaacaatattttatatgaaaataaaagatagttatgaaatgaaaatttttaatactttttcccccataaaaagacttgattacattaagaataaaagatcagtaataactaataactatttagtacttcaacaaattgaaaaagtagttagtcaaataaataaagattgattttctatcttcaaaaatcaattaagaaaaggaaaaggaacaaattatattgaataaaagatattgattgtattgtagtaaggaaatataaattgcaaataactttctgttttgagaagtgattcatttaatgggggcagaattaatttcttaaagagggcagtccattaaaatattaaaaattagaaattttgggggtggcactgttgcgtgcttataaactaaacaaatgtttagaggaggaaatgaagaagaagaagacaccggtgttttatatttgtatgtgttagtttaaaacggtaagaaaatgttggacaaattgtgtataaatgttttatatgatcaaggcatcaaaagcaataaagacagggagaattatctctggttttgaaaaacaatgccgatagcaactaatgaaattttagcaaaaaaactaatgaaatcttctctctgttttctttctgataacaaaactcataaaggcacaaaagctagatcagttagttttctttttgtttttggtgtttgaaaacaaaaaccaaaatgacaaagtatgagcagattgagatcagttagtttaatgttttatcattccttctgtgtcaaagaagccttcaaacaaaccataattgttgaattcttcatctccatccagtgaatgtggtttagtgaattcagccaagaaatcttcaaaatcgtctgggatcatcactggttgctgttgaaagctgatcaactcagaaaagttatcaggaaaaggctgcggctgatgatgttctggaagtaaacaatactgcggttgatacacaatatcatgaggctgttgcagctgcaattggtctggttgattcaaatccagctgctcaacgtcttcttctttcttcagcttctcattctctgcttcctcagctttcttcttctttgctgccgctggagtcagataaatcttgcacaaagcatgatccacctatacacaccaaccaaaacaaaacacaataaatccaaaagtcacgaatcctaataacttggaatccaagtaaagacacttaccctcaccttctcgttgttgttatcatcagaagactcaaaccagtactcttgcattaaccaatcccctttgacactatttgattgtttcccaacatagtactctagtgaagtcttgtagccgactatgccatttccagcgttgatcttttgggcagctacagttgcgctccaatatcctccattgtcgacacgtttattacttcttccagccttaccggtcttggtcctctccgatatatagaaccaatctttatcattacccttctcatatttctctgtattgaattcaaaagaacagagccatttatatacataaaccacgattagagaataaagaacagagccattgacggagacaaacctgaaagatgttgtggatttgactcgtagatgttcacacgatggataggaacattgagcaatgagcatttattgccttgcgaaaagggtttcaagtaatgaaagatgagttcttggtcctttggtacaaatctataacctggcgggaaagcaaactgtttcgtcgaccaagaaaagaaattatcagcggcagaagaagacgaagaagaaggaacgtcggagttgtgtggtagttccggcggttgtgttagccgttccggcgaggatcttgctttgcgcttgtttctttgtggaatcgccatcggagctggttcacgttaaagatttcaaatcttagtcgatggctgttaaacaatatgataagcatgtttaacctccgatctaaattgaattattaaattttattaacaacataataaatggtcatgaatatactttacgaagaagcatgatatacacagtcatatatagatagttacatacagatcctgaatatatagtagtagtctaaactaaagttacaacaatgatttttgtactagtaatataaatcttgactgatttaagtgcagtcgattttgctgtcttagttgtgagagacgctttggttttaagttagactcctcaaaaccaagctctcttcttccttcagtaataaagatttatagtttttcataaagaatcaatttcttttctgtaggtgaaattataagtttttgtgggttaactatacttttcatttttttcttattcatgaaaaagtataaaatatggttgtttttctctcttccaaatcaagaattcgttcaaacagaaaaaaaacttattctttttcttttttctaaattttagaaaagctaattctctgaaatcgtttattttggtttacaaatgttggaaaaacttaagttggttcagagtatttacagaagcaaattaattgttaaattgttaaaaaggttttaaaataggtgatcaaataaacttttaaaaaccaaaaaattaaccgtaaatcgcaataatttattttttaaaaaacttcattatgctttctttcataacgatccaaacaaaatagaatgggaaaactacaagactggtctataaccacttgtctcttccttttctttttgcatgcatcacaaacccattgcaccagccaatcacatgttagaaaccgtctataccgatcaaagcgagggattggttcgtcaatagacacaagccacttaaatgcgattcgtcgtttaagcgtgtctttgtcgctccaaaacataagcggtgttaaccaacaagagcaaaaggaaagagatctaattgagaatcttcccggacagccttcagttaattttaagcaatatggcggttatgtgaccgtgaatgagtcagcaggtcgatccttgtactattatttcgtggaagccaccaataccaaaaactcatcaccccttgttctatggctaaacggaggtatgtatctactaccatgtctctagttctataaaatgttttgcttttttcgttttcctattcattgagaaaacagacaagctaactcacaaaattgatgaattatattttgtccattaaacataaacattatataagtatgttttaaaaatgcaggaccgggctgctcctctctgtatggggcatttcaagagcttggtccattccgcgtacatagcgacaacaaaacactctataccaatccttattcatggaacaacggtacaaaccttcttctaatagaatgtttagtttatcttcttttttggataatacttcttttgcttctctatatacgggtttttagctaaaagcccgtttctgcttattcacattggcagtggcgaacatgttattcttagaatctccggcaggaacgggattctcatacacgaacacaacaacggatatggagaatcccggggacatgaaaacagcagctgataactacgttttcttggtgaaatggctggagaggtttccggaatataaaggaagagatttttacatcgctggtgagagttacgccggtcactatgttcagtggagacacggatgcggtgatttcggtgacagttacaatgtacgcactgaagatgatgaatctaacggctgttacggaatggcttccgtggtttagtgaaggacaggtgggaggtttcacagaggaatacagagggaattttaggtttgccacagtgagaggagctggtcatgaagttcctctttacaaacctaaggctgctcttactctgtttaaacattttatcctcaactctcctctccctcttaccccttcatgatctatacactttgtaacaacaccaatcacactcttttgttcacaatctagctaaaagttcattttaatgttcaatataacatattcactacccaactaggaccctctggctaataattttaatgctctctatcactggtactcagcttcggttcttctcttcaagtgttgcaccaaagaatgctctcaagtctctgctatttctggggtttggattcttctttttctttggttgattttcgtgtctctgttatattcttgttccagaccataagcacgacctctgccaatcacaaaacagtgttcaaacattataaaatcaaggtaaaccatttgtcagactagatatatgactccacaatatcaatcacagccactgatggattgagatactatggggaaaaccgataacattgacaaggtaaaaagttagatatgattcacaagcattaatcagacccaacagcttccaacagcagccaaaaaacataagttgggatttccacactaaaagatagctacagaagccaaatgtattagcaatgtgatacctgtgtcaatgattgtctcatctcttctctctctcacttttccttttaaggaatcttgtggtaaaaattctgcaaaagaagatggagatcatattaacaaagaatcagaaaaatagaacaaatagaaaatattgtggaaacctcgtattatcagctaacgtacttaacaaaacaccaagagactataacacgtgaataactatcatttcgcctaaggcacacgaatcttacaccaaaacagtaaaacaagcaaaagtcaaaccttttaagctgaccaagaacagtttttttcaccagtagtcgttgcaagaacaaataccatctgcaaagtgatgaaatcgaactctatcccttacaataatttcccgattgaatgcttttgatacatattttgtaaacgaatgacaatctctgcaaactctcagattctttgtgattcggagagttgttcctgcagtagttcgcattaatccatatgcaatagccaatttttcactatgagatgtatctgcagatcctaaacaccgatcagagagagtaggagcagttctgtttgagtcctctggcttgtatccagctagaatggcacggttgattacttccccgagttctgagtaaataactgcagactccggatgcattttgtcatcaacgacaaatttgtgaacttgatcaccaatctcaatccaactccatcctggaactgtctgtaaatcatggcttcttattagttttctcatactagcaaaagcttgcgcatcattcgctgcagaatatatcgaagtcataagcacatagtcccctgcattgaaagcctcaagctgcaccaatttcttcatggctacttctcctaattccaaattcctgtggattttgcaagagccaagcagggttctccacaagacgggatcctcatggcaggaagacgcatatatcatctcgagggagttttctagctgacctgctcgtccatagagatccaccatgcatccatagtgtttgacgttcggagtcaaatggaactgtgaactcatgatttcaaaatgctcaactccttctttaactagaccttgatgactacaacctaacaacaatccaaggaatgtgatggcattgggtctaaccccggaagccaccatctttctgaagaacgagatggcctctacgccatgcccgtgaactccatacccaataatcattgagttccaggtcaacacatctctttttcgcatcccgttaaacacaccaatagcattttcaaggctaccacattttgcatacatatcaataagagcattactcacaaagacacaactctcacatcgaatatcacaggctatcctgtgtagcataactcccatattcaaagcactaacgtgagcacaagaagataacaaagcaacgagcgtgtaagagtcaccacacacaccttcatttcccattcgcttgtacatactcaacgcttgattatgtaaaccaacatgagaaaagcaacagatcataacgttccaagaaaccaagtctctaacaggcatttcgtcgaacactttagatgcaatctcaacacttccattcgcagagtaacaacgaacgagactagtggcaacaatagcgtcatcaagaaacccagatcgaataaccgaaccgtgaatctccaaacatttcggaatcgatttaatcctctcacatgatttgagagcgaaattgaaagtgaagagatcaggacgtgaaacagaggagagaagcattcggttatagaagagaatcgaatttagaggagaagaagaattggagaagccacgaataaggtagttccaatccgatgttgatggatcggaatcgaaatggtcgaagagaagttgagcgtgagataaagaaccagtgacggagacggcgcagaagcggaggaggtggttgaagatggaaggatgatgttggagaccattgatgatgacatgagaatggatcttacggagcttcttcatactgttgcatccttgtagcattctcactatcactctcgctttttcgcacatcgtctctctctcccgccaaaagaacgaccaatttgaatttgctaataaatcatatgagtaatatttaggttaatatttgtgattttactaggttggtttttttttccctttcttttcaatagatttaaaatttattcaaccaaaaagcatgtgtacaatgaatgtttcgttaggttaatttttgttagaagatgttaattaggaaaatattgaaggtgttcacaaaattttcttggtcaaaactgattggttaatgcttgaatactctcttgatcactcttctcacaacaacaaggtaactatgtgtttcttgtttcacaaaaacccgtagattaatgaaattagttttgaaatatattgatgagatatattttgcagaataacaaaataaatattatattaacaatctctatatatacctatatatatatatttaataaacaaaataatgtttttaacaaattttaatatattatgagtaatatattatgagtaatatttgatactataaaatgtaagatttattaaaatttattttaaaaaatgtgaaaatgtttttttgtattattaatgatataatttttgtgtaaacaattatattttttcttttaaaattgctaatatttataaactgctttgtatggctaactcaaacttatctctttaactaaagcttgactacaaatatgaattttatcgctacattgtttgctacttaggttgaaagtgttgctctcaaaactcaaaagcatgtgagaggctatgttcgatttcaaaatcttcacgttcagttttgctcaaagtaagtatcttgagaacattcgcgaaaagacattaaccgaagtgagtactagtgacatagagcttctccgacgaaattcacagcctttccggcgagctacaccatgctcactcacagtcgaccttcaggcaaactctttcacaccaaaggtctttttcctatctagttgttatcaatggctctatttaaactttgtctaacattttcttttaatcaacactatttcaattttaacatgaaaacggtatatttttttcaaaaacagatttatttcacatttaatgtaatcaacgtttatttctttgttaacttgtgttgtttggagtaattcacattcttgcttacattattccacaattttaacgtttgttagctaaacatgaaacttattcttttccaaatctcaatctcaatttgatattcagcaaatcttatattatccgaaccccatattatctcaaattcgataaatttataaatcattttatatatacaccgtcttattacattcttataaataagagacaataactaacgtaactaactgaatatctcttacgaaacttacgcaaaaatctcttacgaaacttaatcccatattatctcaaattttataaatcattttatatatacaccgtcttattacattcttataaataagagacaattactaactaactgaatatctcttacgaaacttactccttgttttttgtcaaagctccaaagttacttgatgatgatgcctggaagaaacaagcgcaaagaaagatcctggccggaaccgcaaacgcaaccacagtcagagattccttcttcttcgtcttctttggcagctgataacatgtctcctccgtcgacgatagcttacgtattaccgccaggttttaagtttatgccaaacgataaagaagtcatcaattgttacttgaaaccttactcggacggcaacaccaacgtattgctcaatgttcctattcatcgcgtcaatatctacgagtcgaatccacagacactttcaggttaactttgtctccgtccatatgtattgtttacttagttgaattctttagtttattaagtgattaacatatatctatatatatatatttttgaaacagaggaattccagaagggtaacgataaagaatggtttattataacggagaggaacaaagttgatcaaggtttaagccaaacaaagagagttggtaatggtgcgaaaaggcagaaacgtggcgacactgacggaggatattggcacgcaaaagtggctgcccaaaagatttaaagctggagatggtgtcgttggcaacaaaaggccacttgcatactacgttgggaaaccatcagaaggcgtcaaaactgattggttaatgcaagaatactctcttgatcactcttctcacaacacgacaaggtaagaagtgtttcttggttcccaagttatttaggtttttaagttttttggattctgttttgagtcttgttttgagtcttcttcttgtttctgttggtgcgtcatgaatccattttgtgtgttcttctgtcaatgatcacgttacaaaatcatgaaacaggtttatggtggaaaacataaataaaacacaaaaaaacataaataaaagagtaaataaacataaaataaaatgcttaccattgtaattcttaatcaaaaattacaatggtagcattttatttatttttgatggaaaaataaaacacacaaaattcaaatcaaactccatagataggttgagatcaactgcatttattttctttcttttattccttccttcacgatgttttctagtaaaccggtattgttcgacactcttgaaaatgaatcagaaataaaagagtaatcgatggtggaatcaccaaaactctgcgtttttggttgtggcgaggatagaaaattgccgagagttcatcaaatggagtgaacgaggaagattttgttgtcgtttcttctcctgcacccgaacatgatgttgttttggctgagtattcatttatctttgttataattaatgattacaaagtttttattattattggtttgtttatagcacatactttagtctattctatatataaatgtatgaaatggtaatgtattgaagatcaaagtcttacttgatatttttgtttttggaaatttatacactaaacattaggctttttcctttaattcaaagttggatgtaaaactctttaacactgttggatgtaaaactctttaatactttttaaaagaagagttttctgcaaaataaccctccaaatcaatctcgtttgcaagttaccctccaagtccgaattatgcaagtcaaccccacctactctaaatcacctgcaatacaaccctcccgtatatcgatgacgtggcagtcgataactccgtttgaatacataaggattttgtgcaaaaaaccctcaatataatttttttttgcaagataaacctccatgtcaaataaatacagattaaaccacaatctgaaaaatctcctacaatgacgtgagagtcgataacttctaacataactaagggttgaggctataagtgtctacattgatatcaaggggtgtttattctgaataatcggatccgaattcaaatcgaattatatattaatatggtatgaatacattcacctttttctttatccaaaattttgaatttaaattcaaaccaaacaaaaaaaatcaaagttttattaatattttaggattaaataccaaactctgaatttgagtactaaactgtttatcccaatgataaatgttttgttttagatactattttacgtatcaaaagttttttttcttttcgtcacgtatcagaagattcaaaactaaaccaaaattcggattgaacactcttaaatttgtatgcatattatcgctaaactcattacaaaaatgaaatggagtatttgtatgtgatgcatagattactagtttgataatgtttaaaagggaagatacaaaacatataaataatttccccgtaattaaagtgtggcaattagaagctgttatccaaattacttcaggtttatttaattttcagatggaagggtattttcgtcaatactcttcgtatgttactgaacatcataaaccctttattcatttatcgccgtcgttgtctctctcaccggacgttgttttgtttccctccggcgatttcatcggagaccttcactcatggccacaaggttctctctcgctctatagtcaatgaatagaacctttaattttaccttgtttaatttctcgtctctcgcattgttagtaggagattaagagcattcaagagatggatgcaagctaacggcgttgattgcagcgaagctctcaacctcgtcgacgacgaaaacgatggtgtctctgtgagagcattctgcgatttgaaggaaggagatgttgttgccaatatctcaaaaactgcttgtctcactatcaaaaccagtggagctcgtgagatgatcgaatctgctgatttagatggaagtttaggtctctctgtggctctcatgtacgagagaagcttaggtgaagaatctccttgggctggttatcttcagattcttcctattcaagaagatttgcctcttgtttggtctcttgaagacttagattctctcttatctggaactgagcttcataaggtttcctttccaaattttgatttaccattgcattgtagttgaattcactactcatcagtttgaattttttgtaggcagttggtgaaggaagatcatgttcttatatatgaggattggaaagaaaacattttgccgcttacctcttcactgcctcagaatgttgattctgattcgtttggaatcaaagagtatcttgctgctaagagtttaattgcttcacggtctttcgaaatcgatgattaccatggatccgggatggttcctcttgcagacctgtaagtttacctcacatttgtcttcatagggcttgttaagctaaatatgtatcaaccaaagaaagttgttagaattgaggtttaataccttagaaatgctttcctgtatcagctgtttttactccctaagctttgcattaaccatagacttatatagttagttacttagtttatggtcatatagatgttttccttatttctctgttcacttcccagacttgtgagtttttattgcatcttgtatatcggccaatttgcctagttgttggaccaacatttgcttgtttatgttgtcctcaagagatttccgctgtgtagattttaaggtctcgttaggttcaatcactttgataagaccgagtatgttcccagtcctgtcagtgattgcagataatctatacagttagcaatcaatgtgctgatttttttcacagccttcttctggattgcagcatcttattggttatttacttggatctgtgcttttccgttttgattttttttttcatgtggaaaaaatgatccttagaagtcggtttcgatgaactaaatgtgattctagcatgctaggtgaatttcctgacaaatgcttgatgatttactcattgtccactcttcttagtattgcctgtttatttcattttgcagctttaatcataaaactggggcagaagacgttcacttcactcatgaatccgattctgaagctgatgaatctgacaacgatgatgctgcaaatgagaccactgatgaagacgagccttccagtaaaatttcttcctcgcctgagcagtcttttgaggaagttcctggtgaaaacactgatgacgaagccaaagaagaagaagaagaagaagaagaagaagaagaaggagaagaagaagaagaaggagaagaggaagaagaaaactcttcaatgctgcaaaatgatcaatccggtctaaaaatgattatggtgaaggatgtctcagctggagctgaggtatgtatgatttttcatttggttttcaagttagaattatatgtcatttgcattgatgccatgattttctgtgtaggtattcaatacatacggtttgatgggtaatgctgcattactccacaggtacggatttacagagctcgataatccatatgacatagtaaacatagatctagaattagtaaccgaatggagcacatcctcattcacaagccggtacactcgagctagactggccttgtggagaaaactaggttacacaggatgcgagagtcaaaactcagaatactttgaggtatcttcaaccggagaaccccaaaccgagctcctgatcctactctatatactgctcttaccagacgacacatacaataaactggatctagctgaatcaacaacaggagcttctccctcgaaagaaggaaaaagatcttcttcttacgagataacaattgggaaacacaagtttgtgtatggagaaagcggaaatgatattcttctgacagatggtgtttgtgaagctcttctaactattgtggataagcgagagagtttatatggatcattgagctcattggaagatgacattgttagggtgaagacttgttgtcttccgagagacaggagactatatcattcgcttgtgttgcgtgtgagtgagaggaagattctaaagaagcttaggagctacatccatacccagaccaatgagtcttccagcggaaagcgccggaagaagatggttccaaaatcctagcaacatctttagtttgcttgttgaattttcacttttcatccccaagttaccatttttaaacgacttgttctactaacattgagtttcatctataatggtgatcgaatcttagcagatttgatcgattcttttttgttctatttatagaaattcttgaggtttaaaaataaaagaaagaaaggattttatatcgtgagtagtatattgagtaatcttcagacggaagcaaagaaagcgtgacaaaaagccggcgactgtcagacaggtagaactgtaaatatggagaaagatggggttactttaacaaaggtagacacgtggcacgtgggaattaaaggatattacagactttacacagaattacacagagataagacaagttcttttttaagcttttttttttttaacagtcaaaaagactcaatagagtgtaacggagagattcttctaccagagttgctctcttttggttcgttttcttcctccaaaatccaatcttaccacagtttctttagggtttcttcttcgtcttcctttggatctatgtgaacaggtatgtaactgattgagctgctctttctgattaaccaagtaaattgttctcttgaatcttatcattttattttgtttcatttttcttgttggatttagatccttggatcaaatttgctcaaatgttgtggtaaagtctgtgcctttgattgtatttcggatattttctgtgtgttttactctgatattgattaggatttgtgtatttcgtattttttttttccattgaagcgttttctgtgatctggtttttgatcgatcttattcctcttgattaaccgaacgaaagatgttttgatttctgtagatctcttgcattgtactttcttcattgttcttaattcgattttctctccattgctggatcgcctgatggctcatttagagtttttttttctagctcaaatgtggttgaactatagagtttctgagttcattatttggtcattttttaattgagttggcttgattaaagaagaatttatttgttaatcagctagattagatttgaagattgtagtagattagtatgatgtgaatgttctaatctgggaataaagggtctagtgttgagggaaacatgagatttttcataattgggtgaaatatgtgttgtaaagtttggtcttttatttgcttaattatgacttgtggttccattgactcttgtagtatgaactaagctctgaggtaagcttgggaagtagggatatggccaaaatctctttggtttaccaacttagcaaaaaagttagcaggagttggtgatcagttctcctaccggcttttgcaggctaataactaatacctgactgtaaaatcttccaaggtttcaaccacacagggaccttgtttctcttgttattgtaaaggatgtcaagtattcggaatactcattggtgtcacagatgtcaacgtgctgtttggcttcgagctcgagatgctgtctgttcatattgtggaggagggtttgttgaggaaatcgatataggaccgagtagagctcacagggatgttgagcgtgatccaacctttgatctcatggaagctttctcagcctttatgagaagccgtttagctgaaagaagctatgaccgagaaatcagcggaagacttggctctgcgggttctgaaagcttttcaaacttggctcctctattgatctttggtggccaagctccctttcgattggctggtggtgataatagttcagttgaagcctttgtcaatggcgcagcacctggaattggtatcgcacgtggcaccaatgccggagactatttttttggacccggtcttgaagaactgattgaacagctttcctcaggcactcatcaccgaggcccaccaccagcaccgaaatcatcaattgatgcattgccaaccatcaagatcacacagaagcatctcaagtcatcagactctcactgcccggtttgcaaagacgagttcgaactgaaatcagaagcaaaacagatgccgtgtcaccatatctatcattctgactgcattgtcccgtggctggttcagcataactcatgcccagtctgtcgtaaagagttgccatccagaggatcttcttcaagcacacagagtagtcagaacagaagcaccaatggaagagaaaacagcagaagaaggaacattttctctaacctctggccattccgctcgtctagctcaagctcgactcaaaaccgcagagacacaaacaacacagcaactgcagaagaaggccactatcatcatcaccagcagcaacagcaacaacatcaacatcaacatcaacaacaacaatcccatatgggttacagtggatggccttttgactattaaaggttaatctaactcttgactctttttaagccttctgtttcactttggttctgtgtattttgtttgtgttttgtcatgtctctctttcccttactttgttcattgtttattgtagatcttctgtttctctggtttatcaactttatgtttttattttgaattgtgtatctcacacatgttagcttgttattgaatttgcattgaataaattattgttttagactaatgtatgatttcgtctggcgctaaccaaacttcgatctgtcttttttaattattatatagtcatatgtcatccttcgtttacgtttgttttacttgcacatttcgtaagcaaaaaaagctgctagaccagaacctgagaactatgatgtgctaacaaaaaagcttgactattctagaagaatctcgacctcatttataaatattattagattttgtcatacaagtttaaagaggaaagtgatagttagataaccaaattgcgttagctcactcaatggtgtaccatcaattttgtttatatgcgaatgatataataatcttactgaacttatcttgagcccatacgaatatgcttaaccccacaaatagtagattcccatttatttgatggaataagcagcgaatagcattaattaggcacatcacacaagtcacaaggtgtaggaagaaactagggatgataaatatcgtaaaacaagaagctccgaatacatgtcaccgacgaagatgaagctttaaaaagacccacaagaaatctgccgtagaggggaaagtgacaaaagtgtttgacctataaatcttctttgtctcttccgtgatccaagtttcacaactacttgacttctcaacaagttattagtactaccaattctacacaacacaaataccccatcatcattcaataatatttaatatcttgatatctgtcttctcaattagagtagcactgaaatagtggatttattaagtttacatatagttttcacccataaatgtgatgttctctataatttttcattatcccattaaatcctttcgtaattattatttttataaccattttctaaaaaggagcatcttttggacatttttcctcaataatcttcctttttttcattaaaaatgtggtatcttgcataatgacaataagtataaataataataaaattttcgaaatttcaaactgacacgagctcacacccactagtgcaactgctctgtacatatagtaaacaaatgttaaatgtagaagaagaaaaaaagaccaagatataccctttgtcacaaattagaaaaagaaagaaagaggatccttattgtcatttgcagagaaagctacttcactcctttctcttccttcgtctctccgtctccctcagccctacattttctgtttccgtctacaagaaccactttgttgcttccttttcgagcatcgtcttcgtcttctacaaattttgtttgttgcttggttttgaagccggcctttgatgggtgcggcagaatctggaaccgatcggagaagcttagcttatggatttggagtttctctgtgaatgaatctctgtttgttatggggaagaataccgtcgaggagcagaatctccctgtgagcgacggagctgcttcggctaggaataacggaggtggaggaataagcacatgttgttgctgcgattggatctctagctactttagtctcagatgcgttttgattcttgctttttctgctgctgtgtttctctccgccttgttttggttacctccattcctcggatttgcagatccaggggatctagatctcgatccaaggtttaaaggtatatatcgcgttttctctctgatttgtgagttccttcatactctatatgattccgtcgaggctcacgcaaatctagcttcatgtgattcgtgaattcagatctagggtttgtgattcgctggtttttttgttcttcctggattttcacatgggaaaatgtaggcagaaactaattgaatgagctgtcacaaagcttggaattcttggaataaacatttgattaatatttaatggatttacaacttacaatttttgaggagatgatgtaggacatgtatattttccattgacttggacttagaaattgctatttgtagcgttttgtttataaggtttatatatgaattatgttgaaattttatgttgaaacctgtggagttcaggagtcaaataaggatgtgttttttttgttgagttcatgaactccatatttagtattcttaacacctttattgaatcaagactgcctaaaaggtaaaatttctaataatgttcagaatgttgtattaagcttagcttgctttagcatggaattgtatttctgtgcactgatcaatttccatttatgtctatttgttactgtacaatctattcttaaagctggttggtagaatcaattatgaatctagacctagttggtgcgtagtttagtgtgtgatatagctgtgcaaacacatttcctctagtgattctgatttggttaagacatctattgtagttgctgccacttgctttggcaggcaaggatgttttggtttgaattatgaaacttgttctctgcacttctgttgtttaatttctctttcatgttacaacttgcatgtgtttataatcacctgtatcattttctgtttattcccctgcccactggagcaacaatttttagttacctataacttgtgtcatgatttatctctatgtttcatgatggagcaataatggcgctttttggtttttgtttcttttgcagatcacagaatagtggcgagttttgatgttggaaaaccaatttcgttcatggaagacaatttgatgcagcttgagaatgatatcactgatgaaataagctttcccatgaccaaagtaactaagcaccctaatctcacttgcatgaatttcattgtttcctatgttgatcattccgtaacttctgtttcttttcttgagccaggttgtggtattagcgcttgaacgcttgggtgatcttaacagaacaatggttatttttgccattgatcctgagaaggagaattctaagatacctgccgaaatagagagtctgatcaaggcagcttttgaaactctggtccaaaagcagttgtctttccgtttgactgaatccttgtttggggaaccattctttttcgaggtgctaaaattccctggaggaatcactgtgatccctccccagcctatatttcccctgcagaaggcccaacttcttttcaacttcacattaaacttttcgatttaccaaattcaatcaaactttgaggaactcgctagccagctgaagaagggcataaatctggcttcctatgaggtatgacacttgtattcgcaagatcagtctattgcaatcgattcagaatcttaaaattctctcctgttggattgcagaacttgtacataaccttgtcaaattccagaggttcaacagtggcgcctcctactatagttcattcttctgttctactcacattcggttcatcttcgaggttgaagcaacttgctcaaactatcactagctcccattccaaaaatctcggcctaaaccataccgtatttggtaaggttaagcaagtccgtctttcctcaatcttgccacattcacctgccacatcatcaaccccttccccttctcctcaacctgaaacccaccaatacccccatcatcatcctcatcatcatcaccaccatcatgaacttgctccagaaccttcactctcacctccaactaaaggctttgcacctgcatcagcgccaaccaaacactcacctttacccccgagaaacccgccttgcccttacgagcagaggagaccaaaaggaaacagtgctctaaaccatcatactgcaccaccaacgcctgcaccacaccggtctcagccacacccaccagcaccaaacccagccccgccacgtcatcatgccataccagtatctagcccacttccccacgttgtatttgctcatatcccacctccatcaaaaagcagcccagaatcagaacctacaggcgaaaaatctccctcacctgctccaaccccatgtaagtcttcttctctaactcagttctcaagatctgcatcactgaactaaaaacatctgaaaacatgaagcagcttctgcgagcattggtccaaccttcaaaaaggcatcatcacagctccttgtagtagtagtagccgtcataatcatctgtctgtaaaacaaaaaacaaaaaaaaaacgccggaagaagctgctttttaagtccaagctggaaaaatcagcagcagttcacaaaagcacaacttctccgggtcacaacatcaatcaaggtaattgtataaaggaacacaaggaacaaaaaatgtatgtatgaaaaaatgaagagagtttttttttgtaaaagagttgttgaggtttgcagcacaaaagtgtgtcttgcaccttacatccgagaaaaaaagaaaaaacatatatataaacaaaaaaaaaaatttctgttttaatttttgtatataaagtaatcttgttttaaccaatttgtgtgttttctgctcgaagatctctttctagggttttcataatgaatattttatgtatggatcaaaatcatgatacatcttctacgttattattagttaatttagtattaaaattagaacaaatgattattctttaagtgtctcgtagagcatccattaacgtctctaagagttgagattctgctaaaactaaaactgtatgacaacaacagttgcattatttagtaataaagagagttttatgtctattattagcaaatttcattatggtttctctcctacaaaagcgggagaatcagaaaacgtagataagaacaaacatttatagcaccttataaatttggaggaaagagaacagaaaaacagagagaaaaaaacctaaatttgaaaagacaaaaaaaaaaaaaaaagagaaagaagaagaagcttgggacaggggagtcccagaaagaaaaaaagttttttttttccggtgacagtgtcggttctctgacgctcccatttttgttcaatctttcttccttctttccctgaatgccttcactcgtattctggtaatttcggtaatttcatatcaactgcgtcgaatagtctaagatttttccagatttgatgccttgttcttcaagcaattgctcttaattcttagggtttactgattgttttgtgtgaatgtttatgacaatattgttttgaatttgcagaaacttgcggctatttacaattgcaggagtgtgaatgattataaggtctcccattcgtgttccataggcttacacacatgttttgatcaacaatttcttgtgttcatgaactagatattgcaggtagtaatggattcaaagaacaccatcttatctccgagtatcatcaatccgctttgcttgctgtcctggaggtgatttgtcttttagatgattgacgaattcatcgaagaagagttgccaccattaatctgatcagccaaaaaaaaggtttggcatgaactgtatggccgtcgctctcgatccactaaccgaccggttttcgcagtttagccgatcttcacagagatgtagactccaatctttaaccaaccttgacttcaactttctcggattcaacactaaacaaaccaatctctctgcttcctcacactccttgaacaaccgaagcgtttctactccatgcttctccatatccggtagtaatctagatggctctgctactccgcacattgagattctcggtggtcaaagagtccccactgtacgttcccttgtagctgaagtaaccatagctatcgtttctggagctcagcctctgcttttaccaagtggtttaggaggtgcatatctcttgcaaaccgaaaaaggtaacaacattgcggttgcaaaaccagtcgatgaagagcctttagctttcaacaatcctaaaggatctggcggtttaacactcgggcaaccaggcatgaaacggtctatccgcgttggtgaaagcggaatccgtgaattggctgcttaccttttagaccaccaaggcttttccagtgttccaccaaccgcattggtcagaatctctcatgttccgttccatgacagaggtagtgatcacgccgcctataaagttgcctctttgcaacgatttgtgggtcatgattttgatgcaggagagcttggaccaggaagcttcacggttgtatcggtccataggattggtatacttgatgtgagagtcttgaaccttgacagacacgccggaaacatgttggtgaagaagatacatgaccaagatgagactacttgttctaacggagttggagctgcagagcttgtgcctatagatcatggtctttgcctacctgaatgcctcgatgatccttatttcgaatggcttaactggcctcaagcttcggtgccattcaccgacattgagcttcagtatatatcaaacttggaccctttcaaagacgcagagcttttgagaacagaactagactctatacaggaatcttccctacgggttcttatcgtctgcacgatattcttgaaagaagctgctgctgcagggcttagtcttgcagagataggagagaagatgactcgggacatatgcagaggggaagagagttctagtgtgttggagattctttgcaacaaagcaaaagcaagcgcggttagtggaagtgacgatgatgatgattatagtagtgaatggaatgaagtagaagcagagctagagtgtggaatttttcagtttgacgatgaagttgaatgcaaagagcttccagatatgttacaagtgcctatattcacaagagttccatccattgctgccaatctatctgctctcatgcggtgtccaccaaaccagtggattagtacatatgacactaacatagaagaggaaaggagagatcggagtatcgtgaggagcaagagtcacccgatatgtgtgaattatgatgagaaagaaggtgtttattttggggacatgagtggagatgaatgggagatgttcttgcatagtttccagatgcttttgccagaagcacttgaaggctcaacaagcaagggaccaaaaccaagatttggatcttcttgtaaattctaaggaaatttttaaaatactaatacaagacagagagagatgaaatctcgcaaggttaagatacatagaaagaaaatggaaaatgagacgagcaagctaaggccgtccaatccaaattacttgttagcttcttctttctatttttgtttattgtatgatgtatcacttcattgctattcgctaaaacactaagtatcataaatatctacaagaatatgattggtgtaactgatctcatgtgattatcttgttctatgtaagttcttgttgaaagctagtaaaattacagaacaaaccaaaagagattttacatgttatgaagatgactcttacaaaaagctgttgcacaagcctatatagagccaatcaagctctgacctggacactgtatgtcactagcagtaggaacacaagagtgactgtaatgtttatcgccacaatcacttaccggtttctaatctctttgatcacattgcagattctttgaatgtattaattcacacaataaccacaacaacctccaaaagatcaatgaaattgtttttaaactaattttcttgagactaagagagcaataccaaactgaaatgtgaggaagagcacttgattaatactcggagagcgagagaatacagaggaattgatttggttgcaataataacctctacttaaggcattaagctcctcgatttccattacaatgttcacatcagtgttcttgattattgcgacttgaatctttaaaataatcaaaccatctaatactcagcttgtcgagactcatatcaatgcgcagacacaagagcacattgtgttttccgggaaaacttttccccaactttatttcaattattaaaagtgtaagggactaagatcatttgatatagggggaaaaaaattgtataagaaaaatctaccaacataactcgaaagttttaatttggatttattttaaatctccatgcatgaaaaaaaaagaaaaacttaatattcaagatatagttaaaaccggaacacaaagttgcattatatatgtacttttctcgagagagtattgttttcgaacaccttcaaacttgggcaaaaacatttggattacatgattcgttacgattttaagacaagcacgtcccatgtgaaaaacttctagacaacatccatgatgttttagtctcatcggaccatgaatagtacagattgcatccgtgacatacatcgcacaccttgaagataacttagccatacatttgttaaccaagtggtctgattctggagactgagccaaaccggaggctgcagatgccaatgtagccatcgcgataattgtgaataaggctgcaaacatggatttggtgaccatagttgctttgagggccatgatgtatcttcttttgtaatgtgaatttgtttactttcttttttataatccagggagtatatgtatatgaaaattcttgtaacgattttagtatttactgaacaaaagtatgtttgagatattaattaaggaggagtttacttgcagttatgcaattgttttgcaaaacgcttacgtttatttcgtttttgtaccaagaagtaacacattcaaattttaatgggatagtgcaggcccatagtgtgacctaaagggtttgttttgttcatgcatgatccggattagatatgattctgatttctatcaatgcacacaaaaaagggcttaatttgtcaagactatctacaaatctaagtcaagttgattaattagcggattaaatggtcaaatatttgagcgcgattactaatctaaatggtcaaaggaatttggaacatttatttaataataataattacccttctaatgaagattataaaacaaaacctacaaagaaaataaaaagttggagcaatgatatagaacaaagaaaaagttgctcctctatctaaaattttgttaaaaaaaaaagacttgaaaagatctaattaaggtcgtgaacatctttttccacacacgagaggttacgagaaacccaccgccactttagctgttcctgcggattgcatttcaacgtctacttcctcatcgattcttggcatcatcgagagaaccttgatatcgcagcggttgcaacacttgacaatttctacaaacttctcctcaatgttctcttcttcatcgatatctccttcctttccccaaagaaccgtgcaaactcccaccactaaaattgccattccaagaaccctaaatttcggagttggatcaacaaaatatactagtttagaaacatgatgatgaatccagccatatgacctaatcagatcaaaatccactggttgcttacccgccaaggtttaaagtttggttgaggatgaggaagccaatgatggatccgattatgacaacaagaggattaaaagcagtaacaaagataacactcttttgcttcgtcatcattccttgaacgtagtacgctatgctcgacgacattatgccctataaaagtatatatattcacacatcagattataagtattatatggttccgtatataacataatttatataatcatgagaaggacaaaccgcataagcagaggcaagaaggttcatgtcaaagccaatgttccatgcagaaaggtttggctccatcacaaacgttaaggctgtggactgtaacgtgcccatgaaacacaccatcgtcgataatgaaaggtgagatgagtatctcttcaacgtagccgcctaaagaaatgatgaaacataattgtcctaattcgttagaagactcccttatttagatatagtactatcggatcactactattagatatgtatatattaatccgtagataaagatacttttagaaggggcttcacgagttaaagagatcagtcgatgtaaaatttaaatgatgtacctgaagaacgaaaaaggaagcccaagaaaatgaggcgatgaggaggaagacggtggctttgaggtagtcctcacctgccggcgacaaagcatggccggtgaggtgagatcggagaaaggtgattagaggaattttgaataaaatcatcaacatggctccaaccactatcactaatgtccccaccacttttgcttggaatcttacttttctcatctccaccttctccatcctttatttttttcaccaaaatataaaccacgcatcatcatcaacgtaccatattgtatgaattaacctattgtatttggctaccgcaatggataactaataataaagctatgcgttaaatttaggtacctgcaaattatggaaatgataaaggtcaaagctggaacgatatttgtgactgcgccggcaaaagttggtgaagtaagtttgagaccggcgtaatataaattttgatcgatcaaaggcctgtggtaaataattcataaagtattcatatactcatcaagtgcatgtttttgaaaaataattcaaattttaagaagactaacccgagaagagctagaacaaaaatctgcatgaatattggaaatgtcatcttcggcctcactttcctacaacaccattatcaagttatcaaatgtttgtatttgatgagaatcaatcgaacttttttaatatatatttctataaaatatgatacctctcggagagtagagcaaaaggtgcgatagcagccgtggcaaaggcattacggtaagccacaaggacgtaatggctcatgccgcggtctagcacaaccttcgtcacgaggttcatgccggcgtatccgaattgaagacaaaccattgcaaagtaaggcttggctgattctgacatctttaaccccatatcaaaagtttctctctttgttgtatgtatggaggatacacaattttatataagagaaaggagttaggaacagaggggcaacaccacttgtggaggcttgtgctcttcctacgaacaaattggtgagagaggttctttctatttatatagagcatcatattccggatcatgagttcgaatgagcttttgtttttttttcctgaaaataattaattactccatttatttctttcctttttagtgacgttggcatttttattttttcggcttacaccaaatcaacagcagaaaaatcagatcaaatcaggacaatacataacaccataactatatagtactagttgttaaatccatatcaattgtgtacatatacaaatttaattaacatttgtttcaatatatacatatgatcaaaagtcaaaattaaaccgacggaaatggaaataaaaatgcacacgtaaatgacgaacagtgaacacacaaattccaaaatcaattccaactctatcgttataagtgtgacgaatgatttggatttgtagggaaagcaaagaagaaagaaaaaacaagtggacggagtgacttacaagtggcagcagaaataaagtgggacctaggcttacgttgtttgtgggacccgcagatgaaataatgtctgtaatttgttgcaaaaactgcttaattacgagagtggatttgtttttgttggtgagtaaccatatccataggaatgtgatcctaattaaaatatttcctgtgaatgctgatgcaatacatagcaacagagaacccaataaattaaaaagatcagcaaatctcagagattaattattgcgatatgtttttcttatgaaaatatgttgcaagtgcttcattatttaataattaaaaaaaaatcaagttgggcatgatccattacctcctctagaatatgcattaatatcactttatgtgagactattggatacttcttgataaagttagggaagatttttgtgaaactcatcttcaaatctatttaatttaccagtaaatatatataaaaaaatccatttagacgtcatctatagataactgttccaaatgcttcgacatatatgatcgattcgaatatattctggctttttagatttgagattttatgcttccaaacccatggatcacatgcatataaatctgaactatattaattgacacacgaaatgaactgacccggtcccatgggaataaaacatgggtacatatatggagatgctaaattctcgattatataattgtgattatagatttgattaggaaaaaaattagatagacaataaggataaagtgggatgaagaatgtgggtgcgtttttggttaccaactagaaatggaaacaaagaggcaaacaattccaaatgggcatctaatcacattccagcatttgctaattcatctctctacccactcactttttggactcaagtttttcttgttaatggcttcgtggttgaatttaccacttacattatatatacaaccgactcttattccataattcataaaatgttaaacatgctcacatcgaaagtattcagtatgaactctcacataaaatgttaaacatgcttacattattattatttcttggattttttaacatgtattattcgaatttgaacagagtgtttgatacaacaacaaaactatcaaacaatatgctacatttcattgtcttctctttactttttttttcctttcattttaatgtatatcggaccttcttcatctataaaaacaagcctatatgatactgttctacataatccttgagcaaattttatacatcaaagagaaaatttatatagaacatgaagaatactcgagtacacttctttgtattaaaatattatgcagttctttacaatcaccctccataataatatgttgaaagaccatgctatctggagggtatgaaagaaggttcaaaactataaatccgatcctctgccatcaatgtgctttatgttccttctaatgtcgaggaacctggaaatagatactaatttgatttctatatattttaaacagaaaaaaaacatagttaaaaaaataaatcaaacctaaactgaactagactgtagactctattgggttgagtttctcttacttttctctgtgtcattctcctactttatattatttttatagaatttatcgtttatgttaacacgattttcccgtgtaaatttatataaattgaagatttaaaggcgtgcaaaagatatggataaaaaatgaagagaaacataaaataaagtttagattccaccggccaatactttggaattatgggatgtgaaaagcgaaatgggcctcttttgcttctgcagctctctttcgtttgtctcttcctccgctaaaagatatagtaacaatcgtataaattgattcattcaagtaaaggttcacaatgttgtacgttcacgttacagtttatattttgatgagaatttatatatgtgaacattgatcgtattggctaaaaagcctaaaatatatacaacccttttttccagcagctagaaaaatctttgtgccaaataataatcggcaacgtacagcgtgatatatatttgcatgctctcgtttgttacattcaaaccaaagtgaaagtaactgaaattaacaatccaattttgattgtttcggttttgttagagagtcaattctgtagtgaataataccaaataattattaggaaactgttcaaagtatcgtaacacaaactattgatgatttgatggtcaaagattaagctcaaataagatatatgcatatatatattgtttttcacgaaaaagctaaggaagtaaaagaaaacaagtatattaattagttttacaaaagtgttcaaaaagagaattgctttcataaataatgaagtttgactgattcatactaatacaatgcacgtagatcaatcatagataacatattcataagcatttatatcatcaaaagttttgatttctactttttccaagcaaagcaacaacggtgcacccttctttttctcgtcgtctttgctcttttctgtgacgaaaatattattattcttctttttcttttccttttttaaattggtaataggacatataacaacttctagctttaatttttttagtgtaacgtttcggtagcaaacacattcccatattatagaaaaaggtgtatgctcacgcactttttctccatctttttcataatataatattactcttttgaagaaaagatatgttagatctttgatatttgtttgtatccatgaccagttctagtatatcatctcatctccaatacattcatatctctattttatataattggatcttcagaaaacatttatgtctacttgtctagtggtcaaaacattttatgcaccactggttttaaaacaaaataaggtatcaagtctcaaactcgatagaccaaggttattaaacctctttacagaatacagatgagttatgagatatatatggatcgtcaactttagttctgatattggaattatctatgaatctaatgaaatatctaatggatattactcttaatcaaaagataaatatctaatggaggtgtattaagatattgacatgtaacgtaaagtttatgagatgattgaagacaaagattcatgcgtgtgttaagaaaacacttgacgataaagagcaaaatctccattcttcataaaaaactgtattatggaaaccaatttgtccatttcatggttgtaacatcagtttctttactactgcagatgatcgatggaaaagtgttttggtcaaagaatccttttaaaaacataactatctgaaaatagcataagcatcggactcttttgtaagtgcacaacgaaaaaataaaattccaataatttgggcaatcttgtcgactatatatcattcaaataattgaagtatatcttatgttatagtaaattttaaaagatgaatgatagacaggttaattaggcattcaaaatcaaaagatttttacattgtctgatcaaagtataatcacatgtcataatctttaggtttgtctcaactctcaagggttcaaaacttgttgagtcgctcacgctagagatgtcgaatacgtacatacgatctaattatgaacgtctaaatctgaaacggtgtcgtttaggtatagaagatcacaaagtttgcgtgggcttatgtgtaagtcttatttggattttaagttatctagacttataatctactaaaccgactattttgggccttaaagaaacccacaagtaaattattgatgtgaactgcgttttggtttcaccttattctcgatattatttcattggttcggttcacggtatggtttacaccgtaccggaatacttaccactaaaaactctgtagtgcgacgaagaagaagaagataaaaaaaaaatggagcatttcatcctcatctccctcctctgtttccctatcgtcatcttcttcatcttcttccccaagaattcttcttcagaatttggtttcaagtcgtatccgatcgttggaagcttacctggtctagtgaataaccgtcaccgattcctcgactggacggtggaaactctgtctcgatgcccaacccaaacggcgatttttcggcgaccagggaagctgcagttcgtcatgacggcgaatccagctaacgtcgagtatatgctcaagacgaaattcgaaagtttccctaaaggcgaacggttcatctcgattctcgaggattttctcggccgcgggatttttaactccgacggtgagatgtggtggaaacagaggaagacggccagttatgaattcagtactaaatctctccgtgacttcgttatgagcaacgtcaccgtcgaaatcaacactaggtataataattcaatttcactttcaatttcaatttcgttactgagattttctcttttcaggcttgttccagtgttagcagaagctgcaaccaacggaaaattgatagatcttcaagacatattggagcggttcgcgttcgataacatctgtaaattagctttcaacgttgattcagcttgtctcggcgacgacggagcagccggtgtaaacttcatgcaggcctttgaaacggcggcgacgatcatctcgcaacggtttcagtctgtgatttcgtattcatggaagattaaaaagaaactcaacattggatcagagagagttctgagagaatcaatcatgatcgtccataaattcgcagacgagatcgtgcgtaacaggattgaacaaggaaaggtaagtgatcacaaggaagatttgctttctcggtttatcagcaaggaggagatgaattctccggagatacttcgtgatattgtcataagtttcatacttgcaggacgagacactacttcctctgctttgagctggttcttttggttgctctctatgcatccagaagtgaaagataagattctacaagagctaaactcgattcgagaacgaacagggaagcgaatcggggaagtttacgggtttgaagatcttaaactgatgaattatcttcacgcagcgataactgaatctctacgattgtatccgccagtgccagtggatacaatgagttgtgctgaggacaatgtgttgcctgatgggacatttatagggaaagattgggggataagctataacgcgtatgcgatggggaggatggagagtatttgggggaaagattgcgatcggtttgatcctgagaggtggattgatgaaacaaatggtggttttagaggtgagaatccttataagtttcctgcgtttcatgcgggaccaaggatgtgtttagggaaggagatggcttatattcagatgaaatcgatagtcgctgcggttttagagaggtttgtggttgaggttccagggaagaaggagcgtcctgagattctaatgtcggtgacacttagaatcagaggaggtttgaatgtgagagtacaagaaagatcttgagttacttgttgtagaagcaacctttgtttgctcttctcatatcttatagcgaccatgaccatattttactgtaaacaaacacgttttagtggattatcaaaatacattcttggtgtgaccaacaatggttgaactgaagtcgtgcacgcagggtcacatcgcatttcaagtttagtttcatttgtgtgtgcattcgtgagaagtgtgagctttcttcttgactaaagctcgaacaaatcttggtctgggatcttcaaaaacataaattagtctcacttgggctctatcctcctagagcataacggagtcaagactcttggtaatcaatagctgagctatgaaaatttgcctaacctaaacagagagccataccacttggagaatcaacttgcttaacacagctattttgaactcatctctaaaatctcattcgtgtaaactcaaagagaaattaagtactacaaaaatatttaacaagtgccattttttggtaattaacacaacattgaaataaataaaaaaacgttcaaatggttggaagacggaaagaatcaaagaactaatctattttgttgtcctttcagaagaacagttttcagctcactaaatgatttttatgattctaaattttatgaatgataatgaaccgaaaaaacagttttgtctaaagacgaaatcactgattagagtgagtgattacacttgtctaatctttctcaaatcaggaatcccaccggaccggtcaaaccgattttaaccctaaattaacactttcctggctattggatagtaaacaattcactgagaaaaccaaaagcaactatctctatctccttcatcgggcgacttcgtcttcttcttcgttcgctgtcagatttttttttaccaaattaacaatttttgagtctccgttgcctctctcagttgaagcgtcttccttctctctatcggttagatcttcagctcgattatcttgttttttttttccttagattgtgaccatttcaatgcgttaaggatcacgcttcatgatcatatcactttctattttaaccctaagagtttccttcttcattttgtatatggaactttgatctgacgaaatgcagaaattctcatttcgagatagtttttttttttttaagattcgttgattttggatcctatttcctgtcattgttgattttgttagattagggttaccaatctgggataattcttcgcattaattttctttacgatattttccattttgttgctcaggtttctgattctatgttcctgtaaaattttcctttaatggcaatcgaaatcttcaattttttacgatacgattgattctatactgcagatgatttttccagttttggctcattccttgtcataaatctcgtcaaaattctttaccttgtcgtcttatttttttccattgataatgcttttctctcagaatgatggaggccaaaccaaaaaggaggattgttacagagaatggagatacaggtgaagatttagttcttgcaacattgattggaaacggtgatgatgtaggtcctctcgttaggcatgctttcgaaatggggaggcctgagcctctcgttcatcagctcaaaaatgtggcgaggaagaaggaagctgaaattgaggatctatgcaagactcactatgaagaatttattgttgcagttgatgagcttcgtggtgtgttagttgacgctgaagagcttaagagtgatcttgcaagtgacaatttccgtttgcaagaggttggtagtgccttattggttaaactggaagagcttctcgagtcttatgcagtcaagaagaatgtaaccgaagctattaaaatgtcgaagatctgcgttcaagcactggagttgtgtgttaaatgtaatagttacatatctgaaggacagttttaccatgccctgaaaaccatggatttgattgagaagagttacctgaagcttatcccacttaaggttctaaagttggttatagagagaagaattccagtgatcaagactcacattgagaaaaaagtgtgtagccaatttaatgaatggcttgttcacattaggagttcctctaaaaatattggacagactgctattggcctcaccgcttcagctcgccagagggaagaagaaatgctggaacgtcagaggagagcagaggaacagaatacaggtggtttgggagaattggcatacactttagatgttgaagactcggaacaagactctgtattgaagtttgatctgacacctctgtatcgagcttatcacatccacactattcttggagtcccagaacggttccgtgactattactatgagaataggctactacagctccaatcagatctgcagatcacttatacacagccatttgtggaatcataccaaacatttctagcccaggttgcaggatatttcattgtggaggatcgggtgattaggacagctggagatttcttgttggctgatcaagttgagacaatgtgggaaacagccatttccaaaattgtagccatattggagaaccaatttgccagaatggattcgcctactcatctgcttttggtgaaagattatgtaactctccttggcacaacccttagacagtacggttatgaagtgggtccagttcttgatgcccttgacaagagccgagataaataccacgagcttcttcttgaagagtgtcgaaagcaaattgtgactgctattacagaggacacttatcagcagatggtaatcaagaaggaagctgactatgaaaacaatgtcttgtcgtttaatcttcagacctcagacattatgccggctttcacttacattgcgcccttctcttctatggtgccagatgtttgccgcatcatcaggtcatacataaaaggatctgttgattacttgtcctatggagtgaacactaattttttcagtgttctgaggaagtacctcgacaaaatcttgattgatgtattgaacgaagttatcctcgagacgattagcaacaattcaattggtgtatctcaagctatgcagattgcagcaaacatatctttcctcgaaaaggccagtgattattttctccgacatgcagctcaactttgtggcatcccaagccgatcagttgagaggcctcaagctagtttagctgcaaaggttgtcctcaaaacatcaagagacgcagcctatcttgctttgttgaatgtggttaacaccaagttggacgagttcatgaagctcacagaaaatgttaactggactacagaggaaatgccacaagggccgcacgagtacataaacgaggttgttatatacctcgagactgttatgtcaacggcacaacagatcctcccaatggatgccttatacaaagttggagttggggctatcgaacatatctcaaactccatcgtctctacattcctcagcgatagcatcaagagattcaatgctaatgcagtctcggccattaaccacgatctgagagtgatagaaaactttgctgatgagagatatcactcaagcgggttaaatgagatctacaaagaaggaagctttagaagctatctggttgaagctaggcagttgataaacctgttgtcgagtagccaacccgagaacttcatgaacccggtgattagagagaggaactacaacactttggattacaagaaagtggctacgatctgcgagaagtttaaggattctgcagacgggatattcggaagcctggctaatagaaacacaaagctgacagccaagaagaaatcgatggacatgctcaagaagagactcaaggaatttaactgattctcaataaacactagtaggtcctgaccttcccactcacatcatcatcatcgtcatcattatcctttagctttactattcccttaatttgcttcttctggttaacctctaatcttgtttatgtctttcttcttcttttctctgtttttgttctatgatccaattcattaatcaatttcagttttgtcctaatcgacaaaattcatctttatggctcacaggctcaggattaatctttagtgtagaatgaattgataatctaagttaaagagcttctagcttttagattcaaattattgatgaaagttgcacaacaagcctggattgggaggatatttacgtattttctctatctgtgtggaccggagactccatttgtcttccaagtcaccttatccaaagtgtcaccaaaacctgaaaactttcaacctcaaaaaatccaaacttgagctttgtattccgacaaaaaaatggcgactgcgtctctagttccgacatctaaaatcttctctgtctctccgaaatcctcagcttcgattaaagcaaggagcagagtagttgttgcatcgtcgcaacaacaacaacaaccaagaaggagagagcttctgctgaaatcggcggtggcgattccggcgattctgcaattgaaggaagctccgatatcagcggcgcgtgaggtggaagttggatcgtacttacctctgtctccgtctgatccttctttcgtcctgtttaaagccaaaccttcagatactcctgctctccgcgcaggtgatgcctaatcccactctccctgttctgcatcgtccgttaacttaaatgtattttgattatcaatctaaacaaagttaagttgcgtaatttagttagtgttggtgagttacttagttcagttttggcttgttcacaactttaccgtttgatatgattggtgttattaacttttaaattaatgatctttgaaatctagtctggttgcaggaaatgttcagccctatcagtttgttctaccgccgaattggaaacagttgcgaatagccaatattttgtcaggtaattactgtcaaccgaaatgtgcagagccatggatcgaagtgaagtttgagaacgagaagcaaggcaaggttcaagtagttgcatctcctttaatccgcttaaccaacaaaccaaatgcaactattgaagatctcggtgagcctgagaaagtgattgcttctcttggtccttttgtcaccggaaactcttatgactctgatgaacttttgaagacttcaatcgaaaaaattggagatcaaacggtaatgacacaacaagtgaagtgattgcttctctgactgatcaatcattgaggaaagtttctgatcatttttttttttggtttatgtcttcttgtgtttttatgacagtactataagtatgtgttggagacgccatttgcgctcacgggaagtcacaatcttgcaaaagcgacagcaaagggaagcacggttgttttgtttgttgtaagtgctactgaaaagcaatggcagagctcacagaagactcttgaagccattcttgattcttttcaactgtaaatcagagtttttgttatgactctggacttgagaaactaaagagcaaacagtttatgctaaggagtgtctgtgcgtagtaacattaactcattcttttctactgtaaattcgagctatgactctgagacagatctcagtggtttatgctcagcatgtctttgttgttgtataactttctcaggtataaaagaacaaaagattacaaggttaggattcctatatctcgattcaagaaccgaactctgactccaatacattgtgtggaaactcccttcttcgtatggtttctacatacagagcaagtcaactggtcatgagatgagggacatctggtcgtggaagaacgcaagagtatgttatatacttcacaccgtccacaagcacgactatgaaaactcgggactgtggttttgttcctcccatcatcccatcgatgtctccattaccgccttctctgggatcaacaagcacagacactaccattgatgggcctggcttggtttcccggaacttgtctttgctagagctgttatgatcttctttggtaagattaaagtcagataccggaagaccaccactgaggattcttctgttctttttccccttttgtgtatcactggtgttcttacactgttgagtatgtggagaagcaggaatgatggctcctgagtttgaggagacatcaaactgaaacacttcagtgcacatccccgaactgaacattggccctatcagtggatacattaaagaaaaataggtgttattatatgcaaatgcaaacgtttcagttcactattctagctaaaaggctgctctccaagtctcaaggagagaatcagtaacattggaagcttgtgaatacctgcaacaccttcacgaaaccattgctgcattttaccattggctattgttgatttgagttggtcgttcgaagcatcatcagaaccagaagatgacaggcctttccccgtttcgctatagaggtgcttagacacatccctggtccttgggcttgtggagtcaggtaaaggcaatgcaggagataaagttttagttgtagttgctagaacacttttcccttcttcgttctttgtttcagaatccctggctttctcgctcgccaaaacagaatgaataatcaaatttccatcgatcttgacaagcttttcattcctcggaacaaatagcgatgcaactagaggttcactactatttcgaggaggccccaaattctctgtttcagatacgtttcttcccactccttgatcagaatctcccccacaatgtactctactactatcaacaaccaaaactcttcctctagactgatcataaaccccgtcagtaacatagttagacttatactccccatagctaatgttcaccaatgcaccaaacaaaaacatacaaaacagaaaaccaaaaacactaaaactagcaaccttcttgaacttcttcaccttagcaacagaatgttttggtttcaaccgaggaataggaagcaaagccacttgagaaccttgtggtttaaccatataagccggatactgcatccatggataaacaattggaaccatcggtggtccacttgagaaccttgtgcccatctgttgcctcaaagtgacattctcagccacgaaataagacatcttactgctcaattccgatatagtggaatgcatattcttaactttatcttcaagctcctccacgtaatgcttcttcctctgtcttgaaaggtgagcactttcacggtttctaactagtctcacgttcttcttcttctcatcatcttcttcaccaccaacttttataacacttgcaaaaccatctttacccaatctcctggattcgtcgcttgaatcttcttcaatctctgttttcctcttggcagaatcttgccccgaaaaactcaagctctgactagtaccggagaaatcagaatccgtaggtgattctctattgtagcagcttgaagtagatattaacacgccattcgtattcttctccgtgtcttcgttaacacaatcgcctgaaattcccgacgccggcgtaaagtcaccagacatttctcgtttcgtagcgtcaggaggaatgcagaacgattcgttctcagaagggaagtagagatcgtcgaaactgtcgtcgtcgtcaatcaaaaacctcagatcagagatcgagttccgaacttgatcagagttagaattgcagaaattatcaaagggagaaggagcgatcgcgatgtaatcgaaatcggaagagaaagtaagataagtgtcctccaaaactggttccgccattgttggaaagttttaaggtttagagttactaaattggggaagaagaagaagaaggctttataagaggcaaggacgttggtctccttcttcacccacttgggcgcgtgtatttcacgcaagatctgaacaatgcattgaatggaagattgtaatagacgcgctagaaaaggagcgtggaaagatattggagtccatattcttgcacgttgactacattaagttggagtgatgcagggtttatatgctctttaacggtttttatttttatttttaatctctgactctttctctcaaaaaatgttctatctttaggattggatcttcaaacaaatctaatcaaactttgcaactctgtgtcgttttggagtctctttgacgtcacgcttgtctcctctcttctagcatcattattatagatatttggatcatatcttctagatcaaatattacccatatgatgaattatggaataatgaatatggtagatggtgtctttgtaagatatttggtgtaagtgaaaaagagaaaaatgtcaaaaaaattaccaattttgttgaaaaaaattgttttgaataatagtgtcttaacgaaagttttaaaataggctaaatatgtagcctctgtttggttgaaaaacatgttttcagggttatggttttaaaaaaacaaaacccacgaccagactactctgtaaaataggctaaatatgtagcctctatttttatcattacatatttgaccatattttttttattttttttggtaaaagaaatttgatcatattagtaaagaagaatgtaattcttttgaagtattagtgtctaatacaaatacattgtgttctgaacatgatccggaatagtccagattataacaaatctgtaacgccttgtatcattaggtaaagtaccttcgacgtcaacacccctcatactgtttcgcttcggctcataatataagacacataacagcttgtcttcatagtgatagatgcagtacatccacttggcaaaaaggatctcaccaccacaagtagcacccaagatgcgccaatttgaaaagccatgcatctcgtgaaagaaaatcctggaccatccttgtgtctccttcttagcatccttcataacccaaatatattccatgtcattcgcgcaaaacacgaatcctaacttcccttggtagtttaccagagttgaaatatcatctctactgggaattcaacatgataaaaaaattcagacctgatatcaaaactcatcaatttatatctagaggtagagttatatatgttgtagtagtttcccctggataataaatcaatgtgtcatccctggtaagtgtaaaggactgtcttgtggtagggttatatacaactaccttaaaaccagacaaacaacacatcaaaccgtaaacatactgcgccattctcccagggattgatagtactgcttctatgtccgtatttggaggataagtagacgataagcctaagaaacattccacgtaagggcctgaatcgaagccgaagatgaaatgggcatcatgaggaggctgagtcaaaaatcgagtcactatcgattctatgaagtctctacgactgctgataatggatgaccacagcttcgagacagatttgaacctcaatagtgcgatttcgccgggagtgtttttagtcactccactgtcagtattcagagggatatcgataactccgccgtgaagaagtagtgtcggcgagggtgaggtctcgttgctattctctttgcgtcctctcgtcatcatctctgttttgtcaaaccttagactaatgaacgagggctctctatatagtatatagtatatagagtttattgcaaataaggcatttgtcttagatatatattttattttaggcacttttaaaatgatctttagatttaggcacttctttcctggggaaagttgtttttacccttacagagagatgatgttgctctttctttgttgatgaacttttacgttttacactagaaatcaaaaatacttgcgaccaacaccaacaactttggagtcattgattacagagtgatgtcagcgacgattggaaattcagacgattaacaattggtcctcatgagatgtgaatgcgatctagatttttaacatcccacattttgagatctggaaaaaacaacaagaaacaaaaaagtcccacgatttggtattacgatttgcacgtttttttgttcagtgatttttgtgcaggttaaggaactcaagaagtgattgatactttgttgattgctcaattgatgttcataatcatgtctacaagtacattgatttttgttcatgttaatggtgtttgatgataatgaggatggttgtagtgttgtgttattgtgtgtatgtaagaattgtagactgtatatttgacggtttgggtttacaagtctaattctagggtatagcgtttaccattgacgtcgttcgttacccctcgccgtcaaagccgtgaaccaccaccaaatctttgtgctaccgtcaaagctt

SEQ ID NO: 1366 - DNA, 107271 bp, Arabidopsis thaliana
aagctttagaagctatctggttgaagctaggcagttgataaacctgttgtcgagtagccaacccgagaacttcatgaacccggtgattagagagaggaactacaacactttggattacaagaaagtggctacgatctgcgagaagtttaaggattctgcagacgggatattcggaagcctggctaatagaaacacaaagctgacagccaagaagaaatcgatggacatgctcaagaagagactcaaggaatttaactgattctcaataaacactagtaggtcctgaccttcccactcacatcatcatcatcgtcatcattatcctttagctttactattcccttaatttgcttcttctggttaacctctaatcttgtttatgtctttcttcttcttttctctgtttttgttctatgatccaattcattaatcaatttcagttttgtcctaatcgacaaaattcatctttatggctcacaggctcaggattaatctttagtgtagaatgaattgataatctaagttaaagagcttctagcttttagattcaaattattgatgaaagttgcacaacaagcctggattgggaggatatttacgtattttctctatctgtgtggaccggagactccatttgtcttccaagtcaccttatccaaagtgtcaccaaaacctgaaaactttcaacctcaaaaaatccaaacttgagctttgtattccgacaaaaaaatggcgactgcgtctctagttccgacatctaaaatcttctctgtctctccgaaatcctcagcttcgattaaagcaaggagcagagtagttgttgcatcgtcgcaacaacaacaacaaccaagaaggagagagcttctgctgaaatcggcggtggcgattccggcgattctgcaattgaaggaagctccgatatcagcggcgcgtgaggtggaagttggatcgtacttacctctgtctccgtctgatccttctttcgtcctgtttaaagccaaaccttcagatactcctgctctccgcgcaggtgatgcctaatcccactctccctgttctgcatcgtccgttaacttaaatgtattttgattatcaatctaaacaaagttaagttgcgtaatttagttagtgttggtgagttacttagttcagttttggcttgttcacaactttaccgtttgatatgattggtgttattaacttttaaattaatgatctttgaaatctagtctggttgcaggaaatgttcagccctatcagtttgttctaccgccgaattggaaacagttgcgaatagccaatattttgtcaggtaattactgtcaaccgaaatgtgcagagccatggatcgaagtgaagtttgagaacgagaagcaaggcaaggttcaagtagttgcatctcctttaatccgcttaaccaacaaaccaaatgcaactattgaagatctcggtgagcctgagaaagtgattgcttctcttggtccttttgtcaccggaaactcttatgactctgatgaacttttgaagacttcaatcgaaaaaattggagatcaaacggtaatgacacaacaagtgaagtgattgcttctctgactgatcaatcattgaggaaagtttctgatcatttttttttttggtttatgtcttcttgtgtttttatgacagtactataagtatgtgttggagacgccatttgcgctcacgggaagtcacaatcttgcaaaagcgacagcaaagggaagcacggttgttttgtttgttgtaagtgctactgaaaagcaatggcagagctcacagaagactcttgaagccattcttgattcttttcaactgtaaatcagagtttttgttatgactctggacttgagaaactaaagagcaaacagtttatgctaaggagtgtctgtgcgtagtaacattaactcattcttttctactgtaaattcgagctatgactctgagacagatctcagtggtttatgctcagcatgtctttgttgttgtataactttctcaggtataaaagaacaaaagattacaaggttaggattcctatatctcgattcaagaaccgaactctgactccaatacattgtgtggaaactcccttcttcgtatggtttctacatacagagcaagtcaactggtcatgagatgagggacatctggtcgtggaagaacgcaagagtatgttatatacttcacaccgtccacaagcacgactatgaaaactcgggactgtggttttgttcctcccatcatcccatcgatgtctccattaccgccttctctgggatcaacaagcacagacactaccattgatgggcctggcttggtttcccggaacttgtctttgctagagctgttatgatcttctttggtaagattaaagtcagataccggaagaccaccactgaggattcttctgttctttttccccttttgtgtatcactggtgttcttacactgttgagtatgtggagaagcaggaatgatggctcctgagtttgaggagacatcaaactgaaacacttcagtgcacatccccgaactgaacattggccctatcagtggatacattaaagaaaaataggtgttattatatgcaaatgcaaacgtttcagttcactattctagctaaaaggctgctctccaagtctcaaggagagaatcagtaacattggaagcttgtgaatacctgcaacaccttcacgaaaccattgctgcattttaccattggctattgttgatttgagttggtcgttcgaagcatcatcagaaccagaagatgacaggcctttccccgtttcgctatagaggtgcttagacacatccctggtccttgggcttgtggagtcaggtaaaggcaatgcaggagataaagttttagttgtagttgctagaacacttttcccttcttcgttctttgtttcagaatccctggctttctcgctcgccaaaacagaatgaataatcaaatttccatcgatcttgacaagcttttcattcctcggaacaaatagcgatgcaactagaggttcactactatttcgaggaggccccaaattctctgtttcagatacgtttcttcccactccttgatcagaatctcccccacaatgtactctactactatcaacaaccaaaactcttcctctagactgatcataaaccccgtcagtaacatagttagacttatactccccatagctaatgttcaccaatgcaccaaacaaaaacatacaaaacagaaaaccaaaaacactaaaactagcaaccttcttgaacttcttcaccttagcaacagaatgttttggtttcaaccgaggaataggaagcaaagccacttgagaaccttgtggtttaaccatataagccggatactgcatccatggataaacaattggaaccatcggtggtccacttgagaaccttgtgcccatctgttgcctcaaagtgacattctcagccacgaaataagacatcttactgctcaattccgatatagtggaatgcatattcttaactttatcttcaagctcctccacgtaatgcttcttcctctgtcttgaaaggtgagcactttcacggtttctaactagtctcacgttcttcttcttctcatcatcttcttcaccaccaacttttataacacttgcaaaaccatctttacccaatctcctggattcgtcgcttgaatcttcttcaatctctgttttcctcttggcagaatcttgccccgaaaaactcaagctctgactagtaccggagaaatcagaatccgtaggtgattctctattgtagcagcttgaagtagatattaacacgccattcgtattcttctccgtgtcttcgttaacacaatcgcctgaaattcccgacgccggcgtaaagtcaccagacatttctcgtttcgtagcgtcaggaggaatgcagaacgattcgttctcagaagggaagtagagatcgtcgaaactgtcgtcgtcgtcaatcaaaaacctcagatcagagatcgagttccgaacttgatcagagttagaattgcagaaattatcaaagggagaaggagcgatcgcgatgtaatcgaaatcggaagagaaagtaagataagtgtcctccaaaactggttccgccattgttggaaagttttaaggtttagagttactaaattggggaagaagaagaagaaggctttataagaggcaaggacgttggtctccttcttcacccacttgggcgcgtgtatttcacgcaagatctgaacaatgcattgaatggaagattgtaatagacgcgctagaaaaggagcgtggaaagatattggagtccatattcttgcacgttgactacattaagttggagtgatgcagggtttatatgctctttaacggtttttatttttatttttaatctctgactctttctctcaaaaaatgttctatctttaggattggatcttcaaacaaatctaatcaaactttgcaactctgtgtcgttttggagtctctttgacgtcacgcttgtctcctctcttctagcatcattattatagatatttggatcatatcttctagatcaaatattacccatatgatgaattatggaataatgaatatggtagatggtgtctttgtaagatatttggtgtaagtgaaaaagagaaaaatgtcaaaaaaattaccaattttgttgaaaaaaattgttttgaataatagtgtcttaacgaaagttttaaaataggctaaatatgtagcctctgtttggttgaaaaacatgttttcagggttatggttttaaaaaaacaaaacccacgaccagactactctgtaaaataggctaaatatgtagcctctatttttatcattacatatttgaccatattttttttattttttttggtaaaagaaatttgatcatattagtaaagaagaatgtaattcttttgaagtattagtgtctaatacaaatacattgtgttctgaacatgatccggaatagtccagattataacaaatctgtaacgccttgtatcattaggtaaagtaccttcgacgtcaacacccctcatactgtttcgcttcggctcataatataagacacataacagcttgtcttcatagtgatagatgcagtacatccacttggcaaaaaggatctcaccaccacaagtagcacccaagatgcgccaatttgaaaagccatgcatctcgtgaaagaaaatcctggaccatccttgtgtctccttcttagcatccttcataacccaaatatattccatgtcattcgcgcaaaacacgaatcctaacttcccttggtagtttaccagagttgaaatatcatctctactgggaattcaacatgataaaaaaattcagacctgatatcaaaactcatcaatttatatctagaggtagagttatatatgttgtagtagtttcccctggataataaatcaatgtgtcatccctggtaagtgtaaaggactgtcttgtggtagggttatatacaactaccttaaaaccagacaaacaacacatcaaaccgtaaacatactgcgccattctcccagggattgatagtactgcttctatgtccgtatttggaggataagtagacgataagcctaagaaacattccacgtaagggcctgaatcgaagccgaagatgaaatgggcatcatgaggaggctgagtcaaaaatcgagtcactatcgattctatgaagtctctacgactgctgataatggatgaccacagcttcgagacagatttgaacctcaatagtgcgatttcgccgggagtgtttttagtcactccactgtcagtattcagagggatatcgataactccgccgtgaagaagtagtgtcggcgagggtgaggtctcgttgctattctctttgcgtcctctcgtcatcatctctgttttgtcaaaccttagactaatgaacgagggctctctatatagtatatagtatatagagtttattgcaaataaggcatttgtcttagatatatattttattttaggcacttttaaaatgatctttagatttaggcacttctttcctggggaaagttgtttttacccttacagagagatgatgttgctctttctttgttgatgaacttttacgttttacactagaaatcaaaaatacttgcgaccaacaccaacaactttggagtcattgattacagagtgatgtcagcgacgattggaaattcagacgattaacaattggtcctcatgagatgtgaatgcgatctagatttttaacatcccacattttgagatctggaaaaaacaacaagaaacaaaaaagtcccacgatttggtattacgatttgcacgtttttttgttcagtgatttttgtgcaggttaaggaactcaagaagtgattgatactttgttgattgctcaattgatgttcataatcatgtctacaagtacattgatttttgttcatgttaatggtgtttgatgataatgaggatggttgtagtgttgtgttattgtgtgtatgtaagaattgtagactgtatatttgacggtttgggtttacaagtctaattctagggtatagcgtttaccattgacgtcgttcgttacccctcgccgtcaaagccgtgaaccaccaccaaatctttgtgctaccgtcaaagcttcacgtctaccgtcgaagctgcaaatccactatctaagccatatatctctgaatgtcaaaagaaacttaaaattgaatcagagatggggatgcattttttagaagataaacgcattcttttcacctcattctcaactccagctcatagtttaagggcaaaaatgtccgtaacaatgaaaattggagttattatatgcttttactgttgttgttttttacggcaaaataaggtcatccatttaagctaaaaacgggtcggttttcttcgagagaaaactagttcggagtagaagaacttacatgggaaaaaatagaatctcgtgctcttgccttcttaccaagacaatcagcacggacattgtttagagtctctgttttgaaagaaatgttttcaaaatgcttgtttagaatataagctctatatagtatacctacacatgttatcgtgggtccaaatagaagagaaaaactatatttaaaaaattaaaattatatgagatatttattttcaatgaaaaggagaaaaataaaaaataaagaaggaaaaaatataaagtttcctttccctctcgttcgttggctttgccttcccgagagagaaagataagatttggttttgcattcctcttctctctcgccgctctcaatatgcttcgatttctattctcctcttcctcttgattttgtcttcttctctttgctgcggagagattaagaaacccaagggttttaagcaagagacgcggcgaggaagctatccagaactctctgaaacatccattcctttttctcatggacgtagtgttgccggaaactgccgtggtaaccggtggttcggttatcggagattatggatttaatgtggatccttttctcgttgaggcgttgcacaactctcgccatcgtctcacgagtatgctccgtttctcttcttttttttgttctctgattcgtgtcgtttaaccttatttcctgaaattagagctgatttttgtcatctggattaacaaatttgaaattttgattggtggtcttatctgaatttagctgggtatagttaggttaatttaaccgcaatttggggattttgggtttctcaggaactggctctcttcttagatttgcgattatgttgatgcccatgctgaatttagctctcttctctgcactgtattatccatggttaatgttatcaaagatgtaaacttttattctgtccatggtgttcaacatttatagttgcttaccttttgtgtggtttatgtggaactgcttgtggtacatatatctcctttatctggtagtagcttagcttttgtgtggttgtgtggaactgcctgtggtgtgtcctggcttttgtgtttcttgctactgtaactaagccttttgttttgtttctcttgttgtgttagttttgcggatggaacttgatgttcaaaggttgttgcagaaccctgaacagcagcagtttgagttccagcattttcctacttcgtatcttcgtcttgcagcccatcgtgttgctaaccattatgggctagctacagctgtccaagagagtggtgctgatggaaatgaaaacagaatccttgtgacgaaaactacagagagcaaatttcctgctgttcggttgtctgaaatcccggtggctaaacaatcagaaaatggtaagtttgagagcaggaaagtttccatcaagactcgaccttctaaaggatctggatatggcgctggtgatctggaaaagaatcgtggtcctcttagaagtgttgaagagaggaaagaagagtatgacaaggctcgagaacgcatattcagtggtcttactggtcttagttgtgatgactcttcatctgaaactcaggtgtatgagaggaatgcaagtcttagcagagatgacaagcaagtatctaagaatgcttacgttgaggtcaagaagaacttaagcatcagggaaagtggtccaacatctcgtgttgcaatatttagagacagagagaaagatcggtttgaccctgattatgaccgcagacaccaaaggtgagtaactcagctgttagtttactggctaaaccattactatactagcgaaaaagtttcatacatgatggttgatgataattgtgtgtgtcaatgcaggtacattaggagccttccggtgaatcagaacttcaatctaccacccttcaacattcagcaaataccgacaccatactacgaaatgggattcactggatataaccaaattccaagtcctcctgctcctcttggcttcggaccacatcctagctcaatcatgagtccctatggcaccacaatggatgcaatgtatatgcattggcctaatgcagctatgatgtatgctcatccgtatgagcagttcaggaatggctctcttcaggtaaataacattgatcctttttactctctttgagcgatcatggaataaaaacttttgtccaaatataaggaccatatattgaaattttttcacccacatgtttaatatatacttatgcatagctgagaactcgttaagagaaatggattctattaaaactcttccaaaaacaaatgaaaaaagcaattgagttggtttggtgcattgtttccaatgattgtctgaaagcagttgtaacttgtttctccaggcacagttcgttcaacaacccttgagcttcgactacatgcagaaccgctaggtgcttgcctctttgtcgatctttatctctgtttaccatttttttttgtagaacctaggaactgttgtaatggaaattttggagttgtaatgtcaaaattcagaatgaagagaccttttgttccttttacaattatcagattctgtctattatggaaaaccaatgaactacctgtgggtcaaatcttcatcgaaattctctgttttgaattgaatgtcttccaaatctgcaaaagctgtcctttaggtttgcattacacaagataaataatcagccttccaaatctttacattcatgttatttgttccgttgattcgtacaagtctgtgagacgcaacaaaaaaacaatatctagtttaaacaaacacaatacgtacgttagtgatggagaatttccaaagtttgctggtttcaacatttgtttacgaagcaatgtggcggcgaagaaacatggcaactgatctcaatggtgtcctggaaaagtaacagcatcaaagtgagtgtaacttacaacttcaaatagcatagagatcagaatggataatagagatatatattaccatagagatcggcttttgtttcctggttgtgtaacctcctcttctctttgtgggtctgtatggacaagtctttggaatttttcagacagtgctttgtaagacagaatctctgttggttcgatttggctaatcgcagcttttaaatgtcgcatgcttatttcctccatttcaagactctcctgattgataaaaggatgtgagacacttgcaacaaatttcaggcttagtgctggaaacaaggactagtatatatctaacctcaagtgcagcaatagctgcttctctgcatatcaatgatatgtcagctcctgtatagcctttggtaatggaagccaattcctttaaacaaatatcagagctgcatgggattttacgcaaatggattttgagtattgcttcgcgatcagtttcattaggaggtccgacatatagcaagcgatcaaagcgccctgaagcattataacattcaatttcaccaaacgagcattcaaatttgtttgtgaaaatcaaaagaatcagtgaaagaaagtaatttaccaggtcttagtagggcagaatcgatcttgtctggccggtttgtagcagcaatgacggtaacaccaactctttgatgcaaacctgagttccacatttaagcaatcagctccctgcaatttgacaacacaactgcatctagatatcaatccaaagagttgttgttactaaccatcgagctccacaagaagttggctcataactctgtctgaaactgacaccccatcattttctttccccctaatggaggcaagactatctatctcatcgaaaaagataatggagggggcatttgctcttgcctttgcgaatagggacctaacagccttttcggattcaccaacccatttgctgaatagttctggacctttgacagcaagaaaattcagcttggcttcagaagctactgcacgtgccataagggtcttgctacatccaggaggaccaaacatcagtatcccacttggtggccttgtacctattctcttgaatgcgtcctgatgtttttgaggccattctactgcttccattagctgatttttcacctcattttggccaccaacatcttcccagttaactttaggaacctctaatatcacctgagagttgcacaccaaccaaccaaccagcaattagactatctatcgagtaaagtatggtttagcattggaacatctctaaataaaaagctctaggcaacagacaaatgaatcttaaaagaaaagtaccaagacactagaccaagcactgttagattataaaaaaatccaaacctgaaaaatgttaaagttactattcaaaccagagaatatcggaggaagtgacataaaaacaaagccaatagtttgcaccataacagtataatgatataatgtttacatccgtgcaatttgatatatgatatgaataaactgaagagatcatcatctcaagcagatcagaaaaactagagacaatgagtcagaatgaggggaaacaataatgcgaagtgttgggaatagctcatcataaagtcagctcaattttctaggaggaaaaaagaaagtccatacctctcgcatggcactaggtctgattttggtcttagcattttcaaaatcttcaaatccaacacttaaggtatgttctccttgttttctaagcatctgttcagaacaagagttgccattgttttgaatatcatccgctactagggaaactgtctcatccaaactaaatgaacgctgagcccctgaagttgtggctgaaattgtgatacatgacgatgcagaatccgaactatcagatgatatgtctgacatatttgacgaggactcagcaataggtgcttcttcaaggggcaaattgctagaagaggaactctgatcaagatgccgccttaagcagacaaaggctgcctcacaacacagtgcagacagatctgcaccaacaaaaccatgggttgccatagcaagctgttcaacctggatgtttgaaagtgaatgccgcatcccacggagaattatgtgaagtatatcggaccgttgtgtagaagatggtacacctatattattaaggaaatatttaaacacatattagggagtaagaatcttaacaacatcgaggatggtcttttttccacaaagtctagtcttaccaatttcaatttccctgtcaagtcttcctggccgtctaagggcgggctcaatgctatcaggcctattggttgcagcaattacaacaacgccatccgtcctacttattccatccattaaattcagtaatgtagctaccatcctctgagacaattcttcgcctccttctttccgagcaggagcaatggcatccaagtcatcaatgaacacctttacaagaaacaacattattcacatcggaagcagctaacttggtaagatatctactgttggggtaacaagtgaatatggaaatatcctggtaaatttaggtgtctaataaagaggaaagtgcaaaactctaaccacagctggtgtagcattgctagcagatctgaaaacctcatctagagctttctcgctttcacccaaatactggcttataatctctggtccattcacagagaaaaagttgacaccagaatggcgggcaaaggttcgagccaaagatgtttttcctgtgcctggaggtccatgaataagcactcccttggtaggtcgcaaaccaagactaaattgatcatacaaataattaaaagtaaaacaaaaatctaaaaaggtagtaatattcacaaaaaactaacaatcagatggacccttgctacacgaagatgatcttataactagtacagcatacatattagcaaagcaccaacagctttcatcagggtaaagtgtataaatactcactttattggctagacgcctagacaatattctcaaccttcccagtgagtccaacaaacacataaatgagcgcgacacagaaaacttaggtggactacataaaaagactttttccactttccatgcatgtttacttttatagttcaagtaggctaaaatatgtgcagtggtgaaataaaagtcaaaatgctcaaataactgcaataattaccttgataaggaattctttatggacgaagaatcaatgatgtcccttaaaattgcatattctttagagagaccacctaactttgagatttcacatcccacattttctccttcatcaaattgcagaccttgtacaaatgttctcccttgaatttcagatgctaagtctaatgtatgatggaggtagactttagtttcctgattgatcataaaagcatgatttctgttggatgtgtcagatggccttttatcagctcttttgacgcagaatatacagatttctgagagaattggcacagacacaaaattcccatatagcaggctacaagggtaaagccacgaacttgcacaaatctgcaaaagttttttcgaactttcattgctcaacacctctcgtagatcaatcgagctttcagatgaaaaccgctgcttgcaactgaaaacagagtcctctatgattggtgaaaccggagatttggggcgaggagaactaaacttttgcaagtttgctggtgtcttaggagttgaattcccatttccgttctgctcgtaagaactttcaaaagcattcttagcttgtaacatattcctgaagggagtcaactctaaacacaactctttgcaggcaagcagcgatagatggttaacatcatcatagcgagatctaccattcccgttgaattgatcacttaaagaaggtccgctaacaggataaacaaaaacagtcctgcctgaaacaggacaaccaagcccatagcaaagattcaatgaaattcgaacagcatctttgaaaacctgcaattgaaaaacacaacagattgaaatctttcttccaaaccaataacaaaatcagaacgcaaagttcacttagaagcagaaatatctgacctttgaagaagagaaaacggtggtaagcacaaaatagtttcctggttcatcagcaatgatactctcactgtcatctccatattcagctttaatcgagctgagtgggaagcttctcgaaaatctactctccggagaagctagtgatacctatcattagcatttcaaaccttaaaaaggatcaaaatatgcagtcatcgagtgttaattcggtatgaagagcagaaaagcttaaattttaccgatacagtggagccagggctgagagaagcagcgaccatagaagtttccgatagccaaatcttagagcctctgatagattctgatgcaacatcggctactcttgcgatgattgcagattttccgagaagacaaggaaacgcagcagacgcttcttcaatactgcgcctaagctcttcttcgttgatagaatctgtatctcgactagttgttgaagacgccggagttcttggagatgcaggcggttccgaattggatagccgtgatggcgtcctcgactgcttcttcttcgaaggcatctttagctttttgttaatctacactccggagtaaaaagcaacccttgttcccagaccccagtgagtataaataagttacagaacgccggcgatcctcgccggagataaagagccgaaatgaaaaatcttcaatttctcttagggtttaattgggtttgagaaattaattaaacaaacccaaacccatttcttttgactgatagagcccaagcccaaatatatttttagttgcaatctacgagtgaatgagcagtgtaagtaatgatgcttttgaaagaagatgttgagtgtttttttcttttccagacattttatcaaacacttattaggctgcaatgtggatatatgcgactctccttttgttctttttttttttaagtattggatacagaagagttgaaacatcataacaactttagaattttgtacgctctagtctattattgcatcggccaatggagagtcacgcagatattgattattggtaaaattgaaacatataatatttcaaacatggcgcatctacgaacccatcacgccgactagtcgggtggattgataagcacattcggaatcatttatcggcaatcaaatagtgtggagatcgaagatttgacaaacgctttcaagtttggcttcaagcaagagggataacttaaactgaaagtatttttttcgtaaagtttgttttatctcaataatcttaaacaatagtttgcacaagttgtaaaagcgtttaaattttttcttcagaatttactttaacataaaattaaaaaaataatatatatataatacataatatatatatatacatatatatatatatatatatatatatttcaaacataagagtaattatcacaataatttaatgcataaacacaataaaaataaattcttgtaaatacaataatttattggaaatgagttcctccaacatcgtgggactcataacctagttacaaaaaaaaacactccacttaattagagtataccaaggaaatacaagattttctccccaaacaagagaggactcttgtccttcggtttcactcgcacaattattttaaaaacaaaacccaacataacatatcatacttattttaaacccatgaccaacaaactctcattatgttccatgattatagcttgtgaatgattgatattacattcatatctcaaataactctcttcaattactcagtcttcttcttagaaagaaattcctttttgagacctggaagatgaacgttgacaatgtaatgctcccagtcaatgcctttgatatcgaacccaaacgtttttttctcttccattgacatctcctgtatcagacttgttgtattggtgttgtcaaacctatagtattgacttatgggatcagtaaaatctgatagctttttgcttaataaaagaacaaggccatgtatgttactaaccgagcttgaaagaatgtgtaaggctcatatgtttttgccaaggacacaaaatagtttagcttcctctttcccttcgtgctcaatcctcctccttcattatcaatcactctttcctgttttattattgtgttcgataaagcagaagtgaaaccctctaaggaactgtggattttcatatgctctaagtctatcactgtttcttccaatggaaagtcacacagatgttgatgagagaggtctatcaatttgccagcacgcatggggttcacatgagatgaagaagttaaattgtaaactttgaactctgggacaccacaaccatgctttgccatggctgctattgctgcgtttgcaaccatgtcaacaggtataatgtccatcaaagattgaggatctgcccagaagtcagaaatctggcctttggcataagccaagatgattggatcagccattctgttttttttttaataaaataaaaaaaagtttaattaaaatttacaagctaatgtcaagtcttttgtttttgaaataatttacttttttaccttgtcccttggatccagccagggaaaggctcattgtaagagctttcgataatactaggccttatgatcactacaggcaagtttcctcgcttgctgtgaattacagcctcacctatggcttttgtgaatgtgtaactattttcccacccatagtgttgagctctggtttctcataacatagcgacatattattatctcatattatggcacataagaaagtaattgttgttatataagataataacatatctttacatattttagtacataagaaggtggagagaaagtaaaattttcttgtttattctcacctttcaaaaccgagttctttgagtttcttgatttcttctctgccacggaactttcttacagcttctgaagctagtttcagctcggatttgatgttcaagtcagaagttatgttttctccaatgcagagaggagtttctagtactgtcccctctctcttaccagtcacgtaagctacgtattaacaaaaacaacaataaaaatcagtttatgaaagttctctacaaaaatacttattctcagccaaaacaattaaaaacactcgtgccagttgaaaaatggaggaaaagtttcaatttcctgcatccttttccgaagcttaagagcctacccggtccaagagcattgacacttagggcagaatcgtatctgttcccgtttgtttggattaaaagcaaagtcaaattattacacttagtttgcaaacaacgaaaaaaccgggcaaaaagaaacagacgaaacaaacacctgtcgtcgaatgttgtacgaccaccacaactgataataacatcaatctcctcactgatcatgtttgctatttcagatttgatccctagattgtcttcctcaatgtctccaattactggaatcaactttctcttcatgaaagcttcgtaagagctcccatgcatttgcttcagaagcttgaacagatccgagcttatgatctgtttggaacaatatatataaaaggatataagaagggaaaaaggaattaaaaaaagaaggttgagaatggaaatgtttaaatcagacctcatcgtagagtctcttgtttgctgattcttgatccttggatctcatcagaaggaagatcttcccaatttcaagactttccctcaacagtttctcaatcaacactgcaaaaaacaatttttcatcaacccgaaaatcagttacttggacaataagaaaactctagtttagggtatttcttacctttggcaagaaaccctgttgcaccagtaacaagatagcttttcccttctaagaaacggacgattccaattccgtcactgttacgacttgtttctgtcttaggcgtaactaacgacgttacagcttcaaaagacgtctcaccataaaaacacgaagtttggactctacgagtagtatgtgataaacgacgacgaggcatgtagtggttaggtttgcggggaaaagaggagaagtagctgacaccattcaatttgaaggcgtggctcgtggcgaggacatttgtggtagccattttagttaccaacgaaaagaataaaatgaaagctttaagataaaaccaaaaaaacgaaagctttgtttttgtcacaataatgggaagcttaatttgaagtggtcttttttagggctttagtgggagtgtatatatagagaaagttattagttaggaattaatgtggttaggtcgcggatcacatgtggacctagtgaagctgtgttttggcctcgtggaaaaatcaaaaacgagttatattttgggtgtgaggatatactgtacaaatatagaaaaattccattagaatttaatgccataggtttcgggaaatgtgataacaaaatctgtatattttatcagtttaattctgtaaataccgaagcaatttaattaaaaaattcgcaattaattcttaaaaaacggggaatgtaaaagtttttctgcactttgttttcaaaatagaaaatattttatttgtttcaaaatataagattgtttggttaaaatcacacattttaagagatttagttttttctcctttttaagtataatttaatatttattttcaagaagttaactgatttatacaaaaaaaaaatgaagaatgcaaacagtcctaaatatcaaatatttttgaaattgcatagagatttgttgaacatgtaatatattttgaaacaaaataaaaactctaaaacataagctctagagttcagatttgtacacgttggtcgattgtgattcacgaagcttttcttgtaatgaccagaccatattacatgcaatcaaactaatcaaagctaaggtgaacgaacttctgtgttttggggctaaatattcaataacgtttaatgtgtaccctacaatactgatggatatatatggaaagttacataggaactaatgagggtagctgggtagtctcgataatgtgtcatattgtgagcgttgtggaaaacaagctttggtttatagccgtctttcttgtcaatctagttctctatcaattctaaatgagtaatatatactgcataccaaaacaaaacaaaaaaaggtgaagagaccttcttttgtattttgcacatgtctaattatctaactggtctaaagttcagatttgtacagaatgatctcaggacttccccacaacaatttttcaatcagcactgtaacaatcaatttagcaaaccgaatatcagtttacttttacaagaagaaaactcttttttaggtttttttttctttcttaatgacactataatgctcccagtcaatgcctctcgttagtaagattttgttatctttatcacgctttaagttcttgattaaactttcttgatcacagaaacttttttcttgattgattcataggtatgtccatcgataagtctactgttgatcaaaagaatactctgcaactttacacctgatgagttttgtcctgatgatgtctctggggatgtcttagaagagcttaatatataacgaggcaactaattcaaatccttcactcatttgttctctgcgtagcactctatactttttttgtttgtttcttatcagagcagaagttatcaggagttagcttcccttacggagcttcttctgtttcatacaatcctccatcatcactcaattagtgtagcagagaaagttgaacacatatccctgccaccaatttctgcacatggcaggaatgtgaagcaggaagctgagcaaataagtgcagtggtaacaaatgcaagatatgagcttcttagggaagtgtagactatgtgactcattggaagccaaatgtttagggaaccatcaaatgaaacaaactaagtctattaacaacaagatacctttctcctggaaattttcatgtgtttcttagttgtttttgtcctcaacatactaactttcttcttctgacatgttgttatgttgggatttgaatctataatgtcaaattgagaccaataaagggatatataataaacagaatctgagcacaaatcgatggaaacactcagtactctgcaaaagagatggtgaatctcattggaggaagaaagaacacaacctaaatcttggaactgcactgaaaacagaaaattcccaccaggtttcaaaataaaacataagaacagctcagactgttctaggaaagtgcccgaattcaagcatagtgaactcaatggaatcagagcagaaaaagtccctccgtctttgctttgaggattttttcttaagtttccgtctctcttcttctgggtttacatagttctgtgatcaatgccaaataacgcacagagataatttctcttattgttttgttgattaaagaagaaattatgagtaatagaagactaaagcctattttcttaacgtcccacatcgacaagttagagagcgttggtcataagctttgtaatatataaaggaagctgagccaaacgttcacttcatacctttctcggccttttggctaagatcaagtgtagtatctgttcttatcagtttaatatctgatatgtgggccatcggcccacacgatattaactctattttttgagggagaaagcccactaagatagcttgctatctgggctttcaagagtcgcctatgcgttgcactactgcacaggcttggctcaacccgccaaatttatagttgaagtgttgaactttcaaacttgttgataagggataaaatgtgaatacagaaattaattcggattctcaaacagttattaaagtattgtgagatttgataagtaaatctcttagtgaaaaatctgcaggtactagaagttaatgtttcagactgaagctacaatagcattcaggtctggttttctatctgcttgagttcttttgcaacacctatcatatgaagcttggtttctcctattctgaatctaacacatctcaaaacaagatcaaccaatgttttcatttgcagttttgaatgatcagaaatgtcgtcatccgcactgtttaacatcgatgggtctatcagtttagttaacagtcctcgccttaaacacttttcaacataatcacgcagcataatcaggttataactgtcaccattacccggttcttgatagtattgatgctttcatgtcaaaagacttagcatgatgaatccaaccctgtagacgtcaacattctcagtgacaaaacctatagagaagtcgtatctgtttccgtttgtttggattaaaagcaaagtcaaattattattttatatttgaacctatggaaaaatcagagcagggaaatacagagtaatcaactatcatcaaatattgtacgaccacacaaactgacaatgaatttaatctcctcacttatcatttcaggcttttagctatttcagatttgatcccatgcttgtcttctacaatgtctccaactactggaatcagcttgctcgtcatgaaggcttcgtaagagcttacatgcgcttgcttaagaagattgaacagatccgagcttatgatcggtgtgaaagacaaaaagaaagaagaatgaaaggaaaaagtaagttcagatggaaatgtttaaagaaaacctcatcagagagtctcttgttggctgattcttggtcattggattttatcaaagaaatatcttctccaatctcaggacttgccctcaacaatttctctatcaacactgcaacaaacaattttacaatcctaaactcagtttacttggaccagaagaaaactctggtagagggaagaaaaaagtgtaatttgtgtatttttggacggcttttgtgtgataagctttataaaactgatgaatagagttttgtgaatcatcctaaggagatgaaacaatattggttaatactcaatacatgataacccccaaataaatacattgttcaatttggagactttagaagccaaagtaaccaagattctctacactaaaaagaatctctaatgtctcgcaaagaaaagcaaaatcaatgtttgctggtttagatgagatgaatgctgttgttggttgttggagtttatggaaacaaacttttgtggctataagtgttatttgtacggactttcccacaacaatttttcaatcaacactgcaactaacaattttgcaatccgaaatccgaatatcagattacttttataagaagaatactctgttttaggtttttctttctttcttaccttaagcaagaaacccttttgcaccggtaactagatagcttttatcaaagaatatgttatttgtgagaaagcaatcttgacaacgtaaaaccattttgacaacgaatgtgagtgtaagaattgtactcggccagttttgtatagttttaacattgtttttagcgaataagatttttattctgaggatccggactaattaagtctctggctgtcttccgttttgtattcatttgcaaagttgttaattttaatgatggtcctgagtgagattaaaaggtaagtcgaactttaaggttaaatctcaacagaaacagctataactttataccaaagtggaattacgatgagaactcgataacctgacactttttttttgtttcatatctaatcaagtttttttttttttttttgttaaaacatgttttcaagttctatatgttgtcaacattctaatatcaatttgtttttagtactatggggattttttggtctaaatcaaacagcagtaacgggtacattgggtatatgaaaatactcaatatgaacttgaaggcttattaatcgctaactttagattatcacatgtttcttgattaaatagaaaatatgttcatacattaccgaagttttgatgtaagaaaaaacaaacaaacaaatttaagaaaaaaaaactgtttacaaaacaacttactcatatactaattcgcatcccaaaccctatagtaattaacatatccatgtatcaatttgggggttaaatttatgtatcgatatcataatgatatatatctactagatgaaacccctaataaaaactctgaaagattatcacatagaatcgatgcttccaaagtcattgacattgtaaaacccattagagaaaaacccagaaaaacctgccgacatctgatcaggtaaaaacatgtcttccgcattcaacggctcataacaatcactgtctctctcaccgaacggctcctgatgaagaacacgtggcgcaagattctccgccggtggagaaaggttgtggtcgtcggaggaaggggaatagatgggctccggttgaagatcgacggcgtcttggcctgtgagttcttgaacgagctctctgaacttagaagcacaagtttgaactctcatggggtttgagatgtaacgaactttgatgggtttattcgtcgaagtcgtcttcttcttttgctttggtgattttcttgaaaccggagatggttttttcttgtctaagcttgtcgtggtgagaaaagtcgacgatgatgactccatgttcggttcctgtaagagaattcagatgtttatatgtgtgttttgatttattttcttaaccaaatctctagcttcgacgattatatatataatgttttactttttcatatgtttggaaggtgagaggaaattaatgggaaggagaggttgcggataaaagggaacaaacgtattgaatgacggcgcgtgtagctcacatgtcttccgataggtgggatgattcgaaatatctaacttttgaagattagagcgtaaatctcactcgcgggaacagtcgcgtggtggggaaagggaagaatagagataggttaagtggtgatcaaggcgagccggcggctgctctctcatctcatggagctatcgttgaagctcctccacgtgaatgcaactctcatccaaattacgacgtcttacatgacatcaccataacccttacgaggtgacgtcactcaaccggtcactgaagtataacatgtcaattcgtttttttttttaacatcaaaatttgaactggtaagtgattttaagatacattcacttcaaattgtaaagttaccgacgttgtgtttctatttcctgcatgttagttagtttggtctttactattcaaacagattcgagaataggtgacataaaagacattttccttacattagagaataggtgacataaaagacattttccttacattagttttacagatacaagttatgtagtacgatatttttatgtgtttataggacatggttaggtccttgttccctcaagagtactcgacgaagtttattattgtttcatgcggaatttgattccttgctatagacaatggaatacatgatctatattgacgatacttctggcgcttttgcttccgactgttcagatctgatttttatcattgacaatcaagaagattggccgacattcgcagcggaattggcatcctatcgctccttagtttgttttttccttcttttcgtattagatttcttcttcgtagttctaatactcgagcagattgtttagctaagaaagttcggactcgtaatagctttttctcccatgcaaacacatcggttcttgaatggctctctctagcggagagtgtctttccgataactaatataattgatgttagatgaaaaaaaaaaaggttgtgtaacttgtgtttatgaattgatttcactttcacgtgaccaaagtaaaactattacttgaaaattactaactgaaatggaattcatgtctatgttttctaaaagacacaaaaaaaatgtctatgttttttttctatttactgataataatgctatacaacactaataagaggtattgattattattattattagacgttttaaactttttgacgtttaactatggcaaaaaaacacagtagaacccataaatatatttatcaacatacattagtgtcgagtacaataattaaaaataaaataaagcgaatattaattatggtaaggattaagaaacgaatgggaggtgaggggtccacgtgtgcaagtgggaagaaagcagcagtgtggtctcactatcactctcctaataaaaaaaaaatgcaaaaaacaagtcttcattaaaatgtagggtctttgatctccaaatattagtgattaatgcttaattaacgtctgatttacggcggatttataaatgataagagaaaacaaagcgttgatcatatgatttaatgttttaaaaagtcaaaataccaattttatttttacgacatgagaaaaaaagtgttatcaaaaagctaattagtcggcttacaagaagatatgataatcaacgattaaaagcatcttttgatcgaagaagatcttcaaaagtcaagtcacgtgtatacgtagacgtagaccctcgctctttccacttctcctgaccaattcatcaattttcacttttgtctctttgtcgaataattattttttcagagtattaccaaaacaaatcttatcccccatatattttctcttaccattatattacatgtttcaactttaaattttgaaattattattttatttcaaaaaatattgattttatgaaagtagatattttgagatgcttctaattacataacctatacaatttaaaataattattcttatttcaaaaatattgattttaagatttttttaaaaaaacatatattttcagatgcttctaaatacattggaccaactttaactttttcatatttttattttggtaaagaccaactttttgatatatcactcaagaatttctgctgtattggactaatctttctgaagtttgagatgcatcattttagttgcaggagactcaaactcgaatccttttcattcttctcgtatagctggtactttcttatatttttgtaagaaaaaaaaaaaagataagacaaatttaagtgtaaataaaagttgcaataaaataaacaaatattatacgtgttagaatcaggatgatcagtaagcacgtgggttgacttcaaagtaaacggattcaaacgactttttcttccttgtagaaaaaagaggttttattttttaacttcttttttgccatgtaattcgtgtatatcaagacaaaatgttactagaaactaatgtccacattcaacgtacgtagaaatgcaaatatttctagaaataattagacagttgcagaaacttttagaacaaagttgattttttaagaagtaacatcgtacttgtatattatcaaaaatcataatatcgtatattaatatatacgcgatgattgtgacgaatggaaaatctagagctgttgatacgggctcattcttacatatctttatcattggaaaaatagccaaaaagaaaacccatgtcaagtaagttctacgtcgaacctgtatatattcttctatacgtcttgagagttatattaagttctttttataaataagaaaattcgcataactccttaaatttcaattttattataaaagaatatggtccaccaaaaaattcaaatcacattttatagttttctcagatttctttggcaattagataggagagacgccaatggtagacggacaaatgcgttatgaagatgtgacaatttatcgatgaaagcattatcatgttttaaccaaaaaaaaaaaaaagaggtatcatgttgggccaatgcaagcatgtcgagtatcaaaaacctatgaaagagtcaaaattctgggtccaactttgatgttaaaattcatgttcgttttgatatctgtaactgttattatcagtccacaatatcaattgcacttcaatatattttttcctaaaattgttttggtgattatgagatgagatttctcctaaaattgaagaccgtagtttgaatattttttcactacgacttttaatcctataaaaaaaataaaaaaaattatgattcgatcatcaaaatcgtgtcacatactttagtctcgagaagtcagcccattatacaactaaatgggctttctaggtccattaagtctcactgcttccccaaatctgagaaaaatatcttccttggaaccctaactttatttccccaggatagagatagggacagagataaactacactgacaataaatcgaagattgtcaaatgtgtcggaatccttgatcaacacacgaattttctcgattatcgattcgatcttctaatcttgcaattttgctggaaagttatcttcgtgtctcaaaactccaccagtgatcggtgagcaaacatcatttcaattctggttcccttcatatctatgttgctcaattgatacgattataaaacagtttgtgttgatttcattttttttcaggtatcaagctccatggacaccgaactgaattctcctccgcatgatgatggtggtgataccactaccgcttttcgaaagccttccaatgacgggactagcagaaaatatcgccgtcgagctttagctgacgatggctcatcttcatctgatggttagtctcatatctcgaaattttcattagcttaattattatatagactgtaacattagcttagttgattggttatagcattttaagtgatgggtcttaagacctgttggttatatagcatctcctcttttagttgtagccatagcttaaattagaactgttggttcttgttttgtaggaagtcctgaacgtaatcagagccctaatccaaagcattctaggaaagattctgaaccagttcatgtgaggaaagaggatagatgggaatctgatcgcagtcgttatggtagaggaggtgttgattcacatagacatgataggtactctagggatgataattacggatataagcgtgatgagtataacagacatgggagggatgcgcgttctactagccgtgattcaagaggtggcagacattctgaccgtagaagagtggagactgaatatagcaggttaagaaatgactcagacagaagttcccatgataagtatagcaactctggacatagagtcaaaagtaacgagaaaggtgaagatttgtcatctggtaggagacactcagactcaagagtggaggataatgagaaaagaggttctcgctggggttttggtgaccgtcattcccgtgttgaaagaaaggaacatgaggaccctgagattagcaaggagaaggaggttcatgtcaaatcttcaagagaccgttctgatgggaaatgtttggctacagaggatcgagatactcattctaagaaactgaagggtttcatatcagacaagtttactactggcaatactaatggtaagacttttgttctgttctttacaaatgttttctttctgtgttatgtagatccttgctctaagttatagatgctgcagcagaagagaaacagacatcaatcttaaagccttcccccggtgatgttgatgctgcaaaagttgcagctatgcaggctgctgaattaggtaatactgttttgatgctattctaaattgacttgtccttgtttttgtatacttatgatcttgccatctgaagatagttaattgaaagtcatgctttatctagataatattggttctattgtaaatgcttacagaaaagcctactcatgtctgccttttacctagttcttaccttaactgttgttttgcttcgatgaatccagtgaataaaaaccttgttggaacgggttacctgacaacagatcaaaagaagaagttattgtggggaaaaaagaaaagcacggcttcagaagaggtaattcaactgttcgtggatatgtaatataaaccttaaactcagagttttttagtgattcttcttttgcttataatcctctgaaacagtctgctcatcgttgggataatgcgagtgcgctaattggtgaccctgaacggcaagaaaagttcaacaaacttatggtaaatctcatccttccttctctacgtacatgttttgcttctattgattgttttcctacctctgtgaccatcataatgtagggcatgattccaaaattttgcaaactctcacttagaattttgcatagagttggttgtgtataaagtaatactaacacattttcagagtctgaggttgcgttggtgcatcattgtagggtgtgaaagcgaaggtagtaaaccaagagcaaaacctgggcgaagtcgaggccgagaagcagaaagagttgcagatggatctagagaagcagtacacagcagggttaaggaggagagatggacgaacagtagggttaggtctttgaacctctttggtaaattgttcgcatactcttgtctccttctaagcaatcttttagcatcttctttttgtactctactactcttgctaaatccctttatttcagttacctcaatgtgtgtaagaattaagtgcagtaaccatgttttgagaccaccctagtttggtttttgattccgacctgaagagagagacgtagaattgttgtcgaatgaaatagaattcgtggactctaaagtgttaaacttattaagctaagcaagataaattcaaaatgtgtcttaaaggatgagggtggtcaaaggttctactaaagagcggcgaggatcttctcaatctcttcttttttttttgaaatgggccataaagcccataagtaaagaaggtggtccatcaattagtaaccttgagattcgacattcaaattctaaaaacggtagtgatatgagtattttcaaagctgtcacaatttgtgtttacgtctttttgtttttttatcctacataagtaaactttctattcattatgaacatccgaaacgaaacactttttcaggatccatcataacccctacatgttgcatacttgcatatggttccaataaaaccctaatatatcctcctatacttttcccgcaggttagttcttcttatttcacaatcaatatcttttgcctttttggttatctgccctggttatataattcgttcaacaaattaatacgttttttttttttatataaaaccaatagctttgtaaccacccctctcgatcaatccgtcaaaaccatgtataagtctaacttcgccgtccatagtaggtctggctttgctggtaagatctctcttgaagcgttagagatctgtttgttgttttgcctctttccataactgtctatatctagatttgatgcttttacctctgcccttttgtgggatttgaaacggatgaattctgcaattgaaaaaatcccatgtagatctgttccagttcagcttactgatctgtttttagtaaagcaatcaattgtattattcgagttttcagtttagtaaagtaaacttagtatgcgttttccgttttgtacaggtgggaaaacattcgtcttatgggacgtcgaggtttgccctatccctgatggtcttggtcctcatgatgttttcagtaacataaaacgtgtccttatggataatggttatcgtggtgatgtctcaactacaccttataccgatttgacaaaatcaaatggtgagtttaatggtattcctgtccgtcacctatccgcaggtgaattccttaccctttcaattaaactctcattctcctttaaacttgtatgtcttgtatcttgatatgttctcatatatgttttcaggagatagagatgcgagacttgaggtgtatatgatagacttatattcttgtgttgtgaaggaagatggaccattaaatttgatgctatttgtcggcgacatctcatcacgcagcaaggacttcttcagggtttttcgtttgttgcaatctagctcatcagactcatcagtaccgctatctttaacccaagatgggatttgcaaggccctgacatttggagaagaggttatcatcagggaatgtggggagcgtcggaaggttccaaattctgactagctttgtctcctcaagcttcttctttctggacaagtatgtttgtattgctttttttgcaaggctgtgttgtcttttgaatttctttgcataaaactaataaatgtcttctttcatctttcttttgttccttcatgaacaaataatacatctctcccgtttcaatcaaaaccgtttatttttttacgtacagtctgttgaatttaaaagctgtacatgtttcaaagttccaatttctattacacccgattctgtcacacatctgcagctcactggtcatataaaataattaatgagttaggtcaattttgtgcacgatttagatggagacgaagatagggaaaaaaataacagtaggaaaatataggcccatctattctccaccgtaaataaagattaattatttctctcattacttactacaaaacgcaattaatttgtgctataagaaatcttctggactattctctcttgcctattgcaacaataatgatatgttttatgttgcacaaaaaaattaaagatgtaatgattttttatacagtactatttcgtaattgatgtttgatttcgaagcaaaaaattcttggaaacttccttctcatcagaaagaagaagataaaaaggttggttgttgttgcatcgatctccaaatccagattgattcgtcacgaaatctgctcaccggttgtttcgtcgccgtcctctgttcacccaacgaagatgaacggcggtccctccggtttccgtacgtatcgtcttcctctctaacgcttgatcagtttcttctctgctcctgatttaaatgtcgatttctgagtgatgaattgttgactttgcagataatgctccggtaacgaaagccttcgttattacgagcgctcttttcactgtcttcttcgggatccaaggtcgttcttctaagctcggtttgtcttaccaggtatttcgcatttggtgtagatttctggggatttactttggaaattgctgtatgaacctagaatttgttcgattttgatctattagaacaatatgcagtacttagtgtgctgttgccttactgttttgaacaaacgttgttggcactcggaatgattctcgtttcgctaattatcatcatttatgagcttcaacttcgattttagtcagtcgtgtgatgctgaatattacatgatttgataaggagggtttagactcacttgtcgagtgttaagtagttcgatggcttgcatgtaattatctgtttctgttacctgaaagatgtttgattctagcatcctagtttatgattctaagttatttctacttgttatgtaaatctgatatctcataatactatttctctatttaatcttcttccaaacacgctgcaggacatttttgagaaatttcggatatggaagttaatcatgtccacttttgccttctcctccacaccagaattgatgttcggattgtatttgctatactacttccgagtttttgagagacagattggctcaaataagtactcggtaactgatgcttgtagctcgactctctttgcttcttagatatattctcatgtgttttatgtttttcttgttcacttggaaaactggtttctagaaaggtttactggtgatgattctttttttcgttttttatatttaaatttcactattttcttttacttacaaaagttaaatcaaagggtgttgttcctgctgcaggtttttatcttgttctcagggactgtatctctattactcgaggtcattttgttatcactgcttaaaggtatccatcattctatttcaagacaacctctttaaagcctttgatttggcttataagtaggatttgcgtggtggttgttggttcacttaaatttgcttcattaccactcctacaaaaactatggaaaaaaatgcaaaaggaaggattgtggttctctgattatgatgtgggagctgatgagttatgattacattactgcgatggtcttaattggtttcagtatccctcctatctttctttttgttctaatattcatgaagatctcttacaagatattgtcctggtcatgaattcgattatgtgtttcagttcattggtctttattgtatatatttattgcaactatatgttgtttgtttgtttctcagataccacagcaaacttactaacctctggaccatacggcctgatatttgcttcgtttatacccttctacttggacattcctgtttcaacgaggtttcgcgtatttggtgtcaacttctctgataagtcattcatatatctcgcaggagtgcaggtaattaaaaccataggtgtttgtatgatcattgttgttcgagtagtgaattcttagtattgataatcttcttttttttcttttttttttgcagcttctactatcttcttggaaaagatccatctttcctggaatttgcggcataattgcgggttccttgtatcgtttgaacatccttggcatccgcaaggcaaaggttatccacatcattatttatctctctgtcaacttgttggctccttagttttcaatgtcactagagtaacactaaatttgtctgaccacatcacagttccctgagtttgtggcttcgttcttctcgcggctttcttttccctctttcggtaactctcctcctccagcaccaagcaggaacatcgttgggactatatcacctaacacagggcgtcgagcagaggtgagtcatccttttattttctcagtaacatccggtttgcctttttgccaaactcttagtgtcatctaaaacgtttcttcgtttacagagatctcagccagctccgttgccctcaagtgtggagccatctgaggaagccataactacattggtatcaatgggattcgacagaaacgcagcgagacaggcgcttgtgcacgccaggaatgatgtcaacgccgccacaaacatccttctcgaagcacagtcccactaacttaaaaaaggttttactctgaatgggaagaggcagaaacattgttaattccagctgatgttttcttctgctgctattggaccgacttttggagccaacatgatcacaccatgtatgatccggccaaagatctgaccaaacttctctctttatgttcttagtttaggaaaaattgtgtaggttatgtagtacagatttgcgagttaagggaaacgctcagaagcttacatatttgaaacttcaaaaacttcaaaaaacacagattttactacatctgttcttacaaaacccatttacacaagagccctctggaaagccaatgaaaaacctctaaactctgcaactctgttcttgtttttacatacactgatttagcatttgactacaagaacgtgggaaatcataagactaaattatgagaccttgtaaagacgcacaaactttagcttgcttcttctcttctttcatccatggtgtatactggtatttcccagttcttattcttcttaggatcatcagttaaggtgagatctgtttcgtactctttgaatgttttgaagtatgttttggctcccatcattaccagtctctccatcatgaataactggtaattattctcgattataggatccagaatctcgctaaagttcgatgagtaagccagtttgtacctgcagtataagcaaatccgaaaacatttcacaacaagtctatgtatatgtataagcttgcacacctaaatatgtaaccgaaacatctaaaactgattcgactaagactttccgaggacctgatcaagattaacttacctgaccgcgagaggagagaaaaaaccaggcttcctctcattagaaccaataaaaagagtccttcctcttgggatccgcttctctatcctgcgaaggataaactcagggcgcgtatctctgtctagatgaggaaactgaatcctttcaactccaaatctgtcttttctggttttcagtttgtccccacgacgaacgtggatggcatcataatcaccaagttgtgcttttatctataaccacaccaaaacgtattcaagcttaaaggcttcactcaagatgcagagtaaacatcaattggtcactaagcttattttgcaagagatttttcacaaaaagccatcaatatcaatatcttgcaggatatgtatattggttgaaggaagcattttccatgataccttttctgcggcgtttctcaattttgcagctgccatattagggagaaatgaataaggaagcatgacagcgctacgattgcttctatctttgcactcaacgaacctacatcaatattgccaacaatcacaaatgagttaaaacggattataattaagttaagttacacagaatttcatcagcttgatcatgatctgatctcaaagattcaattgtgcctaagaaacccaacgaaaagaataaaagaagtgattaccatgcaagaggacttgcggttcggttaatgatcaagagatttgagtagtgactctctttaagcctatgccgagtgactccactaacatgtgcaatccctctttctcccaacttcatacttgtggatagaacaatatgccatgtcttagagtcatctaatatcaccggtatcttctcagatatgaggtcaatgtcatacaatgagtccattgcacaagagctcccaagccaactaagacatccaaaagcaacccttgtgttaagagattgacactaaacattccccccaaggttgcaaacaagtcaagcggataacagaactcacccttcctctgtagttttgttatcagatcgattgagtatacctttcttattatgtattggatttatgcacattccagaaggcattacaaaggtcctgcaacaagaacattgttatgaaactgatcatgtcaatttgccaatttcatagcgaaaggttccattttgtcttgtacaaagctcagagaggaaattcagttacctgttaagaaacatggcttcttcaagtgcacacctgaggctagattcttggtgacccaagccagcacaggtctcgcagtttttgccaggacaatcgattctgtttccccaatacaagtacttctccgacaacgaatgctgtctcttaccacgaggagaccacacgaaatagtcgattagggtttgttgataaggcaatcccaatttgccggtggagatcaccgaagagaagaggaggaggaatgagaacacaactatacagaacagaacaagacgctgagatccagaagtgggtttggtcctttgagctttgctcattgtcgccattagagtgtttcaagactgaacaatgtgagcgaggaagaagaagaagaagaagaagaagaagaagaagagtcctcctcgacggttacacacagaagatccgatctgaagaacggtcacgtgaggttcatctccggcggctgtcagaagtgacgtggcggatcccaagctgatccagagatagctcagattcagataatgcttctcggcttgagaactttggctgccatccaaagacacactcgagctcgacacgtaaagtttgccgcacaacgcctaagcaaaccggtttaattaaaccgaaccgaagtgaaatcggaacaattcggttcatctggtaaagtttattttgttcaaaaaataagattcttagtttgtaaaataacttgttcaaatctttttcaaaacaattatgttcacaaattttgctctcttttgtttcttttttcaaatctttaatctaattctcttctacgctttctgcaatgtacgagaggagacgccgtgtaagagtctgacaaaacccaagaaacttagcttcccatcagaatgtcttatccaatcttgaagaacaacatgaacaggcaccgatggacctagtccgagttcctgtcaacaacaaaacaacacatatgcacaaacgcatcaagcgccaaccaaagacatcggtgatatcacatctcgaagagaagttttataccgtggcaagttcttcgatcatgatgactctgttcccatccttctcatacaactcatatgcacggcgtgcatgttgctcccaagtctccattgcttctagctgatatacacttaaagctgaagcgcaaaactcttcaaagtctagtttcttatactgaagacaactaatctgcaacccaaaataaatttttattactatcttcacccaccaatgaccaaacatagtgaatatatcacttatgtcctcattgccttaccatgtgtacaaaatccaagactcgtgaatcctttgtagcttctgtggagctcttcaagattgcctgcaatttttaatcacaccgtaagaaaccagaaagatacaagtatgaagaaaagaaaagcgaataaaatagtaactcactgttttataattctgcatcgagatatatccgtttttgcttggtcctaacagattaaactgctcttgcaaataagtcagctgcggtactgttaaagttttggcaagagcctgtaaccatgaaaataacagttattgacttttcatctatttgacctgactatcaatggtaactactgaagaatccaactcaccgctaaagccgattttctcaaagaagacgacattatgtatacttttacgagcttgtaaatgatcatatcagatggtatctttaattcatgtgagccaaccagccacggatggcctgaaacagaagacaaattattgttcacatatatgtttaaaagcagaacagtatgataaatattactgcaatagaagcatcaagttggttataaagacttacataaagcctgtgcagcagttagtctcttacggtaatctttatttaacaaacgtttcacaaaatctacagcgtcaggtgaaagagatggccaaggagcttcttcgaaattgggttctgctttaagaacagctctaaagattccagattcagaacgggcccaaaagggccggctaccacagagtagtatataagcaatcactccaatactccacatatctgcctcagttccatatgtacggtgtaaaacttcaggggccacgtaataagcacttcctacaatgtcattcaacctctcatctgcagaaagtgtagaaacagtcaattttccatataccattgcgataagctttaacaggagaatccttaaaaacttcttacctggcctgacatagtcggagagaccaaaatcaatggctttcaaaggggaagactcatcctttgtggtgaagagaaaattctgtaagtgaaataaaaaagaaacagagagaaagatttgttaagaatgagagaacgagctggaaaccaaaacaaaatggttaaggatctattaacctcaggtttgaggtcacggtgaaccacgccttgaagatgacagtaggctactacactaagaatctgaatcattacttttttagcatctacttctgagtatttgcctcccctggttagtcaaaacaaagaaaactcaaccagtcaaagcacgatacaacaaagataagacagaatcatgtatgatgtaggagttacctttgaagtattttgtccaagagttcaccgccttggcataacctgatcacaacagaaaaagaaacttattaactactttgatctcaatcagttaattgaaagatgattctgcgaaagcatggaaatgagaaatctatgaagcaacttttacttactccatgacaatgtaaacattttcatcatcttcgaaggcgtcatagaactggactaggttcttgtgaccagttaaagcccgcaatatcttcacttctcttctaacatcctcaattgcaattgccgtagtcatctaccgaaaatagcatccacgatattagaaaagacaaacggttaaatcaagaagagacaattggtttatcaacatcactcaagaaactctattctgacaacgtactcagtctcatacgttcaaaatccaaccaacagataacaattgacagaataagacttctatagtggataaatgcagacaacttaatcatctagcaatctactatccaatgatggttgataaagcttctcagtagctcacagatcttaccaatacgaacaatgtaaaccatgagactagctaatgagctgataccacacagcttaacttgacataattcaaacaccaaccaagcaaattgtttctgacaacactccaggaaaaaaatgtatcaaacaaagttcctaaacaaaatgcacgagtcaaagttccagctaagcctaagcctaagcctatgaactacacatggcaaatgacaagtggaacctaaggcatgatcacatatcataatagcttcaaaggaatcaacagatcatagagagattgacagtcattacgaaccttggatttgggaataactttgacagccacatcttgacctttcaagctaccttttttccccttagcagagcaagtataaccaaaatgccctcgacccacctcaccgtcaatctcgtagtgtgaagcaaactgcttagagaaaccaaatttcttgtccaagccaacctcacattcactaccttcagggatcgaagcttcattgggcttaacagaaccgtgacgacgcgcgaggagagctcgtatatgcttagctggtgatggaggtgggaaaggtcgcttaaagatacgaagtggcgtggagctcacgctggaggatgacacagcaggtgaggttttgaagagactaggtaaagggcttggactataaaacggaaagcctgaagatttcgccttctgagatgaattcttaggtgtctcttcgatttcattggagattgggagattcttcgattgttgttcgataggtttcccatgacacagccccatcaatggagatcaaattgagcgtaaagagagaaactttatggtttcacacaacaacacaatgtcgaatttagattcaatttccactatggacaaacttcccgggaaagaaacgaaatttctcccgggaaaagagaggagacgcaaaacccagaagaagaaaacagagaaaaggtaaagcaattcgactttctaacaaatgggaatgcgagatcaaagaagattaaccgagacctaaatcagtaagagtgaaagagaagatagatatgggaagaagaagaagaaaaaaagaagcaaaattttcagttccaatgagaagaaaaggtaaaagaaaaggaacaaaagcaaaggcgctaagaataaaggtagtgagagagaagggtaaaaaagtaaaagatgcttagcaccatgaaaaaaaaagggcatcaaagaaagagaatcaaaagaaagaagtttcttttttgtttttctttcttcaaaataattttaattttgttaaaatgggatcaatgtgtaagtttagtagctaagaaaaagtcatattcctcaattttcttttcccattcgttgatgaataataatggaagtggggttttgctaagttttggaacataccttaaccaaaccagcctgtcttcattctacacataacccaaagtttctttcattcccaaatttttattaatattcttatggtttttgtaatcttaaatcctttcacccatatcatgaacatgatgaaatattagtaaaatatgaagttggtgtggaatttgttattgcatatgttatgtgaagaacatggcaaggtgtgcttgtgtaaaacacaagtattggaacttcgcttgtttgttgggctccaaactttgactaacttttacgatctttgatatatatttgtgttttgccccttcttctcttactttattgattaagtatccatctcattctatcgttttatttttgtcaaattatgcataggataatcttacatatatataggctttatgtttgtcaaattatgcatagagattatagattgacatctttttgtttgtatatggaatgatttttgtgtaataatttagatttatctttattagattgagttgatcattactaaaataatactaaagtagagtagataagctgtagttttgttttactagtaataaaatatagggtcacaatgatttcttccattattaaaccatatagtactttataaccttgtcccgtaaatgcagtgtctatgtatttgcttgtagaaaattaattagtttaagttcatttttcttttctgaagaaagtttgtatgttcaaacatttgtacttgtatttctatatgttttataaatgtaaacggtgctagctgtagacctcacgcaaacttaactttggttggaaatttgaagtatatcaactaatgagtatttaactaaacaaacgtagttatcattgaattgacttaaaataaacataatttggtgtggagaataaaagatccgagaaaacacgaaaagaagagggctagaagcacatgcatgttggatataatattcctcttgcttctccgactatgactttgatcaatcattgaatgtttttccccgccaaattaagttcattgattacacaagcttttaaataaagtctatattattacttatcaaggttattatgttgataacaaattacattgtcaattttgaaaaatgtgatgttggcatttgtcccccaaatgtaatatcaatagcgacattgaattttcttgatcgtgaagaaaactcactctttggtctttgcctcgcataccactacagaagcataatcagacgaataatacttattaattattatactatatgattggatcttcgattcatattcctttttttctcttttctgtttttgccaattattgtgttatacaatttgtataatattgtacagtaaaacggaataatgttttaagagattcttgcaaaagattcttcccttttttcttctataaactataacaaatattccttgacgacaagaaaaactacatatctcactctaatcatcatatgttaatatcaatattcttaacgcatgaattataaaaagactataggtaaaatgatcgtaacaaaaaaaaatgatcgcaacattcgaagttcgaacacttccagagaccagagcgtcaatttgttgcgcaatagaaaacgtgaatttgtacttctttgtaaatctaaataatttctaccaaagcattgaattttccatttttctttcataaaggtataaaaaataatttcaatcatgtgattagtaaagatttgattttcttttggtagtttgtagatacaaaattttgggagattatagcatactgctaattgtacccttatattgttatttaatcaaatataaaatcttttgacaaaaaccgtgaataatgatttcatagatgaaaaactaaaattggtgtggaaagttggaaacttaggagaataaagcacacaaatattaatgttgttggccagtaaaaacaaggaaagtttctcaaaaaaaaaaaaaatattttaattaaaatagatacattaattattatttaataattgaactaatagtatgatgacacttgtccaaattggatgagaataattactcaaagtttctcggaagagaaactcaactctccttctctcctactttttctctcttttttcatacttttttttttaattattatttttttggttgggtatctcattgagatacttccaatggagatgctcttacattgggtagcaaacaaatccaaaagcaatgaatgaaatgggagaaaagtaggaaaagcaaagaattcttattccttgattccctcatctcctccacttctttataagtctgtagattcgtaaagagtctaaattataaaagctacattttttttttggataagtagatgattgcatacgcactgaattcctaactatatgtggaaattttccaagaggaactatggttgggtcagttttttgtttttgttttagacaattgttattgggtctcagtttctgaatgtgaatcagttcttagcctggcccaatacaatacttactagtggatatcgtttcgtctttcaccttgttactggaccttcagccgaagacttgtcgctttcttccactgtcataagtaaaggtcaaattatttctatttctaatgtcatttatacaaatatatgtagaacattatctgttttttcttattagatactactcgagctaaatcaaattgggctaaacccatttaactcaagacgcagctaacctagctaacagtcttaacactactgctcacattaaagagtgattgctcttcctttttgtcaacattttagtgtgttgttagtgattgctctgctgtaaatccatattccagaagaatatacaaattcaaattgtactttgttactatagcttattttcaaaatggaactttaattattcagtttttgtgaaaagctaaatttatgttttctttttggtcgagaggttgagtatcgaggagacaccaactccatctacaccatcacgcttactagacatactttctcgatttatatttttgctttactcttttttatttcttcaagctcaatatgttatactctctagtatagtctcccaaactgcaaaagcctacacatttcacgtcagagtttggagaagttttaaaatgtccaaccccttaaatggtcaataatgacaacaattcaagaattatataacataaaagtctgtagttaattgctcatatttttcatatatactaaccttagccatctctcgaccatttatcatgtttcagcaccaatcaaagctttacttagaccacatcttctattttctctccaaacagtggagcgatgtgaatttatcaatttaaaatacaacagctataaatccatttatagctagttgaagaatgtgaattcgtgccttacttggtgaaagagtaaagaattaaatcataaataataatccttaaagggtattcaaatgtaaaataaaagaaaaaggaacttcaaaatcatccgatgtcagcacaggaaagtgaaggcactgtggtatcgagataaataaattaatcaaacatgcataagttaagaaattcacccatacatcacaatgagtctactttatatattaagaaattaattcatccccacaatccatattatagagtagagaaaaatagaaatgctttttgtctcatcgaagaatggccccatcaattctatccttttctcgtttctattttttcacgcctttaccctgcctcttcattgtttgtttactcttttttctaatcaaatagtaatgtttagggatacaatttagtactcataatattttagctttgcaaattttatgaaactgcaaatagtttttaatcttaaaaaacattctgtcttgtggtactgtttcttgtgttacaccttctcgcaaatacggtaaaagtattacctcattctcaagcactaatccgtcctccacatttactaataacaaatagtatatttatttacattaacagaaataggttttcacatttgacgaaaagattctccagtttcgtcatacctactctgttgtgaatctgtgcttgctttttccatgtgctccaaaaaacctagaagtctagtatactaaataaatttgattttttcttaatatattatatacaatatgatcgattcatacgaaggaaaaaaggtggtcaaacatatatagataaatacagtaaatataacattggttaaaaatttcttcaaggaagacataaaaacaaatgaaggtacaaaaatattcagaaagatacgaacaaaaggcagaactctttaggggacaagataacatgaggtagctttgaaactctaacacttctccatatattctttcattaagattctacaaacagcttctcttgactgtcctgcatcgtacgttcactttatatacaccatttcatgatgcttttaagttctaaaatacatatactgttttgaaagtcttgtttcgctgcaagtactttacccaatcacatctctttgttagattcttctgtctgtacaaatattcccacaatctaataatcttcgtcatcaccctatactttacgtacccctaaaatttgatttaacttgtacaaaattatagtttccttttctttttttgtattttcttctaaaagaatcggaaaagaacacacaaattcctacttacaagttacaacacatgtttacacccattactcaaacttataactaaacccatataaagtcttctttttttttgagaaaaaaaacaaaagatttgtggtaattatactcacgttaattaattatataataaagttaaaccctaaataattgctcaagtcatatcgagatcagaccattatgatgtgatccagcgcacgacgtcgttttaacctttcttccccaccaccaccaccatgtcccaccatcaccgacttgcttgaccgttcgagtaaagacttgagtgcgttctgtagaaaattcaccgactggacgccgtgatgctctttgtcagcggccacaacgagaacgtttcttgttcgaccaccgactgttgtcatgtcggcaaagagagtttccatctgaagagatttgagtgtctccatgagatctttcaagagctctggccggtcctcgcagcaaaacgataccttaaagattatccgtcgatcgtcgcctctggaacagtcctcaatgttgagtacactgatttcgtcagtctccgacggtattgtttcgtcggtgatttctagggtttgttgttttagttctttgactcgttgaaccacttttgctagtagtgtggatttgtctgtctgtgtaaagaaaattaaaacaaataaaggaaacaaggaaagagaaaaggtcagatcattagaatttgtcttgattcgagaaattttgtcttcatgtttcaattgttttcaaatgagaaaaaaaaaagctcgataactttcccgacaaagtgattatcagcttcagagaaaaaaaggggcttgtaagctttttatatctcctcaattttctagatattcccagtacttgcagcttttttattattcgaaaacattacatttgactgatgttagttttaaaatggttcattttctataagtgatatacttccaatattccacctttctcaccaataaataaaatcttagctagacactagactgtagtaacgtatatcacacaagcaagattaatctgattaagacaaaaaaattgtcatttggatataaagatttaattaaaaacacaaaattctggtgagataacatcaaaactttaatcctcatttcataaatcttttcctaattaaattatatgcatgtttagacgagtactgaagaatatgtaactttagaagttaatttcatatcttaaataacccaaaagaattaatagtttcatcatgcttaatcttccatttttatcttctatgctttttataattttccggttcaagtctctatctaagtttcattataagtttagagtagagtagtgagatagtaaagtaaaagatttgtgtaccttggagttacaagagagtaacttgcggagcttgttgagatgggaattgattcttgctcttctctttcgctcagcctctttatggttcctcagagaagcaagagctttgtcttcataaaccgtggcaaaagggtcagacgacgacgtcacggtggtggaagtagacgaggcacataatcctccggtgaggaaggcataaaatatttgatctgaaacctctggctgcatttttttgttgctgttgtttgcttctccgccgcctccctttttgttgggtttggagctttctttcggtgggttctgtcctaaaagaatatgactatactataatttatacgaaaataagcttagagtgagaggagatgtatgtacatacatatttttttttgtcgtcgtatgtacatagatatatacttaggtgtttgtagaaatattttaaaaaaaaaaatttgaaaaaaggtttcattatttttccgcaaccgaacgattgcaattgtatgtttcataacatttttaatagctctagataacaaaaaaaattgggtagtgaagggtggcaactggcaaggtattccaatttttgtttacaaagttatcttaacataaaaaagaaatattttacaaaagcaaaaacttagaagaaattttttactatatatcttttaccaaataatatcatatcaaactttaataaaaaatttgttagtatatctacacaacacatcaacaacttctatgtttcttcttctttaaaaggggatttattgaaagcacaattttgatatttctcatttgcatttttatgtaatggattttttatccttttctattgaaaagaaggaaattaattggctttaagactctgttttctacttggcccatataaacacaccgagggatatgattgaaccaagaaattgaaccagaacattaatcagatcggtttaagttcatactaactggttatcttcttctttgtggggaagtcgaagggtttgtgagatctcataactccggtgaatcctcttcgtccagactccagactccagactccagatcttcagaatctacctcgcacgaaatctcgtaagtattagttggaaattatatttattagttattggagaaacttgataagcaataaagagttttgacctaaacaagttatttgtaattagggttttaaacatagtctaatgttttttcgacctaaacagagacaatgacaaagaaggtttgttcatgtatcaacgagttgcccgacgatttgatcttgaagattttgtcattcgtttctactaaacatgttgtagtgacaagtcttttgtcaaaaaaatggaaatctctttggacaagggtgcctatactcaagtacgatgttcgggatcacactagatttgaacgatttctcgacaagtctctgttctcacaccaatctcatgttctagaaagccttcatgtcgaattaagtgtgaccctgtggaataaagacattggaccatggattagaaccgcgcttcatcatcatcattgccacctccgtgagctagagatagatgcttgtattgtccataccgtattacctcctgaattgtttacctgcaaaacacttgttgtcttgaaactcaaaggtatagtgatcgatgtggaagctcctcttacaacggtctctctcccatccctaaaaactctgcacattgaccactcgagtttattcgactttggatcccttcaaatgcttttatccaattgcaattttattactgacctaatggtcataagagaatctcgtttcttttttgctgagtacgacgtttcttggtgtaaaacacttatggccttgaaactcgaaggcttgaaggatgtgataagcatttcttcttcttccgcggtatgtctcccactcctcaaaactctccatgttgcccgcatggaggactttaacaatgattccttttgtcggcttttatccaattgccctgttctctccgacctaacactggaagaaaaaaccagtgatgttttgttgaatttggatatcgacatgccttacttacaaagattgtcgattatcacaagagtcgatgcagattccaagcatatttttagtttgatgaaaaactacactcgaaagcttgcgattatcgcaccttctttcaagtacttcagcattcaagagttggcatatgcaagccgttaccggtatattgtacgggttaggctcggagttccatcaaaattagaggtaacttttttcattccatgtcgtttctttctcgtgttatatcttgttggaaccatcacataaatgaaatatcgtgttttttttttcttttttttctaggatgcaagtaccttcagtcgaatcgtgcatctggagctgagcatatgtagtgaaagatctgtggaaatgcttgtagatttgctcctatgtttcactaaattggtggtcctcaagcttgaacatgtattcagttttctcccttttttcctttaccattgtaatttatactagtgtttaatattcgacctcaatgatcttattattaatagcagttttaccattttttctcgtgatcgcaggtttacttactaaccccgttgggtcgttgggaaccgccaagtttggttcccgaatgtttgttgtccagtcttgaagctctagagtggaaagggtacacagggagatacggagataaggatctggtgagttatctcctgaaccatgcgctttgtttgaaaacggcaaaaatcttctataagacatatccatgtgaagtggaagcgaagcaacagattgaagaggacttagcttcgatgccaagaggttcaaagtcatgtgaagttcttttgaatgaaattataagaaacaaagcaaattgttaaatgattgctaatatttggaagaaactcgcggacatcttatgatttgatgcttcactaaattcaatgtttcattaaaatttctactgaggtgtttcacattctcttgtgtttaggtttttattggccttctgtttcgttgatcatttgaagctattcaatgagccccgttaggaaatcaatttaacgtaaactgactgccattgataggacctaatttgcatttaaaaaaacaatgacactagagacctttaatagaaaaccacgaactagaccaagttacaaattacaagagcaagacaacagaaataacaaggcttttgaaaatattcagacgcaaaatagatcataaagggatataacattcgtttcttaaacaaccagaaaacatacctcgagtcccacacaaaaaaaaaattagaacataacacaagaatttatatgtaagagatgcaaaccaagtttagagccattgtttggttccaaaacagcatcacttagccatcatgaccttaacaaactcttcatagttaatctgttaaatgagaagaaggaaactcttcataagaagaagtcttgggttgctaattcagacgcaagaaccttcattaggttgctcaatttcacctttgatttttgtggttcaaacaacgcttgtctaatcatcttctgtttctccttttcttttgccacacgccttagagtttgcagtttcttctcttccttctttgtcaatttaaaaggttggggaggtttaagaatattctgaaaaacatctttcttgtgtttgttgttgttaaccatcaatgtactaagattaatcacatgcccatactcatctatttctcttccaagtacatctacacgcagaaaaaagcccttggtctgtttatgtgcaacagccgtatctattgccagctcctgaaatcgtttaacagcttcaaggatttgactagaagtagtgtccgatgcaatagaacaagtatacggccttttctcaaacctagctacatcttcaaacctagaactcttgtttgtcgtcctagccgccccattctcttcctctgatctatctttcctcttacttccttcgtgagacctctcatgatgatgcttagtcctatctctctcatcacgatcgtcacggatgctcctggaatatctctgcttcttgttatccatgatgagacaaatttaggggaagtatgaaacgaacgtgaacaaagaaacacaaaggtattttacctatattcacatcaattgaatgatcccaattcaaccacgaataggaaactttatgccgttttcctttttcttaaacgaccacgaattggaaacttttatgtcggtttctatttttttaatgatacacaccacaccacgttttgacctttttagtcattgataggacctaatttgcatttcacaaaaccatgatacaatgctttactagagagacaccattaataaaaaaccgcgaactagaccaaggttacaaattacaggagcaagacaacaaaaaaacaagacttttgaaaatgttcagacgcaaaatagagcataaaagggataaaacattcgcgtcttaaacaagcagaaaacatacctcgagtcccatgaataaaaattatagaacataacataagaatttatatgtaagagatgcaaaccaagtttatagagccattgtttggttctaaaacagcatcacttagccatcatgaccttaacaaactcttcgtagttaatctgaccatcaccatcaacatcagcttccttgatcatctcatcaacttcttcatcagtaagcttctcaccaaggtttgtcatcacatggcggagctcagctgctgagatgaaaccgttctggtccttgtcgaaaacccggaatgcttccttgagctcttcctcagagtcggtgtccttcatcttacgagccataaggttcaagaactctgggaaatcaatggtaccgttaccatcagcatccacttcgttgatcatgtcttgaagctctgcttcggttgggttttgtccaagggaacgcatcacagtacccagctccttggtggtaatgcaacctacaagcaaatcaagaatttgttcatcattcacttctctgtaaatctaattcaatcaaatatcttcaattacgaaactcaaagcaggtttctctgtagagaagcattttagctagatcccaaacttctcaattaacagtttctagtcattaacttctcaaatctaaagtgagataaaataattcagatggaaaattaaatccaaatcgataacaaattggcaaatctccaagtcatcaatcatccaaatttcgattcaaatccaatccaggaaacaaacgaacaaaaattgaaaaacaaggaacgagtctagagatcacgaattacagatccgttaattatctacatcgacacagatcaattgaatcaacaagaagaacagaaatcaaatcagttatggctagacaccaagatccaacagtagcaaaatcctatgtattcaaaaacatttgaaattgcgagagggagagagaaaaaaacaacaacgtaccatcaccatccttgtcgaataagctgaaagcttccttaaactcagagatctgatcgtcggtgagctgatccgccattgtttttttcttctccttttcgtgaaacctgtagattcagaatttttttgttttctctcaaaacgagaaagaagaagaagaagagaaaattagaaaaagtgtctctgctggaaaaaacgagagagcaaccgtatttatcgggtacgaagctattaacgacttttgctccgacccgggactttaaaagcttttttttttaacccgtaccgggtttggaaaaatctctgttataacctcggattatgactgtaattgcgttaatgctatcatcaatgatttcttttctcttataaaacgccagagtggacaattaaacggatcacacgttcacgcggtctgtacgcggagcgttgacttgactgtcacgtcagcattctcgctgggtcctcgagatctctctcagtacagatgtctgtttatgattggcttcgcttttgaatttaagtagtcctcctcaccattgaaaacaaataattagtttcttttattgttaacttaagtacaatatcacctgcaaattaattagattagatttcgttttcaaacaatcaaaatcacttcaagatataattgatacgtctaatcaatttcttaataaattctatgattaaattatgtatataaggtaacttaagaaaggtatatataaagagaaaacgatcgagttttaaaatataggatgagttattaaaaaaaacattaatatctgtatctagatgaatatattgtttctgattttgttaatcattcatttatttaaggaaatctatgtagtactagtatatacatgaattcatcaaatagggaaagtttttatattgaatgcaaatagtgtatcattcattaaaccctaaacaaccaattgcactctattgaaagatatgtcttaaattctgaataagctaagaaaattataaaataatttaaacaacaagtgtcataggtgaaaattgtcgcaactatgacttccataaccgtcacaacgaacctaaagatatcaatcgcatcaaaacactaatcttcttcgacacgcgtcgaatgggagagagttgctgctgccacgtcggatgtgttggcctttacctcctccgccgtaacaaacagaagaatccaccggcgattgataaaactcgtcgtcgtcgtagtcagagaaggagagctctcgaacggtctctgcgatcaagtcgcgacagatgtgatcatgaagagccaaaccgattttagcgacctctcttcgttgaccagatgccacgtcatcacaaacttggttcacgctctccatcaagctccgtcttaccctccgcaccacaaggggcaacgtgccacatgactctgtcgtcgtcgttgacgttgatctcttggaaatgacgtcatgaatggagtaatgatcgggtctagtgattagatttatattgttgactttgtagggtttgttgtctttgcagcaatattcgtgatggttcatcatcgacaacatcgtgtctgtgtctggttcgtgttgtgtcgtcttcgtgttcttctgcgtgtgcgtccccacgacgacatctcctgccagtactgttggttgtttgttaaataagacgaaaataatttatcagacaacttgtgtgtttagtatataaattagtacgttgtcacacaaatatatataaactattactagcgaataataagactcaggcatacatgaagtgcttgtagaatcatttttctttaaaagtggtgttcttgatttggtaccataaaacagtatgtgggtcagaatcaggaataaatcaaagaatgggtgggggtccaaatgatgggaaaagttaaagtgggcttcatgactaaaggaataaaggcccctaaaagctgtttcttccttcatcatttgtctaacatgcctctttctcctcacactttctttactctcttctccactttaatttgatcctatcagattagactaaacctcattacataattagccccaccgaaacttaattggggtccatactatattgtctttatataattttgaacactatcctcaatatgacaacaactatataatgatccaattgttagagcaattagatgtgacatcaaaatcaaataacacagtttatgcatgcatgaaattgttagagcaataagatgtctttatcaatatacttttatttgtatataccaaaatgatgagcctgtcttccactattggacatactcatgatttcaacaccaccaaattaaagagacaactctttggccttcccattctatcttcactctttattgctactttagttgacacaatgttcacttaagtttactactttaatttatttattttgaacaacaaaagattaaaatacaaaattccctgataatgtgctacaaattacggaccacatcaattctcccacattttaatatgaatttttctttcttgatttttgttaagttatcaataaataagagaagtttttataagtgaaaaaaaaaaaagatgatttcgacatgtttgtattaaacgtataagatgaccaaaacactgacaaaaacggagaaacgtaccggtgccggagaatttaaaattctcacgtgtggtcggcggagaaacctcaagtctcttgtgaagaatgtaagtggttttgatgacgtcgatggttcttcttagctcctctaagtcccgatcacatttctctagtgctccgactagactaactctcgccgcatctccctctccttcattgtgcggaagcggtggcgcaacgattcctccgccttgtccgtttgatgaatcttgcggaggagaagcgtaaacgacggttctttgttctcgctttttagatcccaaggtgatggatttgcggcggttgaaggtggagaggaagaggttgaagaacccggggaggcagccggaggagacggcggaggagtttgagtttctccgtggaggattatggttttcccgccatgaagatgaaggagaaagcaagttctctcgtttactcttcttcatattcctcctatctgtttttgtttttctcacctctttctttttctctctatctaaaaccttaaattcccatttagtcaaaagaaattattcatttcaacggtaaaattataatattataccctttttgtgatttaggtctccatgctttatttttattttattctccttttcacttttgttttacgtttttttttttactttaaggttggtccatttgcacatggcaaattccaaagcattgacactttacttattagctatagacattataatgtcattttttggctagacattatagtgtctttcatgttttgtttcctattttgaagtttaattagtgcttactggcttacaaagtaaattatcactcaactctagataaacttcaactagaccttcgaatacaacatgatggggattccattaacaaaattaagaaccctaatcaaatactaggcatttaggagtttagcacaaggctctatgagaaacaaaagggcattattaagagtgttctttaagattcatgaccttgtgcatgctggacagagaaaacttttagagctttttttatcaatcctataagaattagatattttttgtacgagtaattgtaattgcatcattaatggcactctgttttgagaccataaatcatttacacgtttgaagaaaacaatttatgctttaatttaacaattttcggtaagcagaaaaactaacactgctcacaaattttacatgtagagatatatttccatctgtcaaatataattgtgattgaagtttttaaaatacataaaacattttgatcataaataataagacttcgtaattgattgattacagtgctgagttggcaaattgcaataagatttttttagaaagacatgcattgcacattcagctgtgaagaaacaacaaactctacatacgaattgattctcactgatcagactaatcttaccatcatatcaatgaacacaacattggaagtttcaggtttataatctcagtaacaatatgactgaccagtcaaaacaaagcctactctatacaaataagggctcgaaagaaagaaaagccaatgaaaatttgaatgaacaagagaaactaaactaacccactttggtttatagatcattccatactttgtagtcgctagttgagctgttgttctgcatatggtcttggcagcctatgaagaaagtagaacgcacaggatctacatttactagagcatgagccgtgccactctgactaacagctacagctacctcatcctctccaattaacacttcggcgtaacctttatcgacttcgtggttttccagctgcattcatataggtttgtccataaacaatgtttgattgatgattttggttcatcttgacccgagagcagtaaagaaatggaaaaccagggcacaatcatcacaggaaaaaggttcaaacaagtaagataagcccacttagtcacattactaaacatcttaatggaagaaactcgatttttcattcttagacagtgattagtggttcagtgatccgtgagtaaatgactgatgatattagtccaatagtcaagaacatctttatgatagattcagaagtgattttcacctttatctcaataaaaagagtcccaacgcagaatctaagacaaaaaatcagaaaaccacatcaaaggaactgaaatctagagtttgtctagacaccttaaacactcccaaaccctcaaaccaaccaaagataagcctgctcctgcagctgttcaaacctctacttacacacatcatgtcacacaggtttagttaagttggcatagcattaggaaaaactctgaactctcctttccaccttctttaccaagagttatcacataccattcaatgaagcattggatacttagataagcaaaaacagaaattcctttctgttagaggtgttcaacagactataactcttccattatgtttcaatcaatgagatggatgatgagacttaccctgaattttgtcttggctccccatatgacaaacgtctcattacaggtatggtgtctatggtttcccctcaatccaccaggccgtatttcaccaacatgaatggaaacacacgatgcggctccaccttcaaacaagtgaaaacatgaaatgtgaatctccagtaccgagaaaagagaaacttaggattacacaatagtctccttcaaggttaggcagtcactccaaagattatcattcctagagtgactaaagacatagatacttttctcgatacatgcttccaaaattattttaacctcaatacattattaatctcaggaagaaaatgaaaatgataatttaagctacagattttctcagtttcaatatactcaagaaccctatacgaattgctgtttatcaacttcctaattaacattcgtaagaattgatcagaacctttgagctcagaatcacgagcaaggataacgggatcaagcaaccaaccacggtcgtctttccgagcaggagaaagcgacgccaaaccgaaccggaccaaattagccttatcgtcgtcgtcgtaaactttcaaatcgggatgactatttaccgtcgatttcggatgtgaagaggacgaagagacgtgtgattgtgaagagtgttgtaacctgagggagatccatgtgagcaagaggaacaacgagagaagcagaggaatcgcttgaggcttcttcagtaggttgattaaaggtgacaatctctggttctcgatcactactcttctagggtttgccattttccaactttctttatcttcctctgttcattttgatttggtgttaattaattaattttgttttatagagtttgattaattagagagacaaaatttgactggttagctggcgggttgagccagcccttgcagtagtgcaacgcatgggcgactcttgaaagcccagatagcaagctatcttagtgggctttctcccttaaaaaatagagttaatatcgtgtgggccgatggcccacatatcagatattaaactgataagaacagatactacacttgatcttagccaaaaggccgagaaaggtatgaattggacaatgggctcagctttctttatatattacacatcttatgaccaatgctctctaacttgtcgatgtgggacgtttagaaaaatagactctttacgcatctataagcaaacgcgaacatatcaataagagacattagacatctggttcaatatatgtcatgggcttagccatctggttcttgtcggagattttgacaacgtcgtcatggtttgaaactatcttgcttctgcctctgtgtgctcttttgagatcaattgcagcactaggaaagaccataagaaattgtgagctggtgatacttgaagatcagtgatctgatctgtgcgcacagaggaaaactggaatttgatgagtgtgtgttaaaaaaaaaagctggatcctcctaaagaagaaaggtggaaattttcgaaattacttcaaaagtctgaaaagtggaagatgtttcagggatcaacgtttttataattatcgatctgcagttcaatgatgcttcgactgagaatcatatacaaggtattaaagacaagtctcgagtattgtttgctggtgactggcctttggtaggttcgaaggtttggtctatgtcttctaccttgtgatttgaaacgctgaaacataagatttgtcttcatcgaacgttaaagtcttcacaaccctcatgtattggtttcaggcataaaggggacacagcttttcaaaaatttgctgaccactctccattcttgagccaggttacgctgccttttccgaggtccaagctaaaacctgtgtccagtcaaaagggttttcacacttttcattaactggaaccatcacaagagcgtaaagacaaaaactgataaactttctttcataaacttcatacttgaatgagtctaggaacagtcccagggcgagtccagtcttccaatagttaaacatggtgatcgtgctccgcatcttgttgattaatggaatagaagctctgtacattaaagctccaatgcattcaactacaagcacagccaatccagcagatagaacatcccagtctcctgtttgtcctatgaatgtagagaaagcagttgcagagtagaatcccaccaagagaaagaacagtttcttggggagatctttctttatctcctgaattttcaccagaagcttacttctgagaacttgtatggctttgattagccgtagacctctggagctattattacttgaagaaccagatgctggatcgaatctgtccccaccaaccgagcttttgatagttgtccatgacatcctcctgaaaaattgcaaaagacccacttaaacttggacactcgacaatggattcaacataagaccttctttaagacagtagcacatctcacaacaatcgagaagtctaagcaaacttggaggtctaaggatttcacttactccatattaagtccgataaagcacaaaaaaaacatgatttatatatcattgctttgtatatatatgtaagcatggattttactggttagtatggtctctgcctttatagacaatatacagagatctgcaagagatatttcaggttttgccaaaatcctcaaccattgaatttccagcagatcattatataaaaagccacaccaggaactctaactttcaagccacacattgatgcttgaaaatgttagaaacttgcctttgatgtctgaccaacagaggctgtgcaggatgaaggaaatgacagagggaacaaatggcaagagacaaagcacctttgtctctgaaactccttttaggcaagaacttacttccacaattaggtaatgtcaccgtgatggcaaatcccatgaaacagctagaataaatgttggtcttccgacccagatgcagctacttcctagaccaaaaagtattcagcaaatcaatttcacaatccaatgtaacatcaaatagcaactttcttgagagaagaaccaatgtgaaacaagttatcggaattccactaataaactcgcagaagtaatgataaactcatagacggagaaagaacaagaaatatgaaacttgactcagcagataccacgattaggcattcccacgaataccttgtagacgacaactcaagaaaactctaattttccccagattactaagttcctccaagcccattagtcaaaaaatcaagccaaaaatcgatccttacaactgtctacagatgaaggaatcaaaattcgaaaccaattacgactgaaaacagtagtaaagaagccagagaaatgaaaagggatcagcttggtgaaggacaaagtatgaaatgaggaaagatgaagcataaacctgaaacggcggcgtttagcttgattcggcctctcgaagcttgggctgcaaatgcaaacaaagcctgtaatgtaataatgttagagagttgagaataaaacccatttatgtggtgctgaaggcattttgctgcagactaagaagatgctaccttgtctgggtagaaaatggatgagattgtcaacgaggaatctaaaaccaacttggaacttgataaacgtcgttgacgcaagtaaaacaattgtgagaggaataagcggtggagctgaaacgatagctaaagagagagttgacaccgtagtgatcggtgccggagtcgtaggtttagcggtggcgcgtgagctcagtctccgcggcagagaagttctgatcctcgacgccgcatcatcgttcggcaccgtgacgagttcccgcaacagtgaagtcgtccacgccggaatctattatccaccaaactctctaaaggtacaatctttctcttgaggatcgaatcagatgtgtgttttggtaagttcaatagtgagttttgtttggattttgagcaggccaagttttgtgtaagagggagggaattgctgtataaatactgctctgaatatgaaatccctcataagaagattggtaagcttatcgttgctacgggatcctctgagataccgaaactagatctattgatgcatcttggaactcagaatagagtctcgggtctaaggatgttggaaggttttgaagctatgagaatggagccacagcttcgttgtgttaaagctttgctatctcctgaatctggcattcttgatacacattccttcatgctatctttagtggtatatataataaacttttccccagctctctatatagggtcttcattgttctgtctttaggaaaagagttttgatttcatggtttacagggataacaacaacttgagactacagggagaagcacagaacaaccacgcaactttctcgtacaacacggtggttttaaacggtcgtgttgaagaaaagaagatgcatttgtatgttgctgataccagattttctgaatctcggtgtgaggcagaagcacagcttgagcttatccctaatcttgttgttaactctgcgggattaggtgctcaagctctagcaaagagactacatggcttagatcatcgatttgttccttcgtctcactatgctcgtggatgctactttacactatcgggcataaaggctccaccttttaataaacttgtgtatcctatacctgaggaaggaggtctcggtgtccatgtcactgtagatttgaacggacttgttaagtttggacctgatgtagaatggattgaatgcacagatgatacatcaagcttcctcaacaagtaaatactgcatctgttcttaaattatcctttctatttagtccattttgaagttactcaagatcttcatgctgtttgtattcaggtttgattatcgtgtaaacccacaacgatcagagaaattctacccagagatcagaaagtactatccggatctcaaagatggatcattggaaccgggttattcaggcatccgtcctaagctttccgggccaaaacagtctcctgcagattttgtcatacaggtaagcttttgtttatcaaaatgcatcagactacactcacagcattaggtcctgtggaatcttcggttttgttatgaaaccatttgttatcctcaagagtcttgtgtgttcctgatgcagggagaggagactcatggagttcctggtcttgttaatctctttggcatcgaatcacctggtttaacttcaagcttggctattgcagaacatatagcaaacaaattcttgagatgaatttgagttaaaagtttacatttaagaacaaaagtggcctacaagaagaaggctttgcagagttaaacaattttcctttcagtgtgatccatttagactttgtctataactctttacactttgcaatcaaatgctataagaataataaacacaagttccttctgttcaatctctgaatttcaatcggactcatgaaaaccattactgctgctagtctgctactacaataactcgagaatattttaaagttaacagaattgctccaagtcaagaaagtctacggaatgtacaaagaaacaaagctgttttcctctcttttttataagtgaaccgacacagaagagaaaaaaagaaaaagacaaaaagagtttagagatcagaaaggagccgagcttgtccgtcggagctgccgcttgggatcaggcggtggtacacttgggaggattttttccacctcctgcaaagtaatgtaaggattagctttggccacacataaacgcagacaaaattgaagaacagaaagtccatgaagactagaaaccagcaagaccaacttgttccgggtaaaggaaaactatgtctcctaagacgtttggtctaaacctattcctcctgtctcttgttcgtggttatattttctatcatatattgtctactatgcgtgtgccctattctatacttcactacatcttctatcatctatcattccctttaatatgaatccagaactaatcaacgatcagctcttacaagtttctagtaatcacaaatttaatcaatgcatgtgttgtaaaaagggagaaaaacctacaatgcattaccttttgcttcctgagtctttcgttttcttcttctaaccgtgaaactttgatctctagctcatgagtgtaagcctgctcatcaatatccaatgttaaaacaaaaacgagcatgacttgacaagaagaataacaacaacaaattagttgtttctcacctgtttcctagctcgggaacgagcagcagactctctgttctttatcattctcttctgcctcctctctacagtcttctctacaacttctcctgaagctaccctcttccttccaggagtttgtgtatctgacaaaccacccatcaaagaagactgagacaccattgcttgcatatctgaaaccggatagggcataaatgcttgaggctgtggcattgatgggagctgatgatattgaatccatgggccaacttgagtaatgttttgccctaaaccagcacctgaaccagcactaccaccaccaacaggaccatcatggttcgaaccagggatagtctcagtgaccactcctgctttcaacaacaggtcttcaagcgtcatttccccaagtgtaggctgcttatccctcctctcatgagcactacctccattcttattctgctgaatgtctttccaaacctcatcaacagtctttttgctgagatcccgaggcaaagtcaaactcccctggcgagaaagaccctcctgagcagctgctccaccattgacagccatagacgatggctgattagcttcaacagaacagacactcttcaaaagctcatcaaggttcatgcttcccagagctttaccagaactccccaagtgattttgaacctcatcaagtgttaagctgtaaagagagctttgcctattcaaggactgagatttagcttgttcaacaatacccctctgagaatccataggcttttgtagcggacaaaaaacaacaagacagatagataaaaacaattctgaacccacaaatcagaaaccctaatgctcaatttgataaatagccacacgacgacgaattcatcaaatcgagcctaaatcggaggcgaaagtaaccttttttctaaggtagagtggcgaaacatgcagaagagagacgagaagaagagaacccagaaatcaaatcgaaggaaatggcagagagaaatcacggcgttgtagcaatcagaaagagtcttgggaattgcatgcagcatcgaaggctatcaaatgcagatactaaacatggaaatcgcaacacaaggacaatcaaactcttgcgaggtacagacttttcgaagaagaagaataaatcaaaaacttaagcaagagaaaaagcaacaatcttttggagcttaaaaaggaccagatctaaaacatggcaagtttgggtttttctttctcaaaagagaaacgaaactatgataagtgcagagacagatttacaaagcaaacctaaactctgtgtctgtgtgtgtctgagtctctctctctctcttcgttttgttttcgcgcaggagaggaaaaaagagaagagagagaaaaccttttgattgagaaagtgacactcgatactgtggcaatgcccccctctcaagcctcctgtggaattttcaatgcgtttcttctttttttagttgcccaaaaatggtttctcaaactttcgatcaaaataagaaacagaggtttgtttaaacacttaatgattagtgattaacttaaatgaaggtggaatcaataaacactacatgtgctcggagacccttcattcatttagcttcaatgggaatttaggtagattgattatcaaactttaatcagaaaaggttatacatatacatgtttatgttctttggctctcaacactaatcctcatgcctatgagtttctctttaaatggtaagtgattactataaattaatctgcaatcatgttaaaccatttttaggcaataatttacatgtatttttttgcaatattgaaatctcaaacctttaattatactttctattatccaatctcagattgggttttatgaacattgaatgtggctttgaagaatattgcatcttggattctcttcatcaatgaaggacctttttcccttttcgaaacttgacataacaattgagagattgttgacttgagatcaaatacacaaaactctactacttacttcccccaattccacttcagcttcatattctgcttctcttcttcatcatcaatgaacccttctactatgtatcatcatcataaataatattcaaagctgcacttttccaaaaagagatttcaccatcaaagcaatcatcaccaaaaaaactttatgcattcacgcctttataaactcctctgaaacattaagggaaataatatatcacctcgtactcttgtgacttttctaataatccctgaaccttgtgcacaaggacctgaaggtacatgctctctagaccaaaaccaacttttatcacttcaaagagggactaggaccaataaacaagaacatatataggcaagagattcgcactgagagatatacttttaacacttttgattacttacccttcaattggaagcacgttgtatatagccaaagaagatactcaacactttgaacttaccttttagttgcaagcatgttgtggagatccaaagacttaactgcctgttgtcgagaaactctattcgatagcttccacttttcaaatattgagaaattgcctcagaaagatcattcttcagctgtgtcgttgagaagcttgcaccacttcccaccaagtttgactgttccaagttggctgcaacttagtaattttatgacaaataagtttggaaacaaagttctaatttgaaatagtcattgtaaaaacttttgaaacttgtcatagaaaatccaaaaacacaagtgagagagctctgctgcattttaaaattccaagttttgatcatttcagaaccaattgcattcagattagtatatgtgtgctaaagaaatttcattgacagttaggggtacataatctggctgttcaaccgcagtcaattacctgcaagaggaataattgaacaaacataaaatcaggatagtacataaagccaggttaatcaagataacttggtacaaaatacactgcaggcagaaaaacacatgaaatcgtaaaacagagaagtcaataaaaactatttaggaaaaactagagttcgataagcaaagacccacatggagcgtagttgcgcttttttagttttacaaatgaaagtctaagggggatattcagaaaactgaaaaaatagagacataaacactgaaaatagtagtacaaagttttttttaggaatttcataaagagagtttgggaaaaacaagtagatgaaaactaaaactccttaaaaggttttttatgagtttggccttaggagtgaccaaagagtaacatttcataaagacttcatttagcatcagctccttataaacttgagaagaatcaccaggccaatattaaaacactgatttctgatatctgcacaatgaatttaagaaaataagagaagtaacatgctttaacaaccgttgcaaaatcccccaaaactccaatgcaaacaaaaaccatgtggatatacacagaaacttcttgtcttcagacatcagtaagttaatatatactgaggaaagacatttcaacaattaaacaagggaaattcattgctctacctgagtggatggatacatgatacatttagtgacccatgtaaggagtaccgtatggcccgacaccatgttgccctctacttgtaccgccttgaccaggttgcggagtctgataaccgccttgcaacccaggttgtgtaccgtacccaggcattgtccccggtgccatagcttgagtaccgtaaccagttggcattccaactccattccctgggtttacaccagcagctgtccccaaggaacccaacaaagcctgtccaattgccggattaaaagccaaaccagctccctgagatgccaataaagctgtcaaggcctgtccaatggccgggtttatcacctgtgccgttggaccacccatcccagctgggttaccagccatgagatgtccatgacctccaggcggaccataaccattgttatcattcctttggtaacgaggattgttataggcgtgtgggttatggtgatgctgctgctgcttgcccggtttgggaccatcgatagctttctggcaatgcaagatatggccttcaaaagtcttgtgtggctcctccaaagccctcttggcgctttcagacgacttataaacaaagagacagaaacctttaggtctcccagtatacttatcaagacccaaaggaccttcttcaatttctccaaactttgagaaaaacatcagcaacttctgtggatcaagctctgctccgacattactaacataaatctttttctgagtatgctccgagttcgaatgctgagcaggcgctgaaacagctgcagcagcgataggagctccaccaaagacaggtcctttagaagccaattggcatgccgtcatacgactaccaatcttcttctgaggctgcttgagtgcgttgcgagcacctgaacgagacttgtacagaataaagccataacctttagatttccctgagatcttatcaaacacagccttgcaatcttcgatctctccgtactgcttaaaagcttcaataagcgtctctgttttcgtatcccaaccaagaccgtgcacaaagatcttccgatgaacagggtcctcatcagctacttccctaattcgattggctacatcaacatgcttctccgctgcttccttaagaagactcaaaacttgctcctttgaaaatggttccaacagatcctgaattggttcatcgtcatcatcttcttgattgccagatccagacgtcgccgccgcctctatacgattcccatccgtctgatcctcattctcatcaccatcatcttcatcgtcatcatcttctacttcttcttcttgctcttcctctacttcctcgtattcaacttcttcaacgtctccttgattatcctgatttttaattacaagctgctgctcctcctccggcgtctgcttcagcttctgcgacggttcttcagcttcgttagattcttctccttcgagctttctcttctttgtcattttcgaattctaatggagattttagggtttcgaatgttttctttggtttcttctccaaaaagctgattttcccctccttatctataatgcgccgctatgtgggtggtatatcatcaacctcaagtctttgctaagtggatttttacacatttacccctaaccattttatatatataagcccattaatgattattgggctttaagtttaaagacccatttacgaaaagatgcttaagtaagaaaaaaagaataacgtcaaagttcccgccatgtgtttcccgcgagacttgacggctcataagattagtcagaactcagaagacaagacaaccaaagaaaaggtttcgcctcccttcttacaaagagctgcaattttcagtctcttggtcttcttcttcgtcttgttttcaaattaatgtctctctgtctctttagtgaaccctagatccagaaattagagtttggagcccaggattcggcattcatttcccttctctatccaattaagcgttgattaagacttaaggtaaattcaatgtcctagattcaatttctctttgattcattcatctactttacccagatctgctctttaccattctcgaatcgatacagctacaaaaaaaattgatgtagcgaaattagggttttcgccgcccattgtgaatttcattttttaatttgcatgtcctttttcgtggtcagatttgtgcaattgattttctaagaaaagagttttggtttcaaattgtgtttagtagctaattgatgttcgtttctctgattggcttaatgaaatttaggattctggtttattgttgttagcacttagcagtatccttaccggtaattcctttgtttgtttcaatccaggagcgcggggattatacgagcttaatcagttgttagcaagtaattatctgatagttacaatggtggagttaagaagtagcacacacttgaactctcatgtacattatatccgaaccattaaagacggatctatcaaaatagtgatgaatatggatggcagaagaaaaccaaagctcaaatttagacagttggtggatatatacaatcttgaagacagtcaaggtgttgagtcaattccaagagtagtcagggatttggacaatggttctgattttacacaaggttctgagtctgaagattttagcatgacaacattggagatgattcagaaacaatgcaaagaaaggaaaaggaaacttagaaactgcagagatactactactgagacattctcgaacgttgaagttaaaaaagagtatgtgacccaagatgaaggatgtgatattgaggagcctcttagcagttgggatacgaaattctccaagagaaggaagaagaagcaggagcgtaaaaaagcaaagtgtggtacttctacttcctctcctccatctgtggaaaaggttgatttgccgttggtgctctttcatgtcaagcctgaagtttgggatgatagctattcagtttctgaagccatggattgtagtgaaaagtcagaatctcctataaatacagtgttggtggaagaaataatgcttgattcgtccagtgacatgaggctggttccatactgcagtgcagagccaaattttcccggagtggtagccattgaggaagcttttgaagatgcatcagaagagtttagcgatgctgattttcagaataagcaaattgttttgtactctagtgtgtctagagaggagatggaattggatgttaatccacaacattcagaatatgagaacattggttgtgtaaagaacttcatttctgcttacacaagctctgggtgcgaagaagaagataaagaggatgaggaaagcaatgatataaaggctaacttagatatgagtgtaactggtttggagattgtgaagatagaagctccagaaatacttgctattgattaccccggttgtttgtccatcatcaatttttgtgcagaagattccgagattgtgtgggaaactgaagacattactaaggataattttcctgaagcaactgatattctccagctgaccaactgttgtaattcactggataatctgcaaccagttcctgaagacagcacaagttcaaaagaagaagatcatttgacagaaagattacaacaatctttatactccaaacatgaagatgaagcaggagaccacaaactatcacaactgtataaggaacctgatgaggttcaaaaagttgcagagactgacagtatccagcaacaacaaccacaccaccaaccagaaaatctactctctgggagaaaggtttgtcctctgtataattttttctaaccgcattctattcttaattcagtttccttagtagatacattttggttttcaggctttatctcccacctctcaagaaaaacttcgcaaggcaatggagcaccctgattcacctgagaaaaggagtaaaagtaagtcaatgaaaaaagaaaactgaagtcttatttatatgctttgcactgtaaaacttttagatgctcatccatgttacaaactgtaatccagaatcaagagggaaactctacttcagtagccaaaactcacataggatccttaaggctcaagggctggataacattgaccgagtggaaatcattccaagctcaaagcaagccattcaaaaagcaactaataatacgcggcaaatgaagtatcaaagagcgacacacaagtttccacgtcgaaatactcaagcagcaaaagcacagccttttagcactggaggcacttctatacaaggatgctcacagaaagctattgccttctcgcaagggcaaatgcgtgatttccaaaatgttgcagctaggctcacaaaagagctgaaatcgatgagacaaatcacaaagagatgtctgcaagctgaaagcaacacctccaacatgtctgactgtaacttagatgaggtacttttgtctattatcagcaattgaaatttggtttgtcaatttctaaatgttggctttctttctcttttcaggtgaaaactgtgattggaaatgcagaaaaaactgaagagagttgcaagaaatggctttcgatcattgaacgtgactgtaatcggttttgcaaactcatggtatgtttaacactcttaacattcacaaacacgactaagagatatttgtcttccttcaatctccaactcttcttcattcccttcctttacagagtatggtcagagaagattctccagctactgagaacattgttcataagaaaaagaagattagatttgcagatgatgcaggaggagatctatgccatgtcaaggtttttgagattgatttggaatctgaatcatacgtcataaccaaagactgtaaaatttagtgtaatgtaaaactcttcacaccatttgtacattcatgtcttgagatttcatgagatataacgatctttttctagattcaatcccaaccttgagacaaaaccaagaagctgattcagtttctgtaatagagtcctaatcctgattgggccgagttttaattaggcccagatatttgaaatatgctcgaatcaagtggtcttattgtatactatccagacggcctataaggactaaggagacataaaacttgtaaataatttcagtttctgcaaagaaaatacgaagaatggaatctttttgaggaaggaaaaagactaaaagagtggagagggaagcttgggcgacaagagtgggcagagtattgggaatgacgaagaaacatttaggcgctatgcataatacacgaccgcttcttcaagtcaacaacattctcacgtgccatctcccttttcttttttacttttactttttacttcttttttatcacttgtattaataataagaatcataaaaaacaaaaatgacgcggtatcgtcatgatactgtcatgattacatggtttaaaaagatgacgttatcgctggcgtctcttgactttgttcctcccactagattctttttttttttttgtcaggatccaaaatttttaaattagatcatcctgcatttttcttatgacaatcagaaagactttcctcctttaatttgatctttgtaaagctaaatattttgtaggtttatccaatacactaattagtttgactagaacatctggaatagcttaaagcttaataaaaaaaaaaaaaacaaaaaaagagtttcaaagttcgtggacgcattagcaatacactaattttggacctcttgaaccaacgtaaatcgtctcattcatcgatctgctgtatggaatatatagaatatagtgcttaatggaattttttcaaatatataaaattttagttaaatattcaaccgctgatattgatgtgtttcgcagcttttcataattgctaattgtcaatgatcgggactttacaagtgttgtacaactaatatgaagactagccaaattaagtattatgtgctgactcgttattcttttaagttttacaattatcttcttcgttctttttttttttttgataaaatcaataaaaatacagttctataataactattcttttcaactgttaataaaaatttaattttcctttttgtaacggttattcgtttcaagtgttaatatgtactaacatatttgaaaaagaaagaagaaaatgagtggaattaatatttacggttttgtggttgttatcaaactattaattggttttttttttggtatataaaggatcgtaaagtagtaaaccttaatcaagcatgttgaaggaacaatgccgacgtcatccaaatttcgatgtctccaataattgaccactaaaatcaaacgactaatgaagagagttatgtaaaagattggtcatgttttttatgggtccatcttcttcgctttagtctttattatattatcgtaaaacaataactctttatgaatttaatttctaaccagtatactaatatatacacacatatgtatcttatattcttaatcaaccaatccaatcaatatagctttcttcacgcaatcagcttcttcccatatattgtcacgaaaatattatttatacatattacatttacaccgtcgtagatatattaatctttgtgggcgtaataatcacggctctcgtaataaggaggactcttcttatcaacaatccaataattttatggaaattattgataacaatttagttaactacaagtagtactgtttcaacatatactatatgtgtacttgcataaaaagataacttacatagctcgcactcatttcgattgagatattcacgaagatgtcaaattcatcaatttatttatgtgtacttgcataaggaacgaaaataaatagatgtcaaattcattaatttaaagataagaaaaatatattaaagtactactaggttttggaattttcaattaacataactatttacgcgtagtatatgtgaattttggtgatgttttttttaactgaattggtatagatgtctgtaaacaaattatttagtaagtactatattattttatttttgacatgggaagaccaagattctgcgcttgataacactgggaacttgcattgaaagaagcaggagacaagttaaaagagacaatatcgaaaatcacgacaaatgctttttctaattgacataaataaacaatatgaattgtgataaagtatatgtttttatatttatgctaaaaaccattgtagatttttaaatgataacaacaagctgataaattaattatatatcagttagtggcttatattttagtgaactcgacagtttgactgagagataataagaggttagctagattcaatccgatttatttcgttagaagactagacctacatctaaaatgtgcaatcacacacacacacataaagtaagtataattagaaagaaaaaaaaaaaagtacagactaatagatgggttattataaagatttgaacaaaaaacaaagaaatgtgcaaatgaattagattttgatatttagaaaaaggaaaaaaaaaaaaaaaaagaagaatgggccggaggggacagtgtaaggtaagtgaggaggaagagacgtcgggatacgtgaaaacgcgtttttatttcttacaaataaaaaaaaggtttatgacgaacgtggcagataatcattttagatcgttcatgcatggatcatgcaaaagcctaaaaagtgactaaaaaaactcactttcgattcccacgttacagcttcatttgatactaatataagtgtgtcgcttctttacactttttagttttcgaatttcagttacattagtaattaagctgagaaaaagtttagctgtccaatttaggtgtgtataagaatcttaaaagtgatttttttgattactaaatgtatttgggatcaaagtttataaactttcacatgcatggtataacattggatgatatcatttaattttataaatcaaagcccaagaaaaagataaagaatattatatggttgaaatgaaaccattaatgtctgatccaaaaacataatccggttcaaatatttagactagtgtaaataaactatctatttgataaattacacatcaacatgaaagccactcattgctatgttttaagtttgtttccttcaaaactatcacaactccatgcacctagttgttaaagaaaataaataggaaaccaaaatttttgtgtttgtgtttttttgtttgtatgttggtatagataattttgacattaatttgtcccactagaatataaaaggaaaccaaaatttaatacgatatgaagccctctcaaacttgcgataaatttgaagctttacaaaatcaacacaaaaacggaatcacttaaaatagtactactgtgattaatagtatttgttgacccaacaaaataatatctaacattcatatccataataatatctaaaattcatatccatatatatatatagagctatacatattctcctagtattggtcaccatggcctacttgcatttatgcaacctaacgtttccctttcgatcgttgtgttgatttgtttcaagtttgaacataaaccgataaacagtttcgacgggcaaataatacagtctttgtgccatatataagaaagaagcttaaggacactagtgagattagtgtgttgtagtgggtatttaaatagtgaagttacagaatgttaataaagtatagactagaaaccaaactattgaaaccattttctccaatcatattacatatacaaattcaaaattttaaatatcaaatttgaattggaatgttgaaaatagcctggctacatttggactgtgtcgaacactctacatgtagaagtgagcaatgctatatacaatattgtttctttgttcaactctattttccactaattttcttttaaaaagattaacaattaagtacttaaatgtgtcaaatcagctatataaccttgagatatttaggagcaaaaataatttatatttttacaagaccaattctcaatccatcttttttttataataaaaatgttcaaagaagagattagcgacgacataatccataaattaatacagagattagatagagagtcaagaaaaatgggtttaataaataagacgaaaaaaacagagctgagtcagagttccgtacaattctgctgacgcgtgtcttctcctttctctctcttctccacgcggtttctcattctctctctctctctcttcgccgtcctatttatattatctctcctcagctttcatttctccaattcattcattatcacattcctttactcactctctctctctctctaaaaacagagctcaacaataatgatccactaaaaaagattctcttttctcttcttctccggtgatttacttacttaacaatcatggcgtcgtcggagggattagcaagcgttgatccttggtcattccgtcaaaacttcaacatcgattcgtggctactctctgattccttctcacacgacagtgatatactcgctaaagctcttcacagatccatctccacttccaccgaatcatctcctctttctccttcatctttcttcgactcttcaaccgccgccgtcgatttttctcctcctcaaactctctccaacgtctctttcggctcagatccagaaatccccgccgctagtgctcttggtctcgggaaacgaaaacgtggtcctggtgtttccggtggtaaacaaacgaaacgccgatctcgagtttctaataagaaatctcaaaccacgtttataacggcggacgctgctaatttccggcagatggttcaacaagtcaccggagctaagttcctcggttcttccaacagcattttcgcaccgattgtgaagccggagccacaccgtctcgctagtagattaccaccgtcgtgcggaaacttggaccgatcttcagctgttccaacgctagatacgtcgtcgtttttgtctaaccatcaccaagagaacattatcacagatttgggagctccgaccggttcgtttcatcatcaatccagtgcaggtacaacgacggcgaacgttggtggtggtagctccgccgtggaattggatagttacccgagcttcccaacactcgaatcatggaaagttatgtgatcgatctgattttaagattagtgtttatgtagagatgtaatcccttttgtttttttcctttgtgtttctcattttgttatgaagaatcttgttttagtccttaagcttatgcagctatggagtctcttgttcatacttttggggaaatcaaatggtttattggaaaaaaaacttgttactgcattaattttgtgttagcactatcaaatttactttttaactgtttttaaggataaaaagcggaaaaaggataaatcttcttcagcctatacatggctgtaaaagaaggatttgtcttcagagaagctagggaatatctttatggtcccatgtatctatacacagaaaagacaatcatacacgttaccaccaccacaataatgtctccattactgatacaaatctatttttctcttagatgtaaagattcctcttatcatataatctgaagattaataaaatgaagcatagtgtagcaacaagaattaagttacacaaaataggagattagctttcaacaactactacaagaggagtatgtcaaagtaaacgataatgcgacaacaacccaagtcaaaaagattgcatcgtaaaaaagaaaagttagaatactctcataatgggtttggtgatcagaaacaaacaaaaaaaaattacatttataaggagattatatatgagaaaagtcgcaagcaatagtttagttttttcaacagctccttaggtcagttttaaagtgagtcaacgtcaatgccacaaaagaggaagcactgattcatcatgagtcgtgttcttagtttgactgttaaacgtcatttgcgttgattctttgattcctatattacacgacaccaatatatgtcccgttgagatcaaacttactcattagaaacaaaacgtatactttaaacaagacttaacttaagatcccgaaacgttaaatcaaggttgacactagatttggatgcacttcacatttttgttggatctattcactttaaaaactcaaaattttgcaaatattggtgtaacatgtggacggtggaagagactaaccgagcaataaatattaggaggggccatagattgaccaaagcgattatataatgtaagtcataagtcagaacaaagactaatgtaaaggcgacaaatatattaggggttgttggtggttgcacctgagatgggtttatgagggaatcatcatctactttgtctcactctgattcagacacttatctatcatctcatgtgggtcggtctttgggcttttaattatgaggacgacaccaaaagtgtgtgttcagtttacgttaaacccagtatttatctgtggtatgattcagcttataaacacaacttattaccaaaagctaggaagtaattaagtatttttgtatttcacatcttccacaagttgatctctagtttgtttcctagcctatactacactggtgaagcagctagaaatgtgctcttagatttgcaaacacttgtaaaattatgagatttcctctgtttcttctcatttgttttttagttgtaacgcttcgatcaagaaacccttataagaaagacacattctatcaagcagctgggcttttacagtggatgcagtaagtaatcaatctaaagagatccaaatagtgaaaaaacctgaaaatgcagattacaacaacttaatcatttcgtgttttctgaaactaagtcttgacttttaatttggcttggcctcgaagatctgattagaaaatcaaatcaacacctgtcctcactctaggttagcaaatacttgtacctgttctgctgcgcttgttattcatagatggagtggaaccgagtttgcagagacctcttccagatgatggtatcaaggcaaaaaattatgtgcaatggtagagacagcattaaactatacaatcggatttactgatttagaactgtagagagatagaattacaaatgaaaactacgttaaccaaagatagtcacgaggtacatacgatttaccaaagctagatttgactcgcacagacttttacaaacgtctaatactattaactaaagaatataaaggcatacatgatgcccttttgctttttacctattccttgtctcattgttttactctcttatactcttctcctcttcttctgtcttcatcttcacttatgtcttttccatttcttctccctacttacaccatcatcatacctcgtcccctacgttgtcaggacataacgtttcacagcagtaacagcggctcttgatatgagaaatgcttgacttgaattgctttgcatcgtttagactaagatcctcaacatagtcaacaaaggcataaacttcaccacgatgctcaacctcttcaagcttagctccaaaaccttggatttcaacactttggagggttttcttttcgggatcgaagtagaatacatagtacggtttacatgtatacttcatacacaaaacaatatcgcctcttgcagtcactccagcaactgaaaactcgcaggaaccaaggacttcattctccggtaaagtgtagacatacttgacccattcctgtttctcaacatcctctagaacccacaaacacaactcaacggaacgtcttccaccaacgtcaacatagttgcacttagtcacagctaatttacccatatagttgaccaaacttaatccactagggtcctctatatgatcatctaagcattctgactcaataaacttgaactcctcagagctaacatcaaagcaaacaatcaaagacagtgtttcctcgaaacaagttctagataagtaatacaaaaccccattgatgcatatcccttgagtcctttgacagcgataatacaaaggaccatcaatatcgtttctatcctttctcctccacttgagttcaccagatccttaatttttcctctttccattggtttcgccggagtgcgtgattgttccgccggagaagcagagggttttaggaatacgacgacaaaaagagagagaatacagtacgtggcgcttcagtgaccgctcctccctccaaactaaaacaacttcaatcgtcgttctgcaaatcttgatgttattaggcctatactttaatattagggcccaataaatgtttgctaaaatcttagggcctggcttcacaattcaacattctaataacctttcttattagtttctttcatctcgcattaatatttttttctaattaaaatgaagactttttttctttttttcttctcaaactatattggaattagcttaataggaaacttaagataaaacatgtgtattatatcaaacaaacttatacaatagagggaacaaaatcttgttttggttaagaatgaacaaatgaataaaggaatgaaagaatccaacgtcaaaaattaataacacaaatcacatgatagtacaagcatgagcattatcatcgctaaaaagatgaagagcattttcatcgatattaggttgaactttttgggatgaactaggataataaccattgatagtagagttgtttgtattttgaaagtcgtcaacgtcatagaaatcatactttccactatatgagattgtctgatatatcttctgatccgattgttccaaatgttgagaaggatatgtatagtaatcaccataatatccattgtaaggaaatggccaatattccgctgttcgtcccgttcgtttcaccatctttagaacctcttctcgatcaacgtatcccgtgactgtcactttttgtcgatccacgtctatctctaccgtgtccactcctacacatatttattattatactgttaatcaagatttgccttaagaccaaacatatatttatgaaagctaaatgatacgactaaaatcgatgtttgattttgtttttctgaatttttcttaccatcgagtttagaaatggctcttcgaaccttcttttcacatcctttacaatccatgtctaccaaaagctccacaatcttaaacaacagaagaaaatatacattagaaaatgaacaaaacgtttgatgataaccatcaataaaaagaacaacgaacaaagacatagatggcaacgtacagataaagcgattggtaatcgagagtttccatgtatccaatcaaacattctcttaattatcttgtcgatcgagaatttacgttttgtcttaagatctttttgctttcaatataatattttggttgtatgtgtatgagatatatttatataggtggaatggaaatgactgcgcgtattaggaacacttggtgtgtgattccaagaaaccgcgtttgcgtcttgtgagatgcaaaaagcttatgtcctaagtcttacattatatatcttgtgtcttggtgtcgccagagttttaattattgtgtcttattactagagtaagggtttaccaaaataatatatgaattttagcgtatttcaaagaattaagagattagcttaaaattatattaattaaaaatgatgtagaagcatatacagaaacttgtctcaatcgttttaacgttttttctgtccgtagagttaagaaatttgacgagattcaacataaataaatgtattattgattttattttatttttaataaagtttcgttggatattgaaaactataagaccgaccaatctaaattttattagttttgatttccaggcaattaatccgaaccgaagtggcatacgcatattcaaaagtcaagatctcctgcctaccaaatagtggatatatacaaaaattacagacacatattagcttattaatgtatatatgttgatagaatgcatgcaagtcgtgtgaatagccaaaatgtgaatatatagcatttccaagtagagaaaatgaaatccaaatcatttgaatttgtgaggtttcgaaatctactaaatacgtaaacgaaataactcgctttaccaccaataaaaacaaaatcaaaagggcaatacaacacattatgatgcaacttgatcacttgtgtactctataagttacatttcgcagaaaaaaagattgagaaacctttttaatttgtgttacgtaaattaccgagaagaagcacataagcaaaaaccatatcttgaaagaaagattttggttctttcttagttttgtgacttaaaataacacagagattaatgattaggaacgtcaaggatgactaaaccggtccggtccggctctaaacttaattcatccttgatttgatgattaatgatttatttaaaagtttatgtccggttaaggcccggtccaggaataagatcaaatggggataaaatagtcttttactactcacccaacctgccggaatattgagacacatcatcgttcaaaatcaaaacccctaaactcaaattctctctccgtttttccggtgaaaatcagtcgccgttctccggccacagtctacactaaccgtgtcatttcgagtctcatcaaacctttgagcagataagtaactgctacgaatttgcacaccgaagtcactgtttcaatctgaattgcatctttaaaaaagggacaatggcatcttttcctcatcccggttccgtcaccgtctgcgagatcaacagagacttgagtatgttaaagcttttcccttccattgaaaaatgtagggatttcgaaacttctgagctaatggttagattttcgtagcgcagttacggctcagaacttatctgatgagcgagctcaggagacttatggaaaagttcttgtacgtgggcgtttctctttcgtttctgatttcttataagcttaaaaaccatatttgtaagtagcaaatgttttctttttgacaaatttccatcggatttgggggttttgcgtttgatcacagggaatggtgtttagccctgtttcgttcgactctactcctagctctcttcaggaaaatgaaggacaagagaatggagataaggcaagtggtgagagtaaaggactggttgcaacactgcagatgaaggttgcagactctcttaaacagattttacaacccaccgatgtaagagtttcaactatcagtctgtttctttgtttggttgactaaagaaagcttagcattttgtgattgatggttacaatacttatctttatgtatctaggggaattgataggagggatgttctttgcaatttcaaaatggcattatcatagctgttattaataaagccacagccttgctcaccttttcttttctaggtaactctactctcagagattgatcttcaaggagtgagttggcatcaagggaagcatattattgcctttatatccggtgcaaatcaagttacaattcgtgattatgaggacaaaggtttgttttatttattcaattcaggattcctagttcacatttgccggtgtgtgcatacagtttcatattcttcttttgaacagatgagaaagaaccttgcattttgacaagtgattcacaaagaaatgttaaagcccttgagtggagaccaaatggtggaaaatccctatccattgcctgtcggtgtgtattattggtcttctgatcctgtctactttctagagtagccagtttcatagataactaagtttgattctactgtaataactgttccattgaaacaggggaggaatatgcatatgggctgcttcatatccgggtaacatggcattggttagatctggtggttccgcattgaggggaagtctctctcgaggatctggaactcgttggattttggtggactttcttcggtgtcaaaatgatgagcaaattagtgctctctcatggagcccctgtggaagatatcctaaacaaaatttctgctataactgttttgcttaacttcattttggagttgttacttaactacatacgtttccatgatcatttcaattaccatagttgtttatcaagccgcatcgcatgataggcatttgttgggaaagtatttggatttgttcgatcttttctgtctttgcatcacatggatccctaactttgtccatcctgttactccttgacctattttcacgtatttagcatcagcctcatatgacagttcatctttcaccatatgggatgtttctcaaggtaactagaacgacaattaagaacactttcttaatgcacaacatcatgcaaatgtttgaacattaatccagcttcctcttatttaacatcctatctgttgcgttgagatgagaaaatgcatcttgcaattccttgtttctgaaagtgatatgtatacatcttccaggggcagggacacctattagacggggactaggtggaatatcaatgcttaaatggtcacctacaggagactacttctttgcagcaagattgtaggacatcaactctctttcttttttacagatgtggaaagtagcttcctgtttgatatgattgctaataaaatgtttttctgtcacagtgatgggactttttgtctttgggaaacaaacacatggacatctgaaccctggtctttgtctagtggatctggatctgtcacggtaagatcgtgagcctataatagtgagatatgcaatagagtattgttaaaagcgttttgttggagaggttaacgtcactagtgtggtatgcatagcttatgtacatgactccattgtactaaagcattcatttccttcttttatgtatgaaattgcaactgtgttccatcttcgtaaatggaccaagcaataatactatactcccttctatgatagggagcgatatgggatcccgaaggacggtttatcttgatttcgttttcgaaatcttcaacactgggctctgttcatttctcatccaagccaccatccttgggtatgcagaaactttgaagtcgttttgcctatactactagaaatacttaccagttagcacactaaatctctgttttggtttactttcagatgcccatctattaccagttgaattgccagagattgcttctctaactggctggtaaattatttgattgttttgttcaataaacccttgcaaaggccttccgttaatcacttcttgatattgtctttcataactgaaataaccagtgagggcatcgagaagatagcatgggatgcatctggagaacgattggctgtgtcgtacaaaggaggcgatgaaaattacaaaggattgattgccatctacgacacacgaaggacacctattgtatcagcatcactagtgtaagtaactcttactgttatccattccatcggacttgacctccttttgtatatctttgcattgtctaaatggatagacaaaatctgatgcttttatgattacagcggtttcatcagaggacctggagaaaacccgaaagctctctccttttcattccatgacaagttcaagcaaggtccactcctttctgtggtaaggcatatgcttgattaagtctcttttcatgccaaagtattcatacaggtagaatcggttagttaattaatcttccaaataaaccttgttgcagtgttggagcaccggattctgttgcacctatcctctcatcttccgctcacatgttcttccttaatagccaaatggttcaaatttaatgcaagtttcaaactttttggttctattttgtagactgctcactctttgtatacaaatggtttctttaaagaactcagctttgaagttaaatccaaaaacaatggttgcatttgaagtacattaatggtctttgaacaccaaaaagaacattacaaaaaacgaatacgaaaagcagcaaacagttgagtcacttagacattcttgtttttcttcatcttggaaggtggccatcgacccttcttcctcatcttacgcttacgaaccagacgtttcctgcgtagcctaatctttttggccagcttcatcttcagcctcaattccaagagcagtttctctttagcttctttcgattccaacggtagtttatccactggaacagcagcaacaacagtctttggttcctccttgctctcaggctcagccccgtccacgccagaagcagccgccttcaccacaattcttccatggctagagttcaagctgtaagcactgagagagactctgttcttggactcgacagcgttgggtttaaggctcaaaactgaaacacaaaagattagagcattacaagtaaaccaagtgttcgattaaatgcttcgatctttaagcttaaaacctgactgccctaaaacaaaacttcacttttttgggacaatcaagaaattgaactagcccaggagcttcaatttggttccatgggtctctattgtttttttttttttcccgatacaattccacgacaaaacgaagcaaaagcgaaatgtcaagactagaaacgagtgacaagacattacctggagaagcgaaagacggagattgaagaaggcgcgaggaagaagaagaagaaagagaagagagagaagggagagaattgaagcagagaagagccatcttcttcttctaatggaagaatttgtcttcagactttcatttgatagtggataagctttttctccttctctctgtctgtgtcttcttaacgaacggattggattgatccggctcaatccggtttaattaaatacagaaattatcaaacgaaccggcttctttttcctgattcgggttgaatagataaaccggagtgggtactttttatagaactgtgagttgacacgtggctgtcccagtgtgtgattggcgggagaaaggctaagttaaggttgttccagagaatgatgttggttggtgttttgagcaacttccaatggcggaggacaaatctatggagaaagggagagagagagaaagaaacaaatctatcaaacagaaaccataatcagaagacgaaaggagaacaaaatccgcacaatcggcggcacgatttggatatcgccggtttcattcgcttggctgtgaattgaggaaacttggatatggagctgtaggacgtgtctagccgcggattctgagactggaaacaaagcgaataacatttctgagtttcattccccgaagaaaaacgttatgtcttctcagaatcttgaacgacaaaggatctatcaagtttggcccgccaaaaatgtaagacttctgatgatttgacagcaaatttacatttttaaaaccgcattgtggatttttataggattttaactttggaagataagaatcatgaatgaggaaaatacctcaagatgctcggaattgattttgttactaatatatgctctgcttctctctgtgctaaagtttgaagaacatgagcttttaagattctctcaatggaaatagtctaagatttttatgtgtattgtttcacacatgattttagcaaaagcaagatcctagcttctgtctatatgaaatcatcatctgaagtggagtttctcaatttgttttcgtgtttcagaaattttactgtgggggaagactagtgtttggtccagatgcatcgtcacttcttttgaccacatgtatgataggagggccagctatcgctttctccatcaggatggcttatttgataagccatcgtcaccctttctttcattctcttactttgattggtgcaattcttctcacattcatggtataactataaagctttgctatttacttactttcataagccaagtcataccttaagccaaattcatgcatcttcttacgtcttactttttatctaggctttcacttttctcttcttgacatcatcgagagaccccgggattatcccaaggaacaaacaagtgtctgaggcagagattcctgatgttaccacccaatcgacagaatgggtgactagcaaattaggaagtgtgaaactacctcgaacaaaagatgtaatggtgaatggcttcactgtcaaagtgaagttttgcgatacctgtcagctatatcgtcctcctcgtgcctttcactgctcaatctgcaataactgtgtccaaaggtttgatcatcactgtccttgggttggtcagtgcatcgccttggtaagtcttactattaattctcacttcctagacaaagaactgagtaagatctatgagttgatatgttatctacgggcttttgttttgcagcgtaactatccattcttcgtctgtttcttatcatgttcaacactcctctgcatctacgttttcgtcttctcatgggtcagcatgcttaaagtccatggggaattctatgttgttctcgctgatgacttaatattaggtgttcttggtctctactgctttgtttccgtttggtttgttggtggacttactgtcttccacttctaccttatctgcaccaaccaggcaagattctttagcttttaacgtagtttccaagtagcttttactgttggtctgattctcttgttatgttttgcagacgacttgtgagaattttcggtaccattacgacaagaaggaaaacccttaccgaaaggggatcttagagaacttcaaggagctattctttgcaaaaattccaccacctttgatcaatttcagagattggtcgccagaagaagaagacgatgtggaggttggatccatagcctctgagctagtcagagcctttggtccaaaagacacgaaaatgagcagtggaaagtctgattccgaagctagagaacggtaacaacggtggcacggctgtcaagagataagtatggatgaagacgccacaacgactgctttggtctaccaagaaccagcggaaaacaaggagaagctcgagcgtggaagtgagatcaagataggccaaagtaaaggacaaacaggtgtaaaatctacttttgtaattcaaagccatgtagctctctttctctctttactcgtcaagatgagttttaaactttttcccattaagaataggaattaggagaattggtgtacataaataatcgtttcttgcgttacaggtaattcaatttggtgtttattattgtctccatctttctttttagggttcatataatgtatagtgtttcttaggtcttacggtaaggggtttataagaaaagaagaaaaatttgccaatagagaaaacaaagagacagagggatgtgaagagatgatgatgattcgttgatatgtttaatattctatttctatatataaaaaagctcaaaatactttaccaattgagcaaaagctatatacatatataacaataatatctcatcttatttttgtgagatctttaatcaaattgacttcttcttcttctttttttttgctgaaagcattcatagaacaaactaattacaaaaataatcgaagaagtgaagcatttataaaaggaaaagaagaaagaagatgaagaaaaacacaaatgatggaaaaaatctaggtgtgaagcacgtttgattgagagatgatttgacttggcttcaccagctcattgttgcatcattctatttatctaataatatttatagatatagttggccgaccaatgaaataacaatatttttaagtaataaaaatctaagttaaacaagaaattattccttcttagttcgaacagacatcctcctattagcgtaatcacttgtcctaattacatacattgtccccattatctcatttactcctgtctgaatattcggtaatgagattggaataaaaaatatatttattaccaaaagaaaaaggaaagagaaaagagaaaaggggcaaaagagatcgcaattttgcaaaacagcgaaaatagttctttgtgattttcgagtgagagagacgacagcttccattatcccctgtctctctccctctcgaactacaaatcaaattcgagtgttttcatattgttaatctttttcttcaaggaaagaagagattttgttttccgtttctgggggtttttcttgattctgatctctgatctgatctcatcatcattgtccgtggattctccgatgggtttctgattgtgggttctttcaaatttcttcacttttggagcttttcttctctctgtcttttgttttccctcagctatggcttggaatgagaccaaactcaagaggctctatcaagtttggagaggaagcaatgtaagtcctgacattttccactttgctttcgtttctttcacattttcataacctggagaagatttatcacataggttttggtcattaatgaaatcgctcttggattcctttgagtccaagtcatagcatttcagactcttgactctttattttggtaatgaaataagaaagaagcaaaccagttttgtatctaattgtcaccttccgttgactcagtttagctcttgtgttttagatcattttagactcttgactcttattcattctcttagtagttgtagttgttactatcttgagtcttgattgttcttatatggaagttttcaggcgatggtcattggaagctatggatttaaaactgactttgattttccatttttctttgaagaaatttctatgtggcgggaggctaatatttggtcctgatgcatcatctctatatctatcaaccatcttgatccttggtcctgctgtaatgttctttgtcaaaatgtacactaaaatggctgatcctcgtaccaagaatccaaatctatgtattccaattctctgtgtgtcttggatactcacaattttggtatgtcttctgctttcgaactttttttaaatgatttttttgtgtgtaaaaagtgaactaaagtttcaatagttttcttcaggatatatttttcctcttaatgacatctagtagagatcccgggattgtgccaagaagttttaggcctccggaaaccgatgatgcaccggattcaactactccatcgatggaatgggttagcggtagaacccctaatataagaataccacgggtcaaagatgtaactgttaatggacataccgtaaaagtgaaattctgtgacacttgtttgctttaccgtccacctagagcttctcattgttccatatgcaacaactgtgtccagagatttgatcatcactgcccttgggttggccagtgcattggagtggtaagtttactccatgactcttgccatatattcccggttctatgttttgaacttgtttggattcttttgcagcgaaattaccggttcttcttcatgttcatatcaacatcaaccactctgtgcatatatgtgtttgccttttcttggttgaacatatttcaaagacatatggatgaaaagattagcatctggaaagctatatccaaagatgttctatcggatattctcatagtttactgcttcattactgtttggtttgttggaggactcacaatatttcattcctatctcatctgtactaaccaggtgattagaaagatatatgctttcgtacatttcaggtctttctttttctgttcgctctgttttgttttaatggtgaaaatctgttttgtgcagacgacttatgagaatttccgataccgttatgataagaaggagaatccatacaacaaaggaattttggggaacatatgggaaatatttctgtctaagattcctccatcaatgaacaagtttagatcatttgtcaaggaagaagattatatgatgatgatggttgaaactcctacttcaaatctaggtgaaagtctagttagctcgaaagagaagattgatatcgaaatgggaggaggaaggattgttgatgagagtggaaagagctactctctacctgagattctccggaatctaaactatgaagatcttgaggatgattgtgaggaagatgacttgaaggctaaggatcatcaccaccaccatcaccatcaacatcaacataatgagggaatcatccctccttttgaccctttttttaccaatgagattggtagtaacaaagatgagagaaatggagaagaatcaggaggatcttcaagtgatggtgaaaatacagggaaacgcgttcgggtctcagatgaagatgaagagaaagttgaagggtatgaacgaaattggagtacagataaaggtatgaatataaacgcaggatctgaagatggagcaagctctcctgtatccacttcaccaatgcttcgtaaatagaggtaatcaagctttacctctgtgtttctctagttgctaaagcaagttgcttgcttttcaagaaaccgttctcagccctaaagctttacctctttgtttttttttacttgctagagaaggaaggacttgaagctggagaaatggagtttgtgctttatcattcttttaattctgtttcatataattgtgggaaaaaaaatccgaaaaataacaatcatcttagaaaattgtgagtttgagcactagatttttttatttttaaaattctcctttttagttgtatttatatataccagaatggtctggatatcaccagcatcacatattttctctcttttttatttttccttttttgttataaaaaaagatttggaccacgaatttgtaacgtatatactgttgtcggaattatttttccttattttattggttgattttcatattttatttgtttctaatgatttatcaatcacatatttttctttcaaaaatgttctgttaaataacgaaatcgcaaaaataaaacagtgatattatcaagaagacaatgcaaatcaagaaaaaccaattaattatcgccacgtgtctggctcccacatcagaattcagattttcacaagatgagatttttcacaaatataaatcaccacacagcctcatcttcttcctctagctgcttttgctctctatctcactctttgcttctgcaactcacagtcaatggcggctgaaatggcgttagtgaaacccatctccaagttctcttccccaaagctctcaaacccgagcaaattcctctccggccgacgtttctccaccgtgatcagaatgtcagcctcttcctcaccgcctcctccaaccaccgccacctcgaagtccaagaagggaacgaagaaagagattcaagagtcgcttcttactccgaggttctacacgacggacttcgaggaaatggaacagcttttcaacacggagatcaacaagaaccttaacgaagcagagttcgaggctctgcttcaagagttcaagaccgattacaaccagacacatttcgtgaggaacaaggagtttaaagaagctgcagacaaattgcaaggacctctccgacagatcttcgttgagttccttgagcggtcttgtactgctgagttctctggtttccttctctacaaggagcttggtcgaagactcaaggtgagaatttaagaatatatatggctttaagtaatagtcaagtctcaattgttatgagttttcaagtgtggttgttggtttgatgttccttgtctacgttatgcttgaagctatgctcattaggtggaagttagagcacatgtgagacttgttgttgtttctttggatcattttattggcttgattttgaatctttgatctgatggcattgcagaaaacaaaccctgttgtggctgagatcttctctcttatgtctagagatgaagcaagacatgccgggtaagatctcttaacactaaggacctctctttttaatctaagtgtttcaattttgatgataaactttttttggcaggttcttgaacaagggattgtctgatttcaacttggctcttgatttgggtttcctgacaaaggcaaggaaatacactttcttcaagccaaaattcatcttctacgcgacttacttatccgagaaaatcgggtactggagatacatcacaatctacagacacctcaaggaaaaccctgagttccaatgttacccaatcttcaagtactttgagaactggtgtcaagacgagaaccgtcatggtgatttcttctctgctttgatgaaagctcagcctcagttcctcaatgactggcaagccaagctctggtctcgcttcttctgcctctcggtaattaaactaaactctctttagttctcaatgtgtcttgcacattggcctaaccagtaagaggattggctttacaggtttatgtgacaatgtacctcaatgactgccaaagaactaatttctacgagggtatcgggttaaacacaaaggagttcgatatgcatgtcatcatcgaggtaaaggaacttgaaacaagaagattaatattaacctgtgttatgttcctttttctgaaaatgttgagatttgtttcagacaaaccgaaccacggcaagaatattccctgcggtgctggatgttgagaaccctgagttcaagaggaaactggatagaatggttgtgagctatgagaagctgctggctataggagaaacagatgatgcttccttcatcaagaccctcaagaggattcctttggttacttctttagcctctgagatcttggctgcttatctcatgcctcctgttgagtctggctctgttgatttcgccgagtttgagcctaatcttgtctattagtagctgcaatgtcaagtcttgagtttacggctggttcttgatttcttgtaattgaatgatcgaaactgagaaacatcgtctttttttttttgcaataaacttttactgcatatatttgatcatattgcgcattggacttacttaaatttcagattttattgaactggttgatacagttgagtttgcaacataaaaaaaaaacacattacaaaatctacgaaaatatccctggaaacaatcctaccctctgtgtcttgtgtaaaggagatttatccagagaggattaaatatgaaagctgagctcattcctcattcctcactcagatttggccttaggtttctcttgttcttcggtgagaggcttaaacacaactttgaagaaccaaactgcaagcaacgtagccttcacaggtccaagccaatacacaagtaaatgctctttcgttatatgttcaccgcgtgcataagcccatcccataacctgcaaagattcacacaaaagcaaacattcaaaacaaagatcgctatttgctgaaatcacaatcacaagacttttttttggtacatacagctgcagggttcatgcatccaccggtaagatcagagccaagaatatgaagagttaacttagcaagactaccgatccaagtcttcatgaagaaacttcccgggatttttcttgttagtcccattgagagcagtacaatgaagaatgttagtatcccttctgttaaagcaccgtggtgaattgctacatttagtttaggtcctttcccaatctcagggaatacgtgaatgatatgcttaaccgcaagaattgatcctattacctgaaataacacaaaaccagagtttcacaatagtatcatctttgattacacattagagcaaaagatcttcaagatgaagtctttataaaacaatagagcatataaccaaaatgatctggttttcaaagaagaacccatcagctaaattctccttttttttctctaatttgacattttacaacattacacaaaccctgagacctctctctaacgaagagtcaatttcaattaaaccaaaaaaagtcaacgaaacaaacctcgacggggattcgaacgaagacggagaagatgaaactgctgaagccaccggagactccagcagccaaagcggtcaaaggattataaagcccgcctttggtggcttgttgaaggtaggcgaagatgaacatggagatgatagagaagagataacgaacgatctcaccggaaggatcggtccggctaaatccaagaactccatggactaaaatgttgaccagaactcctgcccatatccacatgaacgacaataccagatcagtcactactaaaccgattcgtcccatttttcgattccaacgatgagaaccaatttctcagaaagaaagaaattaaaagttagcgtttttatgatctgaatttaggataattgaggaccgttgaagagaatcgagattatatgattggctctaagcggctggtgaatttagcatataattgacgctagagacattgtttgagtctgagtcagcttccgacaataaaggttttggctttggtgtgtcgtgatgagattatagattctcttcgattttggaacgagcttcggctattaaccaatagacatcaactaaagtgatacgttattactggataaagtatttactttacacagttaactaataattacaaataaattactacaattagccttcttaagaattgtttacaaaaaagccctccaattttaacctgcgacggaagtttcccctcaggaaaaatatgaccttttgatctttacacgcttggctttgggttgtaacttttgtctctcttctatcgtttatggtgtttgaagcttcagcattgggaatggatctttccttttgaaaataagttgtgaatatacggaaaaatgtgacttgttagtggagaagcaatgcgtttaaagtgttcgacagaatgcctcagtgagttagagtttcagttacctctgtttttgattatagctcttagtgatctcagattggagacgttatcagtcttggctaaattgattaattattactttttccgattttttttgttctgaagaaaatatgtttgtttatgagaggaaagctcggagatgctaagaatagagaaaaatgggtcatgcttgtttctctaaatttgaaggctttcattggtttgaggagatgaacggtttcttctttgaacgacataattagttaagatgaattgacaagaaaagatgaaatgtcggagagaatttttttgatcccttaactcttttggccattggtttttctctctctctgattctttgttaggtttccatgattgttcatatcagctttcactccgaaaatgttgcattctaaaagaccaaaaaacattcttttttcttgtgattcaatggcatagagacaggaagtcacagagtaaagaccattgcagatttcttcatgctgcgtttgatttaatggttttaggtttacactttgttttttcttttgcacagagttcatggttttctcttgtgtatgtgtacattgataggattgttgtttagacaagaacaaatatgttttctgagtttatgttctaggatatacatataggtatcttagagaaaagttttattagtttaagaagatgagcaaggaacaaagctgtgttctaaaggcttgggaggtgaccgtaagaaagacccaacaagcgaagaagcgtgcaaacagcatttttgggacggtatctgtagctccacagacagatgatgatgctactactacgactgaggagaatgatgatgagaccagcactaacagaagcagcataggggaattgtaccatgcagagagaatacttcctaatggagactattatacagggcaatggtatgatagttttcctcacgggcatgggaagtatctttggacagatggttgcatgtacattggtgactggtacaacgggaagactatgggaagagggaagttcgggtggccttctggtgccacatatgaaggcgaattcaaaagtggatacatggatggtgttggcctttacacaggtcctagtggagatacttataaaggtcagtgggtgatgaacctgaaacatggacatggaatcaagcgtttcgcgaatggagatgtgtatgatggtgaatggaggaggggtttgcaagaagcccaaggaaagtatcagtggagagatgggagctattacatgggggaatggaagaacgctacgatctgtggcaaaggtacttttatttggacggatgggaatagatacgacggattttgggatgacggttttcctagaggaaacggtactttcaaatgggctgatgggagtttctacgttggtcattggtctaatgatccggaagagatgaacggtacttattatccatcaggagacgacgggagtcctgaatgggatcctaaagacgtgtttactaatctgagtgagtacaagatctgcagcggagagagagttcctgtgttgccttcacagaaaaagctatctgtttggaactcttccaaacgtgtcgagaaaccgaggaggatgtctgttgacgggagggtaagtgtgggtgtagatagagcgtttgagaagatgaatatgtggggaaccgaaagcggagaaggtgctgctgatattgattccaccacgaggagggacttggatgctgaaatgatgagactagaggctgaagggttcattcagagcctgagaccgagccctgcacctatgagattgccaagggcagggaggaagcaaggcgagacgatatctaaaggccaccggaattacgagcttatgcttaatctacagcttggaatcaggtaaatatcccagtttgctgcctcatttatacaatttgaagttttgttgatgtataagcgctcatgtgaaatgtatttgcttacgcagacatgctgttggaaaacaagctccggttgtgtctcttgatcttaagcattcggcttttgatccaaaggagaaggtatggacaagatttccaccagaaggaaccaaatacacacctcctcatcaatctagtgaattcaaatggaaagactattgcccattagtttttaggtgagatcaaataacattaggctttacttatttcccatctgtacgtattctcacacactgttatgctaattttatctatctttaggagcttgaggaagctattcaaggtagacccagctgattacatgttatcgatctgcgggaatgatgcccttcgggagctatcatcccctggtaagagtggaagctttttctacttgacaaatgatgatcgttacatgataaagacaatgaagaagtctgaaactaaagtgagtttgttttattttaaaatgacaagatgaaaaatatgtagctgctattaactttattctggaattatataatgcaggtgcttctgaggatgcttgcagcatattacaaccatgttcgagcatttgagaacactttggtcattagattctacggtctccactgtgtgaagttaactggaccaatccaaaagaaggtaagaattaagaacaatgctaaacagacaaaaaaactgagacttggattttgattgaatatatcatctcctttattgcaaattgcaggtgcggtttgtcattatgggaaacctattttgttctgagtactccatccacagacgctttgatttgaaaggatcttctcttggccgtacaaccgataaacctgaatcggaaatcaattcaaatacaattttgaaagatcttgatctgaatttcatttttagactacagaaagcttggtaccaagaattcatcaggttggagattcatcaatcattctctttccattgacatttttcattgttatttattatgctgattgtgtttttgttcaggcaagtcgacaaagactgcgagtttctagaacaggagagaataatggattacagtcttctggttgggattcatttcagagaggcatcagtcgctggagagctgattccttctggagctcgcacacctattggttcgctttcctaacaaaaccaaatatcatatctctcctttgaaacccgtgaagcaaatgtatatgtttctttctcgcaactgcaggtgaatttgaagacgaatcagcccctcgtctctctagagcagacgtggatcagcttctctctgatcctacaaggtaaacacaaaacaaattaaactcaatcctagaaagcaactttctcgatttcggttttaagaataaatctgttggctgttgcaggtgggctagtatcagacttggaggcaacatgccggctcgagcagagaggacaatgaggagaagcgactgtgagttccagctagttggcgaaccgacaggagagtactatgaggttgtcatgatctttggaatcatagacattcttcaagactatgatatcagcaagaaactagaacacgcttacaagagcatccagtacgatcctacttcaatctcagccgtcgatccgaggctgtactcgagacgtttccgtgatttcatcttcaaggtcttcactgaggataattgaaacaagtctcttctgtttctggctttcacagcttttcttgtggctcaagaaaaaagggcttaggtatatatatacactactacctttttcttttaagtttttaaatgttctgattttctaataaactatgtaacaacagttgacatctgtagcagtgaatgttttttttttctctgtttatattgttttgttcaatcaatattgactcagtacacaaatgatttggtccagatcagtgttagattcatatgagaaaaggacacagctaaaaagaaatgagaactagtggataaacacaccattatatgaattagtcacctagttaaacgagttttcacatttctcgtacaagtacaacatcctttcacttaattcttcgcaattaatcttgtaatcatccatattctccacttgaagatgcaaagtgtagaagagcctctctccttgagatcttgatgatgaaacatccacaagaacaaacccatcttcttctatcccacccaacacatttgatatcgaaaagttatgaatcttggacgatgagacttggaccatcacttcgttgtcaccaagcctagtggcagaaaccgttgagagataactcgcgaccgcctttggttgctgcttatcgtaaagctcaaagtctctttgacccgatactcgtaccaaaatttcttccttcttttgtattagcctcttcacttgctgttgcagctctggtatgtactttaagctctttgaaaccgtttcaggaatacttagcttcttctgcaagaaagtaaagaaaaagaaataagggttaactcggtgttcttctttagaattgtatagctgtatagacgagcttattagaaacagatgtagatgacatatcagagtagctactagcgatcttaccgattgatcagaagctggaagacatgaacggagagatgagaacaaagtgttgatcttcttgcgtcggtcacgttcactagcattgtgattaagcttcttgaccacaaccggattgttgtctatctcatttccttctgacgaaacagatactcccaagctattctgatgatgagtcacttcataagtctgtggtaccgtcaattcaagaaatgtgccgttatttaggttatctccggcaccgtaatagctttcgtattgattcgttgacggccaaccgaagtttgtgaaaaatgaagggactaatgcacacattttttgcttaatcaaggacaaggttattgattctgtttttttcttgaagttgttttggtaggaatattatagtctcctgattatatatgcggatgaaagactaaagaaacaaatctctgttgttaaatattgttcaacaaactatataataagtgtttttattcgttgagattatatgattgtgttatacgacttacatactataaagagaaatatttaggtctctatagggcataggttggcacgtgtcgaagcctatgttccacgcatgaactaggtttagtcacaagctcagcatattgtgtaagaatcaaacatgtatatgacacgatagtaagattattgtttacacattgaaagatgactcatgcgagtgagaatgttgagagctcgtggtaatcaggtggaagatgctttgggcgtctttacttcctcgtcccatacattttttatgttgtaagcataaactagcattttcatgttgtaagcatatacataagcatttcaaaatttaatatctttatctaaaataaatgtaacctggttattttaattccacaatgacgatggtcattttatattctaatgtcaacttgatcccatttgtgtctaaagtaatatattttctgatttagttattctttcacgaatggatcaaaaatattccaaaattgtatatgtgattgtgaatcaatgaagtttccaacattcgtttcgtgactcacattttctaagctaatatgataatctccgaaagctacagttatcatcatgtaaattcatatccttattcgatctcatatattttataaccaagccaagtaaaccaatacatttcttcttctttttttaaacaaacataaactaaaaatccaaagatttaactctttcaaaaccaatactccaaacttttttctgtgatgccactctgattaaaaaaactgcctctagtatataataactccaagatcaatggataaccctttgacaaaaaaaggatcaatggataaccacatggcttctcatttatcatttatcctaataaatcttaattaactctttaatgtcaccacaatctattaattcataagtgcaacttggcttaattacataacttatcttctaaattggagcccatagactctttactataatgttgcccacaagtagtgatatatagtagttgttaataaaataccctcttttgtcttttctcgtttttatattctattgatacaccaaaacatcactaactctagtcttaactggatataaataacaagatatacataaacaaattttttattagtaacattcaaagtctaggcgaaaattaaagtttatagctgtaacatgaacttcataataatcagtttatacttaatagcataactaatcgatcattgacttcgaccaaaaaaacgaaacaactcgactacaacgctttgtcaagaatgttagatttcgaagagaaaaaggacgacataacataactataaagaaacaagaccaaattctcatatatatgagtttccacattcctcatacaagtacaacatcctctgacttaactcttcgcaattcagcttgtaattttcaatcttctccacttgtaaatgcaaagtgtagaaaagcctttctccttgagaccttgaagatgacatgtccacaagaacaaacctatcttcttctaacccacttaaaacattagatatcgaaaagttatgaatcttggacgatgagatttggaccatcacttcgttgtcaccaagcctagtcgcagaaacggtcgagatataattcgcgacggcctttggtggctgcttaacgtaacattcagtgtttctttgacctgaaatttgcaccaagagctcttccttcttttttattagcttcttcacttgctcttgcagctctggtatgtacttcaagcttcgagaaaccgtcgcaggaatgcttagcttcttctgcaagaaaggaaagaaaaaaggtttaacgcagtattcttcttctaaattgtatagatgcataaactataacgggtctaatcaatgagtcggagtagcttcttaccgattggccagaggcaggaagacatgaacggagagatgagaacaaagagttaattttcctgcgacggtcacgctcactagcattgtgattaagcttcttgacgaccaccggattgttgtctatttcatttccctccgacgaaacagaaacaccaaagctattctgatgttgagtcaccgctgtaacagctccataagtctcctccggtaccggaaaatcaagaaacccgccgttgttgaggatatctccggcgaggtagtagctgtcgtactctcccgttgatggccacccaaagtttggaaacaatggaggtactaatgcacacatttttgcttactaaggacaagtattgtagattctgttttctctagatgcttggaagctgctttggttaggattgttctgaacttaggtagaatattattgtccaacgtatatataatgcggatatatacaattcaatatatcaatctctatggttaagtataaattaacaaactatactattatacaaccaaaactttaaaaattcgcaaactatattataagtgttatacgacttgtactataaagaagaatgtttggatctgaggacgtaggtcgacacatgccaaagcctatgtcccacgggtgaacaaggtctagtcacaagtagactggctatataaaaaattaaagaagaatattacatgtattaagtattagagtttacatattgaaagatgactcagcctgaagaaattgtggaagacgcgtgtaaatcagattcaggcgtcttcctagtcccaaacacttggatgttgtaagcatatacataagcaattctcatgttgtaagcatatacataagcattttatttatttgttgacctcccaaaaaaaaaaaccagaagcatcttctttaattactttattaaatcaatgttagctttgttaatttagctattaacaaccctcggtcggtgatttatcatgcggattgataaatcattatcgaactagggtcaactttaggtcatcctctttccaatcaattacctttagcctcaagtaagcaaattctgttgtgctgattgaagaccaggtcaaaaatattccaaaattgtatatgtgatcaattaagtttcaagattctcaatagtaggtgacacatttttcaaatctaataaagcccctgaaaagctacatttatcattgccggcctcttccacgcccaccaccacggccaccttttccccgggaaccgccgcctcctctccctctaaaaccaccacctcctctacctctgaaaccgcctctaatatttgttgatttcagtccaagagactgaactcctctcctcttgtttctttgcccatcttcatactcatcgtctctatcttctttgtactttgatgaccctctcgccttgaaagaaaactcccgtgatcctccaggaccgaatttgatatctttcgagcctccaaagttgccacgccggttctctatagccttgacacgctcgcccataggaagactatcttctttagccagtgaagtgcggttgtgataagctgcggcatgccgctcatctttcacttcatacaacctgacaccaaatcatccacatcagaaaacaaaagaatcaagatagaatgtgtcaaatgtagatcctggaatgcagtcaaaagacactaacttcggagttctcgctttcttgcttggcctagttgcgtctccatcgtcggcctcgtcatctgaaggctgtgatgcatcagaatcactgttctcgtcatcatctgatacagcttcaaagtgttcatctaacagagaaggttgcttcttcgaagaagcaacagggtgtaggacaccatattcatatgagtccttatcaatttggaagtcctgaaaaccaaaaggagattcccaagaatacgtttgatacgatgtgaaatagagcaataaaaagatcaaacaaaaaaagttgaaaagaatatgttaataccggattttggaacatcgaaccaaaccgaccatctacgaaatgctcgtcagtaagtatgggtttcttctttttcagcactttcttggtggcctccccatcctcggcagttttattttcctcctctgattcgtccccatgaagccttgctgcaaggtctcggttaacctttggcaaccgtctctttttctgaaggaagcacaagagaaacagatgtgtatgtaagtagccggtaaacaaacaaatggtgaacgtatagctgctaaggttttaaatactaactgtgattctctgcgtacgctgctcttctaacttctcttgcttcctacgttctaagtaatcatcaaatgcaaaaggttcaatcactgctaaagcctgtaaaaagaaaggaagaaacattatagagactattccaatttgacccgaaaaaaaaaaaagacttttctgatggtataagtattatgaaaatgttaaggactcacctttttgtacaaatggtaattaataaaatatccatgcatagatgctttcaaaagatctgttccaatcaaatgagttagctgcaacttctccagatcttccattgccaaaaatttgtaattatcataaatagttgtctgtgcactttcctccaactcttcctgagaacaatattaaacacaagaaacgtgtttgtaacaatggtgacatcactggaatggtaaacctgtaaaaggataggaagaattttcaatttaccgttagattttcaagaggagaacaccatttgggggcaggaccgagttcaggtatgaagtaagatgggattaggctagagtctaaagcaagaagcataagtccgcttccacggaacacacaaatgtcgtttattcctccttgagtcggttcaatgctggtcataccttctccctgataaacacaaattgaaaataacaaaacagaatatggtgaatcaaaaatctcgacatatttcttgttttttcaaaaaaattatgaggttaaacctgttcttatctgatgcttaccgtgtttggatcccatattctaacaatgtgtttgttggtagtaatcaacttaggttgttgagtattaagagtccgttgccacttaatattcaaaattgggctctcgtacctgcaagttttgcagaaaatcaatgaacactgaggaaataacctaacgatatagcatatacaaagaattttgagttaatacaaacacagtaagacttacatgtgatccttcactcttatgggagttgaagtacgcaagtcgtatatgaatacctgcagataccgaacagcacaatcaacacaacatatctatataatcaaattgacctaccaatgttttaaacctttcagataaaaaaatgaatatagcatcaaacctttcccgcgctactcccgacagctacttgaagaccttcactgtcatcaaactctatagcagtaacctcctattagccaatttaaagcacaagatcatcagaaatcaatgcaattttcaccaatcacatgacgtctaagctaagaaagtctgtttatttggaacacaagttagaaaaaattaccgcagcagcatcaccaccatgtgtgaccgcgttaattctagcagcagatgatttcattctcatatcaaaaaattccacagcaccatcctcaccaccacaagcaactaatccatggaggttgctggaaagaaaatagtgctcaaatgtaagcaataataatctagagtaccagaatcgaattttctcctagatgaaatcaagaaacataatagaaagaaaagacagttcggtatacagaccttcgagaaacgacattaagcgctggggattgagtgctgagaggagaaagaaatcttccctaaacagaaagaaggcaaaaaacacaaatcattctctaacaaagactgagataggtcacaacactaaactattataaattcactggaaagtacctgctccaaattgattctatatagatcaggtgaggaagcagcgcaaagaagatcacaagaccaggaatcatatgtcatatctctccccatcctgcaaatatgtgaatgctttagaccacgaaagatatatctcatagaccaacaaagctaaagtaccttggaattcgtaaagtgtggtgtttcccgtatttggcgtgtaaattaatagaacgatcagcacataagaaggcaagctt

SEQ ID NO: 1367 - DNA, 91303 bp, Arabidopsis thaliana
gaattctatgttgttctcgctgatgacttaatattaggtgttcttggtctctactgctttgtttccgtttggtttgttggtggacttactgtcttccacttctaccttatctgcaccaaccaggcaagattctttagcttttaacgtagtttccaagtagcttttactgttggtctgattctcttgttatgttttgcagacgacttgtgagaattttcggtaccattacgacaagaaggaaaacccttaccgaaaggggatcttagagaacttcaaggagctattctttgcaaaaattccaccacctttgatcaatttcagagattggtcgccagaagaagaagacgatgtggaggttggatccatagcctctgagctagtcagagcctttggtccaaaagacacgaaaatgagcagtggaaagtctgattccgaagctagagaacggtaacaacggtggcacggctgtcaagagataagtatggatgaagacgccacaacgactgctttggtctaccaagaaccagcggaaaacaaggagaagctcgagcgtggaagtgagatcaagataggccaaagtaaaggacaaacaggtgtaaaatctacttttgtaattcaaagccatgtagctctctttctctctttactcgtcaagatgagttttaaactttttcccattaagaataggaattaggagaattggtgtacataaataatcgtttcttgcgttacaggtaattcaatttggtgtttattattgtctccatctttctttttagggttcatataatgtatagtgtttcttaggtcttacggtaaggggtttataagaaaagaagaaaaatttgccaatagagaaaacaaagagacagagggatgtgaagagatgatgatgattcgttgatatgtttaatattctatttctatatataaaaaagctcaaaatactttaccaattgagcaaaagctatatacatatataacaataatatctcatcttatttttgtgagatctttaatcaaattgacttcttcttcttctttttttttgctgaaagcattcatagaacaaactaattacaaaaataatcgaagaagtgaagcatttataaaaggaaaagaagaaagaagatgaagaaaaacacaaatgatggaaaaaatctaggtgtgaagcacgtttgattgagagatgatttgacttggcttcaccagctcattgttgcatcattctatttatctaataatatttatagatatagttggccgaccaatgaaataacaatatttttaagtaataaaaatctaagttaaacaagaaattattccttcttagttcgaacagacatcctcctattagcgtaatcacttgtcctaattacatacattgtccccattatctcatttactcctgtctgaatattcggtaatgagattggaataaaaaatatatttattaccaaaagaaaaaggaaagagaaaagagaaaaggggcaaaagagatcgcaattttgcaaaacagcgaaaatagttctttgtgattttcgagtgagagagacgacagcttccattatcccctgtctctctccctctcgaactacaaatcaaattcgagtgttttcatattgttaatctttttcttcaaggaaagaagagattttgttttccgtttctgggggtttttcttgattctgatctctgatctgatctcatcatcattgtccgtggattctccgatgggtttctgattgtgggttctttcaaatttcttcacttttggagcttttcttctctctgtcttttgttttccctcagctatggcttggaatgagaccaaactcaagaggctctatcaagtttggagaggaagcaatgtaagtcctgacattttccactttgctttcgtttctttcacattttcataacctggagaagatttatcacataggttttggtcattaatgaaatcgctcttggattcctttgagtccaagtcatagcatttcagactcttgactctttattttggtaatgaaataagaaagaagcaaaccagttttgtatctaattgtcaccttccgttgactcagtttagctcttgtgttttagatcattttagactcttgactcttattcattctcttagtagttgtagttgttactatcttgagtcttgattgttcttatatggaagttttcaggcgatggtcattggaagctatggatttaaaactgactttgattttccatttttctttgaagaaatttctatgtggcgggaggctaatatttggtcctgatgcatcatctctatatctatcaaccatcttgatccttggtcctgctgtaatgttctttgtcaaaatgtacactaaaatggctgatcctcgtaccaagaatccaaatctatgtattccaattctctgtgtgtcttggatactcacaattttggtatgtcttctgctttcgaactttttttaaatgatttttttgtgtgtaaaaagtgaactaaagtttcaatagttttcttcaggatatatttttcctcttaatgacatctagtagagatcccgggattgtgccaagaagttttaggcctccggaaaccgatgatgcaccggattcaactactccatcgatggaatgggttagcggtagaacccctaatataagaataccacgggtcaaagatgtaactgttaatggacataccgtaaaagtgaaattctgtgacacttgtttgctttaccgtccacctagagcttctcattgttccatatgcaacaactgtgtccagagatttgatcatcactgcccttgggttggccagtgcattggagtggtaagtttactccatgactcttgccatatattcccggttctatgttttgaacttgtttggattcttttgcagcgaaattaccggttcttcttcatgttcatatcaacatcaaccactctgtgcatatatgtgtttgccttttcttggttgaacatatttcaaagacatatggatgaaaagattagcatctggaaagctatatccaaagatgttctatcggatattctcatagtttactgcttcattactgtttggtttgttggaggactcacaatatttcattcctatctcatctgtactaaccaggtgattagaaagatatatgctttcgtacatttcaggtctttctttttctgttcgctctgttttgttttaatggtgaaaatctgttttgtgcagacgacttatgagaatttccgataccgttatgataagaaggagaatccatacaacaaaggaattttggggaacatatgggaaatatttctgtctaagattcctccatcaatgaacaagtttagatcatttgtcaaggaagaagattatatgatgatgatggttgaaactcctacttcaaatctaggtgaaagtctagttagctcgaaagagaagattgatatcgaaatgggaggaggaaggattgttgatgagagtggaaagagctactctctacctgagattctccggaatctaaactatgaagatcttgaggatgattgtgaggaagatgacttgaaggctaaggatcatcaccaccaccatcaccatcaacatcaacataatgagggaatcatccctccttttgaccctttttttaccaatgagattggtagtaacaaagatgagagaaatggagaagaatcaggaggatcttcaagtgatggtgaaaatacagggaaacgcgttcgggtctcagatgaagatgaagagaaagttgaagggtatgaacgaaattggagtacagataaaggtatgaatataaacgcaggatctgaagatggagcaagctctcctgtatccacttcaccaatgcttcgtaaatagaggtaatcaagctttacctctgtgtttctctagttgctaaagcaagttgcttgcttttcaagaaaccgttctcagccctaaagctttacctctttgtttttttttacttgctagagaaggaaggacttgaagctggagaaatggagtttgtgctttatcattcttttaattctgtttcatataattgtgggaaaaaaaatccgaaaaataacaatcatcttagaaaattgtgagtttgagcactagatttttttatttttaaaattctcctttttagttgtatttatatataccagaatggtctggatatcaccagcatcacatattttctctcttttttatttttccttttttgttataaaaaaagatttggaccacgaatttgtaacgtatatactgttgtcggaattatttttccttattttattggttgattttcatattttatttgtttctaatgatttatcaatcacatatttttctttcaaaaatgttctgttaaataacgaaatcgcaaaaataaaacagtgatattatcaagaagacaatgcaaatcaagaaaaaccaattaattatcgccacgtgtctggctcccacatcagaattcagattttcacaagatgagatttttcacaaatataaatcaccacacagcctcatcttcttcctctagctgcttttgctctctatctcactctttgcttctgcaactcacagtcaatggcggctgaaatggcgttagtgaaacccatctccaagttctcttccccaaagctctcaaacccgagcaaattcctctccggccgacgtttctccaccgtgatcagaatgtcagcctcttcctcaccgcctcctccaaccaccgccacctcgaagtccaagaagggaacgaagaaagagattcaagagtcgcttcttactccgaggttctacacgacggacttcgaggaaatggaacagcttttcaacacggagatcaacaagaaccttaacgaagcagagttcgaggctctgcttcaagagttcaagaccgattacaaccagacacatttcgtgaggaacaaggagtttaaagaagctgcagacaaattgcaaggacctctccgacagatcttcgttgagttccttgagcggtcttgtactgctgagttctctggtttccttctctacaaggagcttggtcgaagactcaaggtgagaatttaagaatatatatggctttaagtaatagtcaagtctcaattgttatgagttttcaagtgtggttgttggtttgatgttccttgtctacgttatgcttgaagctatgctcattaggtggaagttagagcacatgtgagacttgttgttgtttctttggatcattttattggcttgattttgaatctttgatctgatggcattgcagaaaacaaaccctgttgtggctgagatcttctctcttatgtctagagatgaagcaagacatgccgggtaagatctcttaacactaaggacctctctttttaatctaagtgtttcaattttgatgataaactttttttggcaggttcttgaacaagggattgtctgatttcaacttggctcttgatttgggtttcctgacaaaggcaaggaaatacactttcttcaagccaaaattcatcttctacgcgacttacttatccgagaaaatcgggtactggagatacatcacaatctacagacacctcaaggaaaaccctgagttccaatgttacccaatcttcaagtactttgagaactggtgtcaagacgagaaccgtcatggtgatttcttctctgctttgatgaaagctcagcctcagttcctcaatgactggcaagccaagctctggtctcgcttcttctgcctctcggtaattaaactaaactctctttagttctcaatgtgtcttgcacattggcctaaccagtaagaggattggctttacaggtttatgtgacaatgtacctcaatgactgccaaagaactaatttctacgagggtatcgggttaaacacaaaggagttcgatatgcatgtcatcatcgaggtaaaggaacttgaaacaagaagattaatattaacctgtgttatgttcctttttctgaaaatgttgagatttgtttcagacaaaccgaaccacggcaagaatattccctgcggtgctggatgttgagaaccctgagttcaagaggaaactggatagaatggttgtgagctatgagaagctgctggctataggagaaacagatgatgcttccttcatcaagaccctcaagaggattcctttggttacttctttagcctctgagatcttggctgcttatctcatgcctcctgttgagtctggctctgttgatttcgccgagtttgagcctaatcttgtctattagtagctgcaatgtcaagtcttgagtttacggctggttcttgatttcttgtaattgaatgatcgaaactgagaaacatcgtctttttttttttgcaataaacttttactgcatatatttgatcatattgcgcattggacttacttaaatttcagattttattgaactggttgatacagttgagtttgcaacataaaaaaaaaacacattacaaaatctacgaaaatatccctggaaacaatcctaccctctgtgtcttgtgtaaaggagatttatccagagaggattaaatatgaaagctgagctcattcctcattcctcactcagatttggccttaggtttctcttgttcttcggtgagaggcttaaacacaactttgaagaaccaaactgcaagcaacgtagccttcacaggtccaagccaatacacaagtaaatgctctttcgttatatgttcaccgcgtgcataagcccatcccataacctgcaaagattcacacaaaagcaaacattcaaaacaaagatcgctatttgctgaaatcacaatcacaagacttttttttggtacatacagctgcagggttcatgcatccaccggtaagatcagagccaagaatatgaagagttaacttagcaagactaccgatccaagtcttcatgaagaaacttcccgggatttttcttgttagtcccattgagagcagtacaatgaagaatgttagtatcccttctgttaaagcaccgtggtgaattgctacatttagtttaggtcctttcccaatctcagggaatacgtgaatgatatgcttaaccgcaagaattgatcctattacctgaaataacacaaaaccagagtttcacaatagtatcatctttgattacacattagagcaaaagatcttcaagatgaagtctttataaaacaatagagcatataaccaaaatgatctggttttcaaagaagaacccatcagctaaattctccttttttttctctaatttgacattttacaacattacacaaaccctgagacctctctctaacgaagagtcaatttcaattaaaccaaaaaaagtcaacgaaacaaacctcgacggggattcgaacgaagacggagaagatgaaactgctgaagccaccggagactccagcagccaaagcggtcaaaggattataaagcccgcctttggtggcttgttgaaggtaggcgaagatgaacatggagatgatagagaagagataacgaacgatctcaccggaaggatcggtccggctaaatccaagaactccatggactaaaatgttgaccagaactcctgcccatatccacatgaacgacaataccagatcagtcactactaaaccgattcgtcccatttttcgattccaacgatgagaaccaatttctcagaaagaaagaaattaaaagttagcgtttttatgatctgaatttaggataattgaggaccgttgaagagaatcgagattatatgattggctctaagcggctggtgaatttagcatataattgacgctagagacattgtttgagtctgagtcagcttccgacaataaaggttttggctttggtgtgtcgtgatgagattatagattctcttcgattttggaacgagcttcggctattaaccaatagacatcaactaaagtgatacgttattactggataaagtatttactttacacagttaactaataattacaaataaattactacaattagccttcttaagaattgtttacaaaaaagccctccaattttaacctgcgacggaagtttcccctcaggaaaaatatgaccttttgatctttacacgcttggctttgggttgtaacttttgtctctcttctatcgtttatggtgtttgaagcttcagcattgggaatggatctttccttttgaaaataagttgtgaatatacggaaaaatgtgacttgttagtggagaagcaatgcgtttaaagtgttcgacagaatgcctcagtgagttagagtttcagttacctctgtttttgattatagctcttagtgatctcagattggagacgttatcagtcttggctaaattgattaattattactttttccgattttttttgttctgaagaaaatatgtttgtttatgagaggaaagctcggagatgctaagaatagagaaaaatgggtcatgcttgtttctctaaatttgaaggctttcattggtttgaggagatgaacggtttcttctttgaacgacataattagttaagatgaattgacaagaaaagatgaaatgtcggagagaatttttttgatcccttaactcttttggccattggtttttctctctctctgattctttgttaggtttccatgattgttcatatcagctttcactccgaaaatgttgcattctaaaagaccaaaaaacattcttttttcttgtgattcaatggcatagagacaggaagtcacagagtaaagaccattgcagatttcttcatgctgcgtttgatttaatggttttaggtttacactttgttttttcttttgcacagagttcatggttttctcttgtgtatgtgtacattgataggattgttgtttagacaagaacaaatatgttttctgagtttatgttctaggatatacatataggtatcttagagaaaagttttattagtttaagaagatgagcaaggaacaaagctgtgttctaaaggcttgggaggtgaccgtaagaaagacccaacaagcgaagaagcgtgcaaacagcatttttgggacggtatctgtagctccacagacagatgatgatgctactactacgactgaggagaatgatgatgagaccagcactaacagaagcagcataggggaattgtaccatgcagagagaatacttcctaatggagactattatacagggcaatggtatgatagttttcctcacgggcatgggaagtatctttggacagatggttgcatgtacattggtgactggtacaacgggaagactatgggaagagggaagttcgggtggccttctggtgccacatatgaaggcgaattcaaaagtggatacatggatggtgttggcctttacacaggtcctagtggagatacttataaaggtcagtgggtgatgaacctgaaacatggacatggaatcaagcgtttcgcgaatggagatgtgtatgatggtgaatggaggaggggtttgcaagaagcccaaggaaagtatcagtggagagatgggagctattacatgggggaatggaagaacgctacgatctgtggcaaaggtacttttatttggacggatgggaatagatacgacggattttgggatgacggttttcctagaggaaacggtactttcaaatgggctgatgggagtttctacgttggtcattggtctaatgatccggaagagatgaacggtacttattatccatcaggagacgacgggagtcctgaatgggatcctaaagacgtgtttactaatctgagtgagtacaagatctgcagcggagagagagttcctgtgttgccttcacagaaaaagctatctgtttggaactcttccaaacgtgtcgagaaaccgaggaggatgtctgttgacgggagggtaagtgtgggtgtagatagagcgtttgagaagatgaatatgtggggaaccgaaagcggagaaggtgctgctgatattgattccaccacgaggagggacttggatgctgaaatgatgagactagaggctgaagggttcattcagagcctgagaccgagccctgcacctatgagattgccaagggcagggaggaagcaaggcgagacgatatctaaaggccaccggaattacgagcttatgcttaatctacagcttggaatcaggtaaatatcccagtttgctgcctcatttatacaatttgaagttttgttgatgtataagcgctcatgtgaaatgtatttgcttacgcagacatgctgttggaaaacaagctccggttgtgtctcttgatcttaagcattcggcttttgatccaaaggagaaggtatggacaagatttccaccagaaggaaccaaatacacacctcctcatcaatctagtgaattcaaatggaaagactattgcccattagtttttaggtgagatcaaataacattaggctttacttatttcccatctgtacgtattctcacacactgttatgctaattttatctatctttaggagcttgaggaagctattcaaggtagacccagctgattacatgttatcgatctgcgggaatgatgcccttcgggagctatcatcccctggtaagagtggaagctttttctacttgacaaatgatgatcgttacatgataaagacaatgaagaagtctgaaactaaagtgagtttgttttattttaaaatgacaagatgaaaaatatgtagctgctattaactttattctggaattatataatgcaggtgcttctgaggatgcttgcagcatattacaaccatgttcgagcatttgagaacactttggtcattagattctacggtctccactgtgtgaagttaactggaccaatccaaaagaaggtaagaattaagaacaatgctaaacagacaaaaaaactgagacttggattttgattgaatatatcatctcctttattgcaaattgcaggtgcggtttgtcattatgggaaacctattttgttctgagtactccatccacagacgctttgatttgaaaggatcttctcttggccgtacaaccgataaacctgaatcggaaatcaattcaaatacaattttgaaagatcttgatctgaatttcatttttagactacagaaagcttggtaccaagaattcatcaggttggagattcatcaatcattctctttccattgacatttttcattgttatttattatgctgattgtgtttttgttcaggcaagtcgacaaagactgcgagtttctagaacaggagagaataatggattacagtcttctggttgggattcatttcagagaggcatcagtcgctggagagctgattccttctggagctcgcacacctattggttcgctttcctaacaaaaccaaatatcatatctctcctttgaaacccgtgaagcaaatgtatatgtttctttctcgcaactgcaggtgaatttgaagacgaatcagcccctcgtctctctagagcagacgtggatcagcttctctctgatcctacaaggtaaacacaaaacaaattaaactcaatcctagaaagcaactttctcgatttcggttttaagaataaatctgttggctgttgcaggtgggctagtatcagacttggaggcaacatgccggctcgagcagagaggacaatgaggagaagcgactgtgagttccagctagttggcgaaccgacaggagagtactatgaggttgtcatgatctttggaatcatagacattcttcaagactatgatatcagcaagaaactagaacacgcttacaagagcatccagtacgatcctacttcaatctcagccgtcgatccgaggctgtactcgagacgtttccgtgatttcatcttcaaggtcttcactgaggataattgaaacaagtctcttctgtttctggctttcacagcttttcttgtggctcaagaaaaaagggcttaggtatatatatacactactacctttttcttttaagtttttaaatgttctgattttctaataaactatgtaacaacagttgacatctgtagcagtgaatgttttttttttctctgtttatattgttttgttcaatcaatattgactcagtacacaaatgatttggtccagatcagtgttagattcatatgagaaaaggacacagctaaaaagaaatgagaactagtggataaacacaccattatatgaattagtcacctagttaaacgagttttcacatttctcgtacaagtacaacatcctttcacttaattcttcgcaattaatcttgtaatcatccatattctccacttgaagatgcaaagtgtagaagagcctctctccttgagatcttgatgatgaaacatccacaagaacaaacccatcttcttctatcccacccaacacatttgatatcgaaaagttatgaatcttggacgatgagacttggaccatcacttcgttgtcaccaagcctagtggcagaaaccgttgagagataactcgcgaccgcctttggttgctgcttatcgtaaagctcaaagtctctttgacccgatactcgtaccaaaatttcttccttcttttgtattagcctcttcacttgctgttgcagctctggtatgtactttaagctctttgaaaccgtttcaggaatacttagcttcttctgcaagaaagtaaagaaaaagaaataagggttaactcggtgttcttctttagaattgtatagctgtatagacgagcttattagaaacagatgtagatgacatatcagagtagctactagcgatcttaccgattgatcagaagctggaagacatgaacggagagatgagaacaaagtgttgatcttcttgcgtcggtcacgttcactagcattgtgattaagcttcttgaccacaaccggattgttgtctatctcatttccttctgacgaaacagatactcccaagctattctgatgatgagtcacttcataagtctgtggtaccgtcaattcaagaaatgtgccgttatttaggttatctccggcaccgtaatagctttcgtattgattcgttgacggccaaccgaagtttgtgaaaaatgaagggactaatgcacacattttttgcttaatcaaggacaaggttattgattctgtttttttcttgaagttgttttggtaggaatattatagtctcctgattatatatgcggatgaaagactaaagaaacaaatctctgttgttaaatattgttcaacaaactatataataagtgtttttattcgttgagattatatgattgtgttatacgacttacatactataaagagaaatatttaggtctctatagggcataggttggcacgtgtcgaagcctatgttccacgcatgaactaggtttagtcacaagctcagcatattgtgtaagaatcaaacatgtatatgacacgatagtaagattattgtttacacattgaaagatgactcatgcgagtgagaatgttgagagctcgtggtaatcaggtggaagatgctttgggcgtctttacttcctcgtcccatacattttttatgttgtaagcataaactagcattttcatgttgtaagcatatacataagcatttcaaaatttaatatctttatctaaaataaatgtaacctggttattttaattccacaatgacgatggtcattttatattctaatgtcaacttgatcccatttgtgtctaaagtaatatattttctgatttagttattctttcacgaatggatcaaaaatattccaaaattgtatatgtgattgtgaatcaatgaagtttccaacattcgtttcgtgactcacattttctaagctaatatgataatctccgaaagctacagttatcatcatgtaaattcatatccttattcgatctcatatattttataaccaagccaagtaaaccaatacatttcttcttctttttttaaacaaacataaactaaaaatccaaagatttaactctttcaaaaccaatactccaaacttttttctgtgatgccactctgattaaaaaaactgcctctagtatataataactccaagatcaatggataaccctttgacaaaaaaaggatcaatggataaccacatggcttctcatttatcatttatcctaataaatcttaattaactctttaatgtcaccacaatctattaattcataagtgcaacttggcttaattacataacttatcttctaaattggagcccatagactctttactataatgttgcccacaagtagtgatatatagtagttgttaataaaataccctcttttgtcttttctcgtttttatattctattgatacaccaaaacatcactaactctagtcttaactggatataaataacaagatatacataaacaaattttttattagtaacattcaaagtctaggcgaaaattaaagtttatagctgtaacatgaacttcataataatcagtttatacttaatagcataactaatcgatcattgacttcgaccaaaaaaacgaaacaactcgactacaacgctttgtcaagaatgttagatttcgaagagaaaaaggacgacataacataactataaagaaacaagaccaaattctcatatatatgagtttccacattcctcatacaagtacaacatcctctgacttaactcttcgcaattcagcttgtaattttcaatcttctccacttgtaaatgcaaagtgtagaaaagcctttctccttgagaccttgaagatgacatgtccacaagaacaaacctatcttcttctaacccacttaaaacattagatatcgaaaagttatgaatcttggacgatgagatttggaccatcacttcgttgtcaccaagcctagtcgcagaaacggtcgagatataattcgcgacggcctttggtggctgcttaacgtaacattcagtgtttctttgacctgaaatttgcaccaagagctcttccttcttttttattagcttcttcacttgctcttgcagctctggtatgtacttcaagcttcgagaaaccgtcgcaggaatgcttagcttcttctgcaagaaaggaaagaaaaaaggtttaacgcagtattcttcttctaaattgtatagatgcataaactataacgggtctaatcaatgagtcggagtagcttcttaccgattggccagaggcaggaagacatgaacggagagatgagaacaaagagttaattttcctgcgacggtcacgctcactagcattgtgattaagcttcttgacgaccaccggattgttgtctatttcatttccctccgacgaaacagaaacaccaaagctattctgatgttgagtcaccgctgtaacagctccataagtctcctccggtaccggaaaatcaagaaacccgccgttgttgaggatatctccggcgaggtagtagctgtcgtactctcccgttgatggccacccaaagtttggaaacaatggaggtactaatgcacacatttttgcttactaaggacaagtattgtagattctgttttctctagatgcttggaagctgctttggttaggattgttctgaacttaggtagaatattattgtccaacgtatatataatgcggatatatacaattcaatatatcaatctctatggttaagtataaattaacaaactatactattatacaaccaaaactttaaaaattcgcaaactatattataagtgttatacgacttgtactataaagaagaatgtttggatctgaggacgtaggtcgacacatgccaaagcctatgtcccacgggtgaacaaggtctagtcacaagtagactggctatataaaaaattaaagaagaatattacatgtattaagtattagagtttacatattgaaagatgactcagcctgaagaaattgtggaagacgcgtgtaaatcagattcaggcgtcttcctagtcccaaacacttggatgttgtaagcatatacataagcaattctcatgttgtaagcatatacataagcattttatttatttgttgacctcccaaaaaaaaaaaccagaagcatcttctttaattactttattaaatcaatgttagctttgttaatttagctattaacaaccctcggtcggtgatttatcatgcggattgataaatcattatcgaactagggtcaactttaggtcatcctctttccaatcaattacctttagcctcaagtaagcaaattctgttgtgctgattgaagaccaggtcaaaaatattccaaaattgtatatgtgatcaattaagtttcaagattctcaatagtaggtgacacatttttcaaatctaataaagcccctgaaaagctacatttatcattgccggcctcttccacgcccaccaccacggccaccttttccccgggaaccgccgcctcctctccctctaaaaccaccacctcctctacctctgaaaccgcctctaatatttgttgatttcagtccaagagactgaactcctctcctcttgtttctttgcccatcttcatactcatcgtctctatcttctttgtactttgatgaccctctcgccttgaaagaaaactcccgtgatcctccaggaccgaatttgatatctttcgagcctccaaagttgccacgccggttctctatagccttgacacgctcgcccataggaagactatcttctttagccagtgaagtgcggttgtgataagctgcggcatgccgctcatctttcacttcatacaacctgacaccaaatcatccacatcagaaaacaaaagaatcaagatagaatgtgtcaaatgtagatcctggaatgcagtcaaaagacactaacttcggagttctcgctttcttgcttggcctagttgcgtctccatcgtcggcctcgtcatctgaaggctgtgatgcatcagaatcactgttctcgtcatcatctgatacagcttcaaagtgttcatctaacagagaaggttgcttcttcgaagaagcaacagggtgtaggacaccatattcatatgagtccttatcaatttggaagtcctgaaaaccaaaaggagattcccaagaatacgtttgatacgatgtgaaatagagcaataaaaagatcaaacaaaaaaagttgaaaagaatatgttaataccggattttggaacatcgaaccaaaccgaccatctacgaaatgctcgtcagtaagtatgggtttcttctttttcagcactttcttggtggcctccccatcctcggcagttttattttcctcctctgattcgtccccatgaagccttgctgcaaggtctcggttaacctttggcaaccgtctctttttctgaaggaagcacaagagaaacagatgtgtatgtaagtagccggtaaacaaacaaatggtgaacgtatagctgctaaggttttaaatactaactgtgattctctgcgtacgctgctcttctaacttctcttgcttcctacgttctaagtaatcatcaaatgcaaaaggttcaatcactgctaaagcctgtaaaaagaaaggaagaaacattatagagactattccaatttgacccgaaaaaaaaaaaagacttttctgatggtataagtattatgaaaatgttaaggactcacctttttgtacaaatggtaattaataaaatatccatgcatagatgctttcaaaagatctgttccaatcaaatgagttagctgcaacttctccagatcttccattgccaaaaatttgtaattatcataaatagttgtctgtgcactttcctccaactcttcctgagaacaatattaaacacaagaaacgtgtttgtaacaatggtgacatcactggaatggtaaacctgtaaaaggataggaagaattttcaatttaccgttagattttcaagaggagaacaccatttgggggcaggaccgagttcaggtatgaagtaagatgggattaggctagagtctaaagcaagaagcataagtccgcttccacggaacacacaaatgtcgtttattcctccttgagtcggttcaatgctggtcataccttctccctgataaacacaaattgaaaataacaaaacagaatatggtgaatcaaaaatctcgacatatttcttgttttttcaaaaaaattatgaggttaaacctgttcttatctgatgcttaccgtgtttggatcccatattctaacaatgtgtttgtcggtagtaatcaacttaggttgttgagtattaagagtccgttgccacttaatattcaaaattgggctctcgtacctgcaagttttgcagaaaatcaatgaacactgaggaaataacctaacgatatagcatatacaaagaattttgagttaatacaaacacagtaagacttacatgtgatccttcactcttatgggagttgaagtacgcaagtcgtatatgaatacctgcagataccgaacagcacaatcaacacaacatatctatataatcaaattgacctaccaatgttttaaacctttcagataaaaaaatgaatatagcatcaaacctttcccgcgctactcccgacagctacttgaagaccttcactgtcatcaaactctatagcagtaacctcctattagccaatttaaagcacaagatcatcagaaatcaatgcaattttcaccaatcacatgacgtctaagctaagaaagtctgtttatttggaacacaagttagaaaaaattaccgcagcagcatcaccaccatgtgtgaccgcgttaattctagcagcagatgatttcattctcatatcaaaaaattccacagcaccatcctcaccaccacaagcaactaatccatggaggttgctggaaagaaaatagtgctcaaatgtaagcaataataatctagagtaccagaatcgaattttctcctagatgaaatcaagaaacataatagaaagaaaagacagttcggtatacagaccttcgagaaacgacattaagcgctggggattgagtgctgagaggagaaagaaatcttccctaaacagaaagaaggcaaaaaacacaaatcattctctaacaaagactgagataggtcacaacactaaactattataaattcactggaaagtacctgctccaaattgattctatatagatcaggtgaggaagcagcgcaaagaagatcacaagaccaggaatcatatgtcatatctctccccatcctgcaaatatgtgaatgctttagaccacgaaagatatatctcatagaccaacaaagctaaagtaccttggaattcgtaaagtgtggtgtttcccgtatttggcgtgtaaattaatagaacgatcagcacataagaaggcaagctttgagaagtcatcatccaatatctgtagagccaacaaaacacaatactaaaaaaccagaaacaagatagttactatcaatggtgttaagacacatctcatggagcaataaaaggtacctcgaaatcaactatttccgagtccaaatgcctctcaaacttcaaagcaagctgatttagctcataaacttttacctgtggtggatatatgcctaattcaacaaaaacgaaatcagtgaaaagtcacaagagaacattatttcttgtcaatagcatcgaagttacaaagaaagaaaacgcacctgaagcaatcagatactctccgtctggagtcgctttgattctagtagtggcagtctcaaacttcaactcctgaatcagctccactctttgcatataatcttacatcgaagacagaaaaaaaggacgagcctttaagagacagggtttatgaaggggttaacgattcagagctgagacagaaacaagaggtgaaacttacgagggtttttgcggagagctcgttgcttcttaggattaagccaagtaggaacattgggagcagaagaaacattgtataacttaactccattaatggaggtcgacttcagtctatctccataagacgtcatcttcaagcagttaagaacaggaacccctaattcttctacccttgacggcgagttgcagagaaaacgcaaaaattgaagccaaaaataaaaatgaaaagaaacaccacttgtaatacataaggcggtcgtgctctccggcagaacaaaagtcgacgtcgatggtcacaattctaggtttcttggtctctttttctttttctgggccttttaaaaaccctaaaacttaatgggcctattttactacaataagcccttaaacgattatataatctgtgtgaaacaatacaaaaaacaaaaaataaaaaaacgcctacctttaacttcgaattagggtttatcaggattcagtcgcctgctcacttgaatttcttcgcaagctcaaaaagttccggtaagcgattattttctcttttagctgtctttcataaaagggttcgatttaatttcgaatttaagctctactgaactgtgattgattgagttgattctctgtagtagcgataaccttaaagaaatttgattagtttttgtatgaattcatcgacactgtagtatatttctttagcatctgattctttagctctgtggtgttgtgattgacttaaatttgtgtgtagaaatttttgaaggaagatggtgaggccgtatgggattaaagtgaacaagagaaaggagagagaagagaggtatgataaggaagaagatgaagtagaggagcaaccaaagtttgagcaaaaacaaaaggcaagagaaagttcgaagaaagctaaaaaagaaagcacttcaagagcagaggaagataatgacgaggaggaagtaactgtggaagcaactgcagcagcagaggatattgtgggagggatacctattgtccttaatgctcctaacaaggaaaagtctggcattgtattcgtgcttgagaaggcctctcttgaagttgccaaagttggaaaggtaatctgcaggaatgtttgcattacagtaagcctcggagtttgtttatggtactaatatatgtgattactgattgtgtgcagacttaccagctactgaactcggatgatcatgctaatttcttgaaaaagaataacagaaatccggctgattaccgaccagacattactcatcaggtcagggtcttaaaaactgttatgtcatatctaggtagcttataacaaattgtgactcatctttagtggatctccctcttcaggcgcttcttatgattttggatagtccggttaataaagctgggaggttgaaagctgtttatgttagaacagaaaaaggtgtcctttttgaagttaagccacatgttcgtataccaagaactttcaaacgatttgccggaatcatgtgttagttgtccaactttcctctcatcctttctgatattttgttactttaacctcctcagtttttactgtctcttatcctatttgttggtcttgcagtgcaactgctacaaaagctgagcattactgcagttaacagccgtgagaagcttctacggtgtgtcaagaaccctatcgaagaacatcatctaccggttaactcccacagaataggtaaaaacaaaaaaaaaactttagtttcctcctacattttgttgtttatccagattatgtgagctaaaaagagggattgtctctttcttatatcaggcttctcgcatagctctgagaaactcgtcaatatgcagaaacacctagctactgtatgtgatgatgatagagacacagtttttgtggttagtgctctccaaatgtttctctctagtctctagcttcttcacaaagtccatttaatttacgtagtaataggctttagcttgcaacctccatatatcggtcttatgcaaacccacaccttatttgtctcaccatttcaggtaggcgcaatggcacacgggaaaatagactgcaactatatcgatgaatttgtgtcgggtaaatcttcttccttcattcatacttttgttaagggaaaacaaaaaaaaagtttttaaatgaaggaaacaaaaaatctgaaagaagtttcttgatttatgcagtttcagagtatccattgagcgcagcctactgtatctcaagaatctgcgaggcattagcaacaaattggaatattatataaaagaatgattataaggtcctttgttttcctctctactgctctaatggtaggaactactttaagctatgttgttgtgatacacattgtttatctactatcgagtttataacttttcgtttgaaattttgactccactattttattcaaacgtaatataaagtaaaagaaagagatgttcctgtgattaagaatcaaaaaatatacttaggtagtaggggaactaccttaaattatctgtaaaaaatattttgagtgtaaaatatgactatagcagaaccaaaaaaaactgtatattttcgtttatttctctctacgaaaaatttgatttccacttgaacctcgaaaacaaccaaaattagctcttgaccctcgctcaatctcacggccatgccgtcctatttgtacttggaccagaagaattggatcttggtccagtccacggacaaggtaggtaatcacagtttcggcttaaacgacgccgtttgtgaaaagatttcgttggaagtcctcacttatttactttgtactttaacagcttgtcaatcagatattcttgtaaaataattattaatcattttgattttgatttgaagtccaaataattgccaaattgaattaaacgagaaaataattaaactgttacactttaaattaaaaacaattcagttgatacgttttttagttctctttctgtttttaagaaatctttggttttcttaactgtaccctagttttgtttggttcatttcagttaattaggtcttttaatttcattattattgaatttttattatatacgttttattatttaactttttttttgtcccactttaaatcttcgtaattattgtaacaataaccaatcgatcgcacttaaaacgtacctttaatcgtgatttgtttaaagaaaagaaagcatgtgaatatgtgattgtctgccacataatgtattgtgcataacaataccatattttcgaaaaaggggctatataaaagtattgttatacaaagaaaagtaaagaaataagctaaactcaaatttaaaaaaatcaatttataaacttaatgtttatttagtatatacccttttctcatatgtaattaaataaaaccctataaatacaaagtaagttggaaaaaaagagaaatcatgcaaaagaatgtgcagttgtgaaaaggctggtggagatccctcgttcacatcaatggggcatcttttgacgacaggaatcagtttagattaagaaagaatcattctccactacaaagaagtacacgaatgctcttttacgatgttattatattatttgttagttgttatcgtatactaatatagtgtgtaacatatagagtccattccacgcacggcttattgcttttgtttgtttgtctttgtcatcggttagacagatcatgtttgatatgttcagataaaaaaagttctcaaagtttccaataatttgtcagaatctcgccaaatccaattatggccacgagtctcacgacacaattttcattttccttttttcgataatgccgtatttgaaaaaaaccataccgacccacaactacattcaaatactcaacttcaaacaaaattttgtagaatccaagtttacatcatatataattcactcacgcaacaaacaagaagatacaaaaacaagatgcattcccgctaataaacaaattacacaactaagtgataatttatttcattttggcgtttggtcttttggctaactcatatggaatcataaaccgatgtatcaagaacccaaacggccggccaatacacagatccgatccataactttccatcttttgtctcataagcctcactaacatatttcaccgtcttcccttcactgtcctcaagtatctcaagaatctctcctgtctctccagagagtttcacgacaattccatgaggttttcctccgttcatgaaatgaattacagtctccatcttcatcgtgttcatgaaaaaccttccgacccaagtgtgaatcaaaactgcacgtgtgaacaaattctttttgcaatgtaatgcgacccagaaatcgcctgttggcgtacgccggatattgtccggggaaccagggagcgttgcgaaaacctcgttggttccggatttgggacctttgacccatattctatggcaaatgttcgtactactctcgcatgtgactacaaacgaaccgtttttgcttagagctagaccatttggtaaacgaagtttgtccataataactttggcctctttcttcttcatatcgtatctaattactcttccaacctttgtcccggacaaagacacgtaaaatacgtccctatccaacaaaaataacataacacgtttatatgcgtatacatatatatagaatctcatctgtaatctgttaaacataaattaaagtctcaaactatttgtatgtgctatgaaatttttttctatttttttttttattgcaaccaaaaaggattttattggatgtgttaaagtaaagcaagtgtaataaagttacctgaaatggtatgtatcgctgctatcattgaagtagaaaatatcttcctcttcgtctatatccccttggttggcaaacataactttacgaccttcggcttcatcaacaactaactcggccaggcctccctctggtccgaccttcatgaccccaaagtaaccatcacatatgtacaaatctcctgttttcctctcgaagctaagtcccaatggtctcccacaacttggtactacctcatgactcgaacagttatctctttattcaccaaaaaacaaaaatactccaattaattgggaacattaagtaaaatcatataatgaattcaattcattcaccaaaaaagtaataaaacagagtaagggcaatttagtagttttgctttatgaatgaacctgtgaggagaagtgtaggcgaaatcgacccagccgagttcttcaccgcgccatttgagaatgcgaccgtcggtgacgccaacgtaagggccttcaccttgtggatcgaactctaggctctctggtccatcgacgggaagaggaatggtcttagcatcttgaaggacgtgtttcgtgccctttaaattgtccggcccgatgattgatgaccaaaagaagaagcaaaggacggctaagataaccggagcggcggtgatcggcgtcagaactctccggctaatcggcatctttctttctttggaagaaaaagtgtgtgtgaatatttaacaacaaaaaaggaaaatgtgtgtgaatcaatgatcttttctttgtgagtgaatcaatgatactgaaatgggttaaagactataaatagatgaaagttgtgagtgaatcaatgatcttttctttgtagtgtacaaagagatgtgaggcttttttaattgatttaggacacaagaaacgttacacacgtcgatatctatgtcaccacctagttttatgtgccacgtatctgtcaaaaagattttaaaagcttggaaaaatattctaagatcaaatatttgggaagcagttgtttttctaaaaatggaaaataattgagtacaaaattgttaggaatgaatttttaatgctatccttttctcgttatatcattgtttgtaatcgattttttttatatctttttaaaaaatattaataattattttatttctatttgaaaatattttaaattaacataatgaatagtaatttgcaaaactagtatttagtcacaaaataaaatcgatataaagctaaagcaaaattgttttatatgattttattctttcgactacaaaatagagctttaataccgataacaaaactatatatatatatatatatatatatatatatatatatatatttatttattttaatagttttaaggtgaagattttatttaatatataaaattataagcttttatttaagtttttatttaatatataaaattataagctcgtctacttttctttattttagcattttttctaaatatattaaaatatatacgggagatagagatgaatcaatttctaaatgtattcccagaccaaatggtccaaattagagtaaaaaaaaatcgagaaaaaaaaatctttgagcctccaaaattcttaaaagacttctgtttggaagtttgttatgttgacattttaataaaattaaatcggaaaaaaaaaaactagtctactcgactgattacaaaagctataattcattctagtgtgttcagttcaataaacatcttgggagcattaatacaaagaaaaaaaaaacaatttgaaaaagtaggattcacatttattttcccgcaacaaacaaatgctgatttaactcagataaacatttattaatatacaaaacgaacataattataagtagatacaacatgatcactcatttgcgatcaagaacccaaacggctggccagtaaacagacccaaaccacaactttccatcatctctttcataagcctcgcttacatacttcattgtctttccttctttgtcctcaagtaactcaagtacctctcccgtctcgccggagattttcacggcgactccgtgcggtttaaatccgttaataaaagcaatcacgtactccagtttcattgtcttttctaccaatttcccaagccatttgtacttcacaatcaatctccctatcagatttttcttgcagtgtaaaccaatccaaaagtctccagttgatgtcagccggatgttgtcagggtaacctgggaccttcgcaaagatatcacgagtcccggctttgggacctttaatccagtatcggtggacaagacttgtgccggactcgcatgtaattagaaaagaccggtctttgtttagagccaaaccgttgttacaaacgagattgtccatgataactttggcttctttcgtcttcttatcgtatctgatcactcttcccgaccgctccccactgacagccacgaaaaatacgtccctgaccaacacacatcacataaagtttaatttaatacgctatttttgcaaaaacaaacaaatattgaagtcgtatatataactctatgtcgcaaatgctcggatcattattcctaagtacatgtataaaaaagcctattgaatacctgaaatgatacttgtcactactatcattgaagtaaaagacatcttcctcttcgtctatatccccttggttagcaaacataactttacgaccttcggcttcatcaacaattaactcggccaagcctccctctggtccaactttcatgagccccaagtaaccatcacatatgtacaaatctcccgttttcttctcgaaagtaagtcctaatggccttccacaagtaggcactacttcagtttttgaacagttccctcttcatatacaacaaggttataaagtatcattagttaatttacttatttgattttttcagaaaagcctacataaacaatacatatcaggtgaccagttgacaagccacaaggatttggctgacacaaatctatctccttatgagtgtggaattcttcattgaattgtatagcaaaataaatttaagtttccctttttcgttaatatgcaaaaaaaaaaggagatataaaatataaaacgttggaactaattgggacggatccacagaatgtttgcacaagaatatttagatattcaaactttaaaatcaaattataaaactcaggctgattcactgcaaaaaatcttggaaaacagaaacaaacatattatttgttctttactctcataacttattaatattcttactacacaacacaagagttcccagatctctcgggtacttttcatcaacttatttggtatttggtttagataaattatgtgtcgatgtacgatgacaaaagacgttgtaaatattttaaataaaaacctgtgaggagatgtgtaggcaaaatcaacccagccgagatcatcgccgcgccacttgagaatacggccgtccacgaccgcagcataaggaccttctccttttgggtcaaactcaatgctctccggtccagcgacaggaattggtatggtcttagccattgtcaatacatttttggcgccctctaaattttccggcacaattaaggtttgatacgagattacggacaagacagcaaaaacagccggaacggcaaaccaagtcggaattttctgattaatgggcatttttccgccggaacaagagatattgttgactgttggtatgtatgagtaaatgttgctagctcacatataggtaaagcaattttatataacatccaaaaataagggttatatttttcttattgtttatgtggatgcatatatatacacgtatccctcatttcgcttgaagggccagttgtctaataaagaataaatgctgcgacgaatccatgcattgattcaacgaaggcgacgatgttagtttttagattgaaacttatcgtaacgtgaaggaaaatgacggacagatcacagatgtacgtttgaagtattcgcgcaattaatatttcacatcataaaaaatgacggtcaaattaaaagagaaacatgaaaagattgtgtttggaacgagaaacgtgagtaagaagcgacttctctaattaacgtaaatatgaatgtgcgacaatttgactgctttccggacccttcgacattttagaataaattaaaattgaagctggctatatttgattttaacctcgttgtgctgggattttgtttgaggtatataaagtttttacgtggattaaggttaattagaaattcacttccttttaactatttcaaaaacaaatcacattttggacatttatgattataaccgctttcagtgacaaaaaaagattggatttctgtggttcagaaaattagtttaaattttggtctaaaagcttccagtttgaagaaaataaaataaatcggatatatacgttgccgactaagtaaagtcaaaccctacatgacaacaaagtgtaaatacaatttcacgagacttcattctcgaccacataacatgagtcacagatgtgtcctcttctgacatagccaccacgactattactgacgtcagatataagtactatcgcaagaaaaaacgtgtcttgtatccatgttgatctttatcataggatcatcaattttgaatcttccatataacaattcgttatatcaagcagtttatcaacatacaaaacagatttaactatatctgctatatacgctagtaaggtggattattttatgaatgagagtctgatctaaacaaagacaatgtaccaaactacgtgtacgtttctgacattttagattagatgatttgacaattgacacctttaaaatgtcaccatatgattaccatatatgtaataaacagtaccagtacagacaccttttttaaacttaaaagtatacacatggacgtcaaaaacaaacagcagaaatagaattaacgtgcacatagttgtgacaacgtaatacacatttaaactcatatccatgcaaagacaattaagtctgagcaaagtaggaaactacaaatcatagacaccaagaaaaggcacgagaacagaaccaatccaaagcttgccgtctttctcttccacttcacttataaacctcaatgtctttccttccttatcctcaagtacctccaaaaccttacctgattcactcagctttatggctgtagcatgaggtattcctccagtgaacagcgagtgcaggcgttggggactgatcggaagtctaagcaccaaatccctgaaccaagtttgagtaagtgatagtttcgcgaaaagacctttctttgagtgtaaagcgacccagaattctccattcgagtttcttctgatgttgtcagggaaacccggaagctcagcaaacacttggtgtgttcctgcgtttggaccagagagccaaagtcttagaatcttgcaagtagttgtttcgactaccaatacaaaagaccggtctttgcttagtgcaacgccgtttgcaaatgcaaggccttgtaataagactgtcgctttcttgcttgatctatcatacttgataaaccttccagtcttatcgacgttcaaaacagcagctaagaattgcctgaaacatgccaacactttggagttaaatcatcatcaccaagataaagccaagactcaaacatcaaagtaagaaagttcttagtttcataaaacatggatactgatccaacatagttttttgaaaagaacgatgagagtttagggtgtttctattcatgttaccttctctggaatctggcactagtatctgtaaagtaaatcacatcttcctgctcatcaatatccaaatcattagtgaaacgaaacggctgcccctcagcttctgtaaccagaggtttggctaaaccaccagcaggaccaacaacaagaaggccaaagtaggcatccgctatgtagagatctccggttttcttatcgaaccgcaaccctaatggccttccacacacatgctccaactctggtgcaaatgggcgagcacactcctgcctacaaccatttacacaagtagtaacagttgagtaacaaagagttctaaaaatgccgaaacatatgtatatgtctcactaaaacctaaggctatgttacctctaatcaaatccaatgaatgtttctccacaattcatacaaaaagacaacaactttgacaaaacactgagcaaacatttcaattccacaattgaaaaacagagcaattaaccaattcagaatcactccatcgaaaagtgtcaaactttctttgaaaaatgtacctgttagacgatgtgtgagcgaaatctgaccatccaagcggttcaccgcgccatttcaagatacgaccatctgagacaccaacgtacggaccttcacctgctggatcgaaagctatactctcaggaccagaggctccggttaagttaaccactttcgccgacgggaaaacatcacgcgaaccggagatttcaggcggtgcgaagatgccagaaccggtttgagaattcttgacaaggattgcgagaaccgctgcaatcactgttaagaacactgtaatgatcatcatggtcatggtgattggtgccttggtagtagtcagtgagatttgcactctgcttctactgttacgagagcttctttacttttgtttctctcttctttggagaaaagtcttaaggttagagaaattagagaaacttccttataattgttgtttaattcagatttagcctaattagttgttaagagatcaattatccccagaaaagattgaaatgaagaatacgaaactaacatgttaatggactttattgaagcccatttgccggcccaatttagaacatataatgttttaagcaaccagtttctgttgagattatgcccaatttagaacatagtaatcttgagccatttctttacgaaatggtattttatgtaaaattttgtctgaacataagaaaatttcagaaattagatagattcttcaaaaataaaaaaaatgggagaacaaatgatacaaatacattgacttccctttttaaaatcataattgatatttcttatagtaaaaaccaagagaaatgtcactaatggtttaaaatgagttaactagcttgataattaaaagatcttatataggaacacaatcatacaacctttatgaattaaatgatacgttacatgaaatataaactcacgcgatagataaaataataaaagatttgctggcaaaggaaaaacaagaaaagcaaaagggatttggtgtgtcaataatgtggctctgtactccatcggagagacacttcccgtatcttgaatatggcctagcagcaactgtaagggcatttgtattaagtgttgagtttaatcaatattattctgatattaaatcttgaaatttgttggcacaaatctcgaaagcagaaatgaatgaatagcgttacattttcaagttaacgaagtaagggaaatgagtattgcatgttcacgatttcgtacacttaactatacaatatttgtatatttaatgaacgttatttgcttagtgaaacgggtaaaaaactcagtaaggactgaagagtttatacgtgtattgttatggctagcaaaatttagaatctaaatatttaattagattataataggcatgcaatatatataaaatttggaactaatgagttgcaacttctcttgtatttttcctagtaattattaattagttgaagttctaacttctaactacaattttgtatgtactcatctattttgttcagtacacgagttaagtatattatcccaattctgtctacctttttctctctaaaataatataatggaacaaatgataaaacctaaataattaacattgatgtgaatgagaatagtcttatactcctactgtttcatgaagtttgatattttaagttttggacataaattaagaaaaaataatttttctattttttaattattttttgttagtttaataatattactattatttctttcttttcactattggctacaaacaaaattaataattatatttttacaaaatatcaatctcggtggaacaaaaaaaaaacactaaaacatcaaataacttggaatagagggagtatatcataataccaaacacacttacattaatcgattatagtattaagaaaatttataaagttgtcgacatatgtatcaatctgcatcttttcttatgacacaggagaatggaaatcgacgacaagaaaggaaggctaatcagatagggaacctgttacctgatattatgagaggaagaaagtttgtagctagaagcctataatcatatatagcctttctatgaaagaatgcaaacatcaataatggtattctttttcttattaataccaataatggaaattaaaaagtgaaagataaggatctattattgtttcaatctctctaagtaaccaccactggtgttctttttgttgttgtttattaatccaactcaagctccttggtggtgagtccttgctgatgttacaaatatcttccaatcgttgtgaatatatcaagcaaaacaaagtctcgcaaacctaccacatgataacattaagtccatgtgatgtgatccatgcatgatgtttccatggatctaagaaaatccgaatctatggatatatcatgtctctctttgtaattagttaattcatttaaacgtgttgtttttacatttacatcattacatgcatgtacatctccatatttttctaaaaatttcattaaaaaaaaaaaagtgaactaacctaaataaagtgtattatctcttcagaccagacaagatgaattatctctccctctatatatatgtataattagataattaaacaaaaagtctcactttgtgattaggtttttctttttttcaattcccgctataaacatacaatattatatttgataacactttcccgtccatttttaattgcttttattcgaacacgaattacacacatgaaattttaatgttaatgcgttgttgtcatttttcaagagtccaaaacgaatgagtaaaatttatagatgttgatctctcttttttttcttcgacaaatgttgatctatatatttttatttgggtattcatgatcaggtagtcacataaagttcataaagagccccaaaaaaatgtaatagactgaagcatttttttggtgtaaattattactctataaaaccaatttaaataaattgtaataatacacgtactttctatatatggttaaaatatgaaatcatatagtatatgataatgtgggtcaacgggaacaaggaaatattaattataaaaaacattaaattgtctaaactgatctacttaacgttatataaacaaaataaaagattggtctcatttaataaaattctcaaaacatgtgaaagttatatcgctgctgtatcgtttaaaattatggccgaggtttggttcaccgtatcaagaccataaagctcattaagctaattaaattagtaatattgacgtaactacgtaatcgtgtggttcatacacacaccgacgagtcgactactatataataatgcgagtgtatctacaagaccgattgggtacaaccactcaatgcacgctgcggtttgattttcctataattaaaagttggttgattgtgattaaaaaagaaaaaaaaaaaatcctccgatccaaataatgtttcatgtagttgacgacaaaaactataatgttgcgtcgcataacatttcgttaagcataacccacctactattacaattgaacaaaaagtctgaattataaatgttgcaaaaagaaaagatctatatccttatgcttatcgcaacaataaagatgtcaacaatacagaaaacagccattagtttgtgtttatgacttatgagttacatagcatagacatattcgcgtcttttatcattaccaattgaaatcattctaagaagattatagtttttgattttaagtatatgtatggactatagaaacaacgaatttttttgcatataatcactctgctctttactatatatacacgtgtaggacattataggtctaaataatcagccaaattctaaataaggtgaattaactatgcagtgaagaggaattaactacgcttcagttctggtcgaactaattcacggacgatacaaatatcgttctatagaaaattgtatacagacagatatagtagtagtagtacaaatctcattgcaagacaacgtcttaactcatcttccatcgaatagatactaaaattaatcccaattacgtgaataattgattaatctgtaaaataaaataatgtagtttatggttttactattggaatagggataactgaaaagtagagaacaaaagaagcgaccattaaggaaaaaagcctgaagacaagggaaagagagaggaggggccatattgtgtgcatgttttctaagccaaggagtgccctgcccttcacatcaccttctactacttcactattttatttttggccttcttttattatatatattcatttttaattatatactcttcaaaaaagttaattctatccaatagtttttatcagtgaattatggtgtgttaagttttaattttagtttaactacatccgagttaaattaaagacatatatataagtaccctatctagtattcaacttttctactttacttttctttctattttggtaattactaagagtactttcttactctctctatatatatagctagatgatacacggcatataaatgaaaatagacctgaatgcagtatatcgaagatatcatcgagcaaaaacaacccacaaaaggatactaaaaacacaaaaataaatgaaatttaaaacgatcaaatatcataacgagggatataagccactcaactacctcgcttcgcccgaaaactactcggattacgttcatttcattgcatgtggtccatttcacatgtcactatgacacacatccaccaaatatgacattctcagttcacttctatctacataaaaaccaattatcatatattgtttaagcgttttattatttttcgtacctaatttatatatgcttacgttaacaattaacatgttaattaaattatcgtgtttatctaataaatatcaaatgttttatttttttctgtaaagtaaactggacgtttgaactaataaacacaaacacaaataatttgttcgaattaacaatctaataataaatttataacatgttctagagatggaaatgtcaataagtttggttcttctttcggctttttaggtcagtgagaaaaaactattacgtcctttttccaactgaatatcattgttggtcagattcgaacccaaatactttgataaaacagccggtctaaaagtgacgagtgtctcgtaatgttttatctagggtcaaaagctgtgatgatgatgaaggtgtttgtgttagaaagaagaagaagagagagagagagagggtactcataaaggagaaatggatggtggatatattaagagaggatatgtaataaattgaagatccattgtctactattgtggattaaaagcattgtcttcccgacattgtggattaccattaaatagacaactcgatcgagccatatctttttggtcaaatccaccatcctttgattccttttctcatttctccttcctcaccttctttgaattttacttgagtgccttattctttcatgtcttttatttggtccactgtgttaaaaaaaagtcgattcttttttataaaaaaaaacttgtggactcatcatgttgaattacggtagtatttcggattaattgatagaagatttcatttcggctatagacgtaagaataaacgaaaatactttggaaattaaccctaatccatgaccgatatatatttttttcttttcatcgatgggcttgatctttcccaattatcctggctggtttgatataaatcgtggcagttggatgccttgaacgcataatgggagcttaatcaccgtgtttaaacattgtgattaggcgaataagtcttgttggatagattttgacgtgtgaccccaaaagttagacacgtatcggatatagtagatggacatgttgataatggcaatcatgatgatggtgaatggggcatgaccatgggaaacaaatctttggaagagaatcgatttaaaattgccatgtcgttgccaccacaaacccaactgctcattatttcacgttttgctgaatattgttttctccatttacgtattaaatttaattggagcaaaaaaacaagtaaacaatttaatgatatatgataaacaaaaaaagaggcatctttgatgacgtcatctgtatctctcaagattttggcgggtcccgtttctccatttatttcttcatgaatttagacttcaaagtgtgggaagacttgatacattttagtatattatgaagaaaactaggagaaaaagtttttaagtttacatgactctttttcttctttctcttttttgagaaaggcgattaatatgtttgttacgaattagactacgggagaaatacggtacatggaaagtgtgttttgcggtacgagagaagtgcggtacgattcaaatagttacaaaaatatatagatacatatgtatatataaagattttgatactgttaaagcactgttgcggtgcggtttttgttaccattcacaatctatatgtttgtcgatacttatatttttttgtatttatgataaaacttattaaaaaaatgaagatgatgatgtgatatgttatacacatattttttgtataaaatttttatatagaaaaggatttttagatttatgcatatatgatatactgtatatgtatattttcaaatatggtgtaaaatactaaaatcaagcggctgtggtagtagtatataaagcaaaggccacctattatctaatccttaaaaatcctgcaaaagatttgttttcattattttattttatttaggaaactttgtcttttttccttcctctgcgctgtcttcttcaaaaaacaaaatattttgttttttgttctattagtaactttgctttctccacaattcaaagctaatttagttctattcatttttccctctctcttttgcaaagatttggtagaagaagaaaaataaaaagagttataatcaatcagatcttgttttaagtgcagactctttatttctcttcctcacctaagcttcagcatcgtaaatttaaaactaaaatcgcatcaaatcccggagataggaaagaaaataattgattgtttctagtgaagaacaaaaaaaaaaaagtcgaagactttacatctgggttcatcgatttgagataagatcttctttatttgttatcttcaagtttctgcaatgggtatggcagcagaatcgcagtttcatgttttagctgttgatgatagtttatttgatcggaaacttattgagagattgcttcaaaagtcttcgtgtcaaggtataaatgtgtgttacaagaaaaaagtctcaatctttgtttgataatggtcgaagaaagatctaagcttttttctgtgtgtttggtatttatagtaacaactgttgattctggctcaaaggctttggagtttctgggtttaagacaaagtactgatagtaacgacccaaatgcgttttctaaggctcctgttaatcaccaggtttgctcttttatttttgtaaatcactttttcttctgtttttgttgttgttgttgttgttgttattgaagttgttgtgtttgattggttgctttcaacaggtagttgaagtgaatcttataattacagattattgtatgcctggcatgactggttatgatttgctcaagaaagtcaaggtacttttttttcctaatttaagaggaaagttttcatattttcagtcaagaaagtgagagaatgtcaataggagatgagattatatgctatttgatgtgtataaataaaatcttttgattaatctgggaattatcttgttctacaattttgcaggaatcatcagcttttagagatataccagtagttatcatgtcctcagagaacgttcctgcaagaatcagcaggtaaagaaagattgaacctatgaagtttgagtttgttcccctttagattgtggtttcaatctctcatttccccgggaattaattgaaaattttcttgtgtcttgatcatgaacagatgtttagaagaaggagctgaagagtttttcttgaaaccagtaagattggctgatcttaacaagttgaaacctcatatgatgaaaacaaagttgaagaaccagaagctggaggagattgagacaacttcaaaagtcgaaaatggagtccccactgcagtagctgatccagagattaaagattcaacaaacattgaaattgaaatcttgcctctgcaacaagatctgctattagttcaacaagaggagcaaacattgagtatcaacaacaagaggaagtcagtggaagaagggatttcaactgatagagcacgtcctagattcgacggtatcgcaaccgctgtctgatctaccagctatgatacttcttttttcggtttctgatttagatttttgtagattttcttaggaatgcttctactggtacagtacatggtttcagtagggaatgcagagaggggaatatgatgatgatgttgtatgtggggataatgtttataagtacatcagtaaatcttacatggttaataacccagttcccagttttgtttcactctttacttttgctttaaagacactccaacttgactatctgaaaatggtatgaaggatctgtagatgtcactctatttgccaactgttgttttcaattcaattcacaatgttactttatcatgtatacctacctgtcctagcgaacaaaaaggtataaatctggtaaattcaggtgctgatgtgtcatggtttgttccatgttcttgtttcttacctaacctcaggacaagttgctcactgtgtcctctccctgctccacagatcaagaatcttgataagagttgtatttcactttgaagaaagatccgtactacttatgttgttggctttgaagccgataatacagaatttaaccccaaacaagtaacataacaaatctaacaataatgaatttattgcttgatgtgttttcaaacaccaaattatgttttatggtttgttacatagatccttatttcaagaacctatgaaactacaaaagctgagacaagaacaaaccaaaactagagagggaaggttttgaaggcaatgtcaagatcagatatcaaatcatcaacatcttcaattcctgcagatatacggacaagatcttccgtcaaacctctggcctcacgaacttctgcaggtatgcttgcatgtgacatgaagcatggcatgcttatcagtgacttaacactccctgttgtcaaagagaaaaagtggaagagatcaaaatccaaaataatcccaaagcttattaaagcttctccagaagaaacacaatataagtactctttgagcctcaccaaaactgacagctatgctgaagtatttggtggtttctacgagatgctttgaaagcgcaactgatccagttataaagctaaaaactgatcctgcacccttcgcctgcatatatgaaaacagttatatcttagatagagaacttaatctattttcttcttatttttcgtagatcagtttatgctttttagtacctgagagaagtggagatggtgaccaggatgatctggtagaccagcatagtacactttctttactcttggatgagaagacaagtacattgcaattttccgtgcgttttcctgaagatttttgccatctattgtaagtaatgaaaccaaccaataaaagaaaagaaaagagaacaacatttcaaggtaattagggggttcaagtcaagacctgttgcttttctatccgtaaagccattgtcttgattcctcgaaggcaaagccaacagtcgaaaggagctaatccagaaccttctgagttttggaggaaatacacctcctttgccaatctggaaagtttaacactattataagaaaagcagatatttcaaagaaatgtctcagatagaaaagagtagaggcaacatacttttcgccttttacagcaagcacacctgccatcacgtcactgtgtccggctataaacttagtagccgagtgcatcacgatgtctaaaaagccagacaagttgaaatatgagtattaagaagcaaatttgagaacagaaaaacgaaaattttagccaatagaaagcaagtctgagttgttttacacaccagctccaagttctaatggccgagagagcactggtgacataatactgttgtccaccaacacaagagcaccttgagcatgagccatctcagatattttctacaaagacagaaaaccatcaaaccaattaaacattacagcagaataagtcgatttcggccatgtggtatctggctccaaactttgtagaaacagagtatttactcgtatatcagaaatttgttgtcttgggtttgttggagactcaagccacacaagctttgtttggggaccaattgcagcagcaacctcgtctaacttagttgtgtttactcgtctacaagatttttaatggtatcattaagttatcttagttgtaagaataactagttatataattcagaatcaaaggtagcaatactaactttaccacaacgccagatcttggaacaacttgggatagtaatctgtcagagccaccatatacatcatctccagcaacaatttcttcgcctatagaaacaaaatcaaatgtactacaatgaaaccaagtctatgctaccgatctaatacactgaaagacattacaatccaggagaagtcagtatcggaaattaccatttttgataagatgtgtaacagcactaagagcagccattccgctagtaaagcaaaatgctctatctgccttgtcaagcttcgcaaggaggctaacaaacgaatacaacttctataagtaatgttgaacaaacacacatacaaatatagctaaataacctaggaatcgagaagatgctaagaaacaattacctttccaatgcatcccgtgtaggattgccacttcttgtataatcataaggtccattttcaatagcagaaggctacaataagcaaagaaactagtatcaagtgacaaaatcttctcgtagtaaacgaagttgttcgctttatggctgaatacctgcttaaaagtagcagtttggtaaagcggagtgctcattgcatcaaagggatcaaatttattatccaagttcaccaataatgtagagacgctagcttcttctttgatattcatagctgcaaaaacattgaaacaccatcaatcaataaaaaagacgctaactttatgattatcatcaatatgatccaataaaaagaagttatttaagcttaacgaactatttaagctatcagtggtattgttaacggtagaatgagtttgaccatcgacacttttctccatcacgcaattcagcttgaaagagttccgatttgagatctgcttcttctcccaagttggaaccttggaaatggaaacactggtcggagagttcttactgatcaaacccttcagagaaacacccagagacgaaaatgattagatatcacttaaattggtagagccagaccaaaagcaaaagaaaagggattaactttatctgaggtcgataaattatattaaaataaaaagcttactcggtcggagagatcagcgaaggaaggtacgaaggaggagtgaagtgacagagaagatgtcattttggtagatgaaagagaactaaattgctttttctccggcgtcgatttctcgtctgagatattagccgacgagataataacggcgacggagacagttctcgtgctcaagtgagagtagagacgactgaagagaaaccgaaggtctctcggctttaagtctcggttttggtttctttcggtttatttagatacgataagacaaaaccgaaataaatctggtctggttataacacgtggaggaaagtaggtgtacacctactcttagtcttaactcttaagtacccatgaggccactaatatattcgtcagtgaaactgacaagaaaaaggaaatttgatacaaaactaattcagatcttatatattttggctacaaattgtcataactaaaccggctaggacattagacataaatattgtcgattcttcaatatctaagcataatagggagaaacaaaagcggtgaccaaaacagacgtaaattataagatagctctcgagatgttgagcaacttgaacagacattcgctctctctctgcatctacacaatggttctttaacttctacttcctgacctcaggtttctcctgatgctgctcgatgactctgtactcttgctttctgattcgccttcttcccctgaaaacctcacaactttacttaacggtatataacaatttctaaaatgtagcttaagttgtgtgagatttttgaaatacatattgaagttttcacataccgccactagtcttttggtttaaggaacgaggattggtcgtaccacattgtgcagaatctggctcttcctccgagtcagatggctcttcctctgagtcagattgctcttcctcggactcagtttcaatcaaattatcgccactagtctttcggtttaaggaacgaggattggtcgtaccacattgtgcagaatctggctccgagtcagattgctcttcctcgggctcagtttcaatcaaattatcgccactagtcttttggtttaaataacgaggaatggccgtaccacattgtgcagaatctggctcttcctccgagtcagatggctcttcctctgactcagtttcaactaaattatcgcctgattcttccattgatggatccacaatttcactatctgaaacacctgagaatacaaaaaacagtccattttgaaaagcttgccgttaactggcatttgactatcgtaagtctggtacagtgaactttgctttagccaagagtcaaaaaattactaaccttcaccttcatcatattcttctacaggttcttctttcactttgctgaggacagcaagggattccatggtcttggttttctctctatgaacctcggcatttcttgcggtttcttcttgttctttcttctccatgtggaacttgttgatcttctcttcaaactcttcgatacacgctttcagttctggcttcgcaaacttctttccctgttcagattcacaaccagatgtcaaactaacatatagcattaaaaatgactagggtgacgaaaaccagagaaaccagaccttattgattatgcttctaaagttctcggtcaccaaatcctctgctaaagcgtgctcgtaagacttgaatgactcaataagctttttgattcccttttctgtgaatgtcagcagcgaaagagaatacgaaatgtattcccactgttttccatctgcaagtttaggtgtagatgtcaaagggatatacttcttattaaacccaaaacaggtgtaaggatatatcatcaatacaagcatacctgtgactccgctaaacctattgcaaagcttctcaactagagcctccatctgtttgtcctggagattgatgaggatgcagatgagtgattagataagaataaatacaggtcatactaacttcaatattgaaaagctgtatacctttttgatggagccgatcaagaattgcatgacattacagaatgactccctctctaaattccggttggataactgcccaagtatatcaggaagtagattgtatatgggattcgatcctggatttgtttggcagaaaataaacttaagtgttaaatttgattcaaaggtggaagttgctatgtcatgtaaagcagctattgcaactgacctttcttagacagttcatggaaaaatagttttgcgagactagagatcctctccacatcatcttctatacatatagccatttcatatatataacctttcacctgaaatcaggattcacaaaatgaaacctccaactataattgcagatatttaaagagagcaaggagagaggtaaggagtccaaccttcatcatatcattcaatataagatgtgagaggaccaggacagcatttttcctgacagaaactgaagcatcccgtaacctggcatacatattttctgtccaaggttctaaaagatttggaaaacgaacagccaagtctccaagggaaagggtgcaattcgatcgtacaacttcagacggtgcattttcaacaactgtgaagagaagctgaagattggattcgctggcatacattgagtttaatgcatcaatttaactataaattcagttttgtaaaggataaatagactatatgataatgatttaatctcaccagaaacttgcatcaataatcataaacctgcataatgcaagcattgcggaagcttgtagttcaggatgctgtacgaatgaaaagacaagtttcattttatcatgtatatccaaaataaatgtgagagcaaaagaaggcttttaacttcatcacacgccatgaaacagaatgaatgaatagaaaactaactaccttttgcagcagagaaaaatttctgcaaagcttagagagaaaagttgcacactccccaatcagattcttctcaacagaacccccagaaacaatttccctctctgctctttcagcgagtgtatcaagcagtgcatcatcagaggcagcaagtcctagctcagcatttatgccattgttctacaaaacaaagaaaactttgcattattcagcaaaaataaccctttagggttgtaaaatttgtgccaccagctgcgctctacgaaattggtctgtacctcttgggtggcctcaaggttttcttctgtgttctgactttcagcagccggtttgtcctttttagtcttctgtctccggatcttctggatacaggattctatatacaccaactggttcatggcaatgtgactgacagcgaacaaaaatctactgagtttagccacttgaactggagtcaaaatatcaactttattattttcggtatcagtctgtgcttcctcttgttcaactacgtcaaacacagtgctcagggactttttaataatagtagaagccaatgtttctggagttgggtggatcatgtatatggcacttatggctttatcagcagttgcataatatatattttctggaagccagttcccagtgatcaagctttcaagaataccaaacaatcggctgccactgctgagcaataactttttcctatcttcctcggagaaccgctgaataacagtacatgcagttctggcaagtagaggttccacttttgcccaacggccaaacccaatatcaataatatcctgtatgtgtgatccaagaatcctaggggacgactttgcagccatgcaaaggatagatagagccccacgactttgctcagcagttgtcccattgatgttaaagcaaaagaagtcccatagagctgatgtctacaaacagaaaaatgatagaagcacttattagcctctagcaggtgaaaatccttttcgctcgagaaatttaatcaataatcaaacgctcattatttttagttgttcttgactgtgcataagcagactacacgtatcaagtgaccataattcatagcatactcatacgctggagtcacagaaggaacctaccgtgctgctagatatttcaccttttgacactaaagcattaacaataaactctagtgctgcctgatctcctatattcgaatctatggcaaggttcaacagctgtttcgccgtgtcaactggatttttccttatgtagattgagatgaaggcattctctactgcctcatagatagacttatcctgagaaaaggcctgcaaagacaacaataaacaaggtttttagcacaatgtattaagaggatgctaactgaaaaatgtcagaagaatgtattcttatgagtttgatacatgataagcgaccataccagaggcagaattttacggagacaagcttctgcaccgtcaatttggaactgcttacacctcatcagcaaaagaatagcattctcaacatcagtggcagaagatgaagccattaattgaacgaggattggcatactggctgacatgcacttcgagaacctcaatccagcctctagggaagcaatcaaagccttggtttgctcaacgttaccaatatctggaacagaaacatccttctcactgatttcttctccattctctggctgacagctatcagatagactatcttgatgaatcttagttgtagtttcaagatgcaagtcatcgatttcaccatctccattacaggattcaccatctgaagttgactcttttgatgcatgctcagtaggttcaagttcgttcagttttcttttatactgctccagggttgcttcaaatgaagctatccgcagctgtggaccaaaggggttatgttgcaacatcatgatcagtaaattcaatgcggattttctaacaattgcactcttatcttccagtcttccagcagatagtgatgcaacttcattccataggccaattgaaacagaatgctcttcacagagttcagcccacacttgaagaacacggctccttgtataggctgaaacatctctacagcgttcgagcaaaatttccaacatagcttgcttagttcgcagacgaagggacttggaactcatatctccctcgacatcattaaatgcttttgcaactaatttcccaagaacaccaactagtgcgtttcttatcttgtatgattcaccaccaaaatgagggaccagaactccaacatttgtcgacattaattttggcaaacgatcagcaagctcgaccaggaaacgtcccacattatcagccccagcagtatctttaacgtaggcctttgggtcagtcctcccaatatctctaatgattgtcactgccaacgtaccatctgaatacttgctttcagctctagcaactgcatcagcaatgtgtacaacagcaaaatcatacttgtgtatcaagtgcatgattgaggcacatgactgcacaatgtagtggtattttgtagcagatgctccgatgattcggcacagtgcatcttttgtctcggcatcttttaagattgtggcattttcaaaaagagtgaacgagtttctacaaggaaatgatatgaaaatgttgtgagaatgtatctatagcatggactatgaaagaaacaagattcattaggtcacggaaattacttgacaatgaaagacaggtagttttcgtctaggtctgatgatccaaagagcaaggataggttgatttcaagagaatttgcgatcaaattgagcatcctacccctctgaggttcccagttccatgactggatgatttgctttttcctccctcgtgctgcaacctgttcatccacaacatcactaccgtaaattcgacaacaagagatgaattttattctgtattatcagctggaaaaagagagaacacctttgtagtctcgactgagctgatgtgtgattcctcattcataacaacagtgaggagaaagaaagtgtatatcttcaaggcattgcgatgtgatgtgatcctatcaatgattggaacatcatcctcctgatcttggacagaccgggatatcgaatcgacattgggaagaagaacgcttagattggaccgaaggctttctacaagattacacttgcaagatggaggaagactaaagaagctcctgaccaaagagtagacacgatcaaatacatcttgatcctcgacacaaaagagttctctatcagaaaggtcaaaggatacacctgttccacgagacgaaagtaaacaaaatgcctcacatatcaatcacaagagtcatagaagaaatttgactccagaaacgcactaaatgaaatttctctcgacttaaatttaatcaatttcatattgttcagcttcgcttgtagacacgaattcccactaaacctacctgacgactcaggtgactaaggacactatcaacatacataatgcaattttcctcccaaattgggattgcaaagcaaatctaaaccctctcgcaattgcatctcagatacgctcatacagtggagagacaaagacaatttacctttgacgaattcttccagatcggaagggcgaagagaggttacatcgacgggattctgagcgaacaaacggtgattatcctccggatcttcttctagggctcgtagaatttgagggaatacaaagggaggagccattttttctagagagagagagagacgttgctcagaggagagagagagaaagaagaatctaccttttggggaatttcaatttcaaaatgaaatcgaaaaaggcaacggagcgggaatccatggatcatcctatcgggtcgggttccggatacaaaaccgggtcggatcctaattattttatcttcatgtgggccctcgaatttaattatgagtctccgtcggctggtgaataaatacgacgaagacgtggccgaatctaaatggttggaagatccttgaacctaccgaatcatctttgatttttttttccccaagcttttggccactctaatggcttcgccggccaatcatttgatctgacgaaagagagagaaagaagcagaaaagctttgagatggcgatgccgctgggcatggcgatgtatctgatgagaatggtttggttttctctgagtggttgggttttcacttgcgtggctatcgctgatgagatcgctggttctctgagaaacggagatattggtcctttccacgtcggatgattgaattcgagatccttagctctccttctgtgcgtatatgttcttctcttccccaaattttacgtttttttttgttttgctctgttgttttagattagagtcgcttcaaatttccctacaaactctgaaattgataatagtttgagtttatagaggataaagatagatcattttggtcgaaaagggaacaatttttggtggaagtgattgatatatgtctcagtcactcagtgtgtgtatgtgtaactaaagttcggcttcgtatatgaaactatacatatcttatggattcgcatggatgttgttatgttaatgatgcttgttaatggcccatgaacaaaaatcgagatttctcaactccaatttggttgtatttgttctgatcagcaactctgggatgcatataatgctcgtttccttttgctcagctgcttgagtttatctctcatagtagctggtttttgtgtcgatacaagtatcctcaggatcattcacatgctcagataatttatctcctctctacataagtacatcagcattgatgatatgatccatatgcttaagtgattgtctggaaaacagttcataggtgataataccttcttagcttcagtaccaaaacattcctggaagcatgttttataatcctgaagattaccttttgttttagtttttctccttagcttactagtcattgttttgcattcaggcctttctgaattcaggaagggcttttacagcagtaaatgcgcagagtacacaagtaaggttctatcatatcttctgttggtacgctggcaaggttcttaactatgaaacattttgacagacagagagaggtagagagagagcagagcagcagtatatgtgtatagtatatagtttgtagaattccagaacatatgtgacctcatacttgtgaaaaaatgttgctgaaacaattgagtttctatcaatttcaagaaatcttttttagcctcttctgcttggaagatcacacaagagaaaatgatttttccctttgaatttactttgtatatatttagctcattggcgtcaaagaaatctattacattcaaatattcaatgaagaaccaaacatttttatctgtcaagatccacctctaaaactattgagctttcctcttatattagctttttgtcttatgcatatcttccttatatcatatttagtctttgtagtgttaggttctgaatttcgaatctttcctcttcccttattgaaaagagtaaaagacaaagaacaaagtaccaaaaataataaagaatcttcaaggagtttttgccttgtgcaattcaacttcttcccatgttgtttatgtgtagtccaattagtgttatttttaattaagatgtggtccaattagctgttctttttctaaaccgtataacataataatacgtgattcaaatacattaacataatgcaaaaatgtaacagcaaattcattaaaaacaaaaaatgtaacagcaaagcaccatactttctctcgtggggattagaatatacagctttcattacaaagactagtcaactaaatcgtaccagctaactgcaaaacatcatcttaggaaatagaaaaaggtatgtgtagatcaatcaaaatgaataaaatgtttgattatgaataaaaatgaataaggaagagttcaatgagatgatgatattaaattatggtagaagaaaagttaataacaggtcagatatagaaactttccgtaaagtcaaggatttaaattattcacgtgaatactctgtctaggtcctatcttgaaatttatcattcaaacctttaatattatctatatgtttttactttaaaattaaattttaatatatgtagatataaaaattaatatttttaatttatatattcttaatatttatatctagatagagtcatatcaaaacattttgtttgaatgcaaatttcaaaagataaattttggaataaacattttcaaagacgtaaattaaaaaagcaatttagaaataaagcattgcaaaaataaattcaactaaaatttagatgtagatgtatattgtgaacccccaaaattaattataaaatcttttggaactgacatgtcaatatttgtttgattgatcaaccttttttctcctccaatcttcgtttagttctaataaaaatatcataaagaattaaagattgcagttatgaagataatgacatttttctttaatattttatttttcttcattattttaaaaacgtttggctcaatttatagacagtgaaggaaagttcttggaatttggttcttcttctatacataagctttggttacacaatcaaaatcaaatcgagaactgttgttgtgtccgaaaatcaacatcaacatcgtttctttcttctgccattaaatttcaccatcttccaccttcaactgccctagacagctattctccacctttctcttttctctctctgttctctatcattcccagagataaccaaacaatctcagaagaaaccagaaagagcaaagaaactaaaaactattattcattaaagtcagtgtttttaaattcgatttcgtaatgggttcttctgcttcaaagaccgcttcttccgtttcttctgcttcttcctcatctgcgttttctccaccgccgaccaaattcagctccgattcatcttcaccggcggtgcagagagctttttcgtttccgacgccgttggttcaccatcctccggcgagaaaaggcgactctcatcaccttgtttcccttacatctacatcgtacggttctcttctcctccttgatctcgatggatccaaaaactcctcttccgaccaacaaacgctgcctcgtatctcaatctccgggaagaacacaccagatccggtctctcctgattcagtcataaacacttgggagcttatggatggcttggacgatgaattcgaattcgaaattcccaaaccgggtaagcgtctaaattcggatttttgctctaaacccgacccgaatcggaatgtgagtttaaatgggtcttcgttgaaattggatgaatcttacgagattgtgagaatcgaagaagacgatggagattgggttcctttgacttataaacctaagcaacctttgtggaagcatttgtctgaagaatcatttctctctgatttagatcccagcattgtctcatcctacaagaaagctttgtcttctaagctattaagcaatcatagtaatactagaaaccctcatagacccacaaagtctctctcttgtagcccatcatcaaatccatccatcttaataagcgaagaaccaaaatctgtatcctctagtcaattgatttcatcaccagccaaaccgagattaccaggaacagaagacaagattgtactctacttcacaaccctcagaggaattcgaaagacatacgaggattgttgttgcgttagagcgatattgagaggagttcaagtgtccgtagacgaacgtgacatctctatggattccaaatacaggaaagagcttcaaagcgtgcttggcgccgcagagaaaccggtttgtttgcctcaggtgtttatcagaggaactcacattggtggcgtggaggagattatgcagctaaatgatggtggtgaattagcagagatgttgaaagatttccctgcttgtgaacgcttggggacatgccggagctgtggtgatgcaaggtttgtgccttgtactaactgtgatggtagcaccaaagtgtttgaagaacaagatgaacggtttaagcggtgtcctaaatgcaatgagaatggattggtgcgttgtcgtgtgtgttgtctctaagtgatcagtttgatcaaaagatgtgtgtgagaaaggggatatagattgattgactaaacatggtatttggttagtaatgtatattcaaataagtaagttggctcaagccttttattatttactcttatgagttgtgttcttttgttccatttacgctcttgaccttttgaactaaatgattcttactatatgaagtacatcaaatggtagatgatgattgataattcgcataatagccgaatgatttgctttgtttgcaaggtattttttatcaatgaaaaatatgtgcaacattaccacaaatgtagtttgattgattgatgtcacctgctcgctcacctatattagctttcttccttctgttcttaaatcctaaaacgacaacgtttagtctccctttaaatcccatcactggactcgacgacttttgctcagataagggagacaaaaatggaagtgaaagggaaagagacagcttcggttctgtgtctgagcaaatacgtggatctatcgagtgaagagagtcatagatactatcttgcgcggcgaaatggcttgcagatgctccgagacagaggctacgaagtctccgacgaagatatcaatctctcccttcacgattttcgaactgtttacggtgaacgtcccgatgttgatcgtcttcgcatctccgctctgcatcgctccgattctaccaaaaaggtatatcgaagtattttcgtattcgttgtgatttttcgatttctagctgtttttttgtctttgcatgttgtggggtttactgtttggcagtgaagaagatgatggaatatgaaatttgtgactcttttaaatttcttatcttctaattgaagtttgaattgctacttttgtggattcagatgactaaagtttactactttattgtccttatcaagtagcatacctcatttgtttgtcctctgaatttttgtaatgtgaaatgtttctggtaacaactagcaaagtgattcttagatctcttcctatggctattgaacattcggacaattcattgagtgatctcttcaatctttagagtatggtcaatgtcaaatgtgcgagttctgatgatagctacaagtttccatgtttaattctagaatgagattgaactgcaaaagaacggttaagttggatatttgttgaaaatcttaccccttttcttgttggttgtttggttcatgttacctctttttgtatgcttatagacatgcttgtcacctgctttcaactagtcgatttcatatattgattgctacaagatttttgttacttataaatgtcttctattttcaactcatgatgtttcttgcatcagctctagtcttatggcataacgacagatatctcatagtgattctctggatatagtaacattgtgttattggtttaaagggtctgcttcaagaagtgttgtgattttgcttgttcaggtaaaaattgtcttttttggtactagtatggttaaagtcaacgcaatccgcagtgtagtagcggatatacttagccaagaaaccataactgggctgatattggttctgcaaaaccatgtaaccaatcaagccttgaaagccattgaacttttttctttcaaggtcgagatattccaggttggtacacctatatattttcctaatctaatttttcttggttagtacttcaaatctgtaacatctagtttcctttttgctgtcttgttaagataacggatctgctagtcaacataaccaaacattcactgaagccacaacatcaggtgttgaatgatgaagagaagacaacacttctcaagaagttcagcattgaggaaaaacaggtccattatccatttcttgcagctaaataaaagtaatagtctcactttttgaaccgttcatcccaaaatttatttaacagcttcctcggatttcaaagaaagatgctatcgtccggtactacggattagagaaagggcaagttgtgaaggtgaattacagaggcgaactcacggaatcgcatgttgccttccgatgtgtgtggtgaagaaaccaattaaaaaccatcttgtgtacttattttcaggaaaaaataacttgtatgtttctaaggttttgtttttaatcctagaagatccgttgctttgaacacaagaaaaaaagttaaggaaaaaaaaaagatcctttgcttgttcttgaaaacattaccatttatgttttccgtacaaagagcagtcactacacgctatcaatacacaaaaacaggccatggagactccaacatttcttcagaggttcgaggacaatcaaagctcattgatggatcggtttgagcggttatctttcgaggctcacctcaacaatgccttgcttggtcgaagtttatctgagtcaggcttctctttgatgtacagtgcagtcgtcgatgattccccgatacatacagcagctccggctagccaagcccgacgacgactaggactgaataagatactaaaaaatctgatgaaaccaattagatattgtagcaaaaaaatgggcaggggaagaaaagaagaggcgtgtgatattgatccaaagagtttgaagaagtggcaaactttcagcaaatctctccgattattttgatgcttttataagtcttgtattttctatggacatgaatatatatgtattttaacgttaaactgttattcaattaaacaaaatacatcacctaaattaaaatcgacaacaaaaaagtactatgatctaaaatatgaaatttgttgcttcagatatttttaataacttaaaaaatagaaattacttttacaaaccatcaatagtaataactgcttgattgagttaaaactccacgttaaacatctaatcgtgaaagattaaatcagtttttttccttttcttatctagttgttatgaatcttgtaaatttattggaaaaaatcagtaatacaccatcacatgtcacagaagttttttattccaaagggttgttaataacaaaacagaagatatggtgatcaatgtgggtaagtcttaacaatacaggggtcttgttgataaattcaagggataaatatcgtctgtttccctgagcttgggcaacaagtccaacttctctccttaagaaactctccttaagaattaagaaagagaccagaaacgaaaacctcatcaatcaaagctcaaaatcgccttcaatggatgctaagatcggacaattctttgactccgtcggtactttcttcagcggcagcgataagatcccatggtgcgacggagatgtcatcgctgtaagttttctctatatccttcatttgtttcgcttttttccgcctatgtttccgaagaagatgaaccatctcttgtaggcaaatggaatcatgaaccatttgcagaaatttagacctgttttcgtgtttctgcttggaaatttctgaaatcggatttgctttctcgaggatatttttttattggattcgattgaatcgagctttagaagttcatgagttgctgtaaaattcgtcctcaaatgagcgtgattactgatttttgcacccttatgttggatccgaatttgatagctgtgtagaactttaccaaatgtcacagcatcaatggttttttgtttgatagctttgtatcttcttcaatcgtctagcttcatctgctaaactctgttgtgttgatgtgcagggatgtgaaagagaggttcgagaggccacagattctggcactgaagatcttaagaaagagtgcttgatgcgattgtcatgggcccttgttcattcccgtcaaacggaagatgttcaacgtggaatagccatgcttgaaggtagtagtactcctatcttgttctgtgaaaactatggcctgacatattcgtttggctgcaagacttagcactggttttgacacaagaaagctgaagctattcttctgcatcatttaaacagaatattgataaatttgtttttgttgttgttgtttttttcagcatctctggaaagcagtgcccctccattggaggaccgagagaagctctatcttcttgctgttgggtattacagaagtgggaattactcaaggagcaggcagctcgtggaccgctgtatcgaggtttcatccacttcccaaatcctttctttatagaccctgtcatccgctatatactactgtgtgctgcttatatatatatatatgtgcttattcttttgctctctgatgtatggtttgttttcatagatgcaagctgattggagacaagctttggtcctaaagaagaccatcgaagacaaaatcacaaagggtaagccactcgtcaaacttaaacacttgaattgatggatggttctagggattaaacacttgaattgatggatgtttctagggatagataatgtttgtaacaaatcctaattgacttacagagttactaaatggtatttgtttattctcagatggtgttatagggatagggatcacggctacagcctttggagctgtgggtctcatagccggtggtatcgtagcagcgatgtctcgcaagaaatgaaaaccacaaccatgacttcttctctgtgtatacaatggcagtttactttttttcacatttttttcttcttctttgagtgtgttctccactgcttacttcacaatctatgatatagaaaagtcgaagctatttgcttcgaattaacattttgcttcgaattaacattgtgccatgtcattaattagcatttttacataccatttttacatagcattttaagattttaaactacaaattgcggtttgccatatcattaattagcatttttataaaccttgcaaattaatatttttagaattataattactttctatattaaaatatattaattatgtaaacttagaaatatatatggaatttatgtaattataattatgtaatattagtcattccgctaattaatatttttatatacaaagagatttattaaaaaaagaaaccaaaattggcaatatgtcaatttaattattttttagttagaaacttttattcttattcttatttggtgaataatcaatcttaataagatttaacggcatgtcttaaatgtgccaactactacgatctttaaatggccatttaagtttaacagaaagtaaatggccaagtcaacgaaacttgtttattttttcaaaaagtcaaaccaagctttacgatttaaatgacatttcgaaagttcgtgcttttttcgtcccaaatttgaaagttcgcgatttttttgatatttttctccatataatatgtttatcttcggagaaaagctttatgaaactgcatttaataggtttactgaattcactttatgtaaagtttgcctattgtatgtactctgactcaatcccaaataactcagcagattttgaagtagtggtggtggtgcacagctgatgtcgtcgaggtcaaggaggatctttgagaagagcaagagagttttatgtttacttgaatgagtatctttgtatgaattctcagtttttacaccaaacaccatttactttggttaaaaaaaatttaaagaaccccaccatttgagcagacaaaactaaatgactacaattcaagttcttaaagtggggggtattggagcaatgactttgaccgaatttattagaatatagattctattgttattcaattaggcgttttataaattcttttaaattctagtgttattcagtttctcaatttcttaattctactcaattcaagtgttattcaatattatctaattttcatgacaatgtcatttgccaagaatttaatagaaatattagtgcaaaatgcacaaaacaaatggtcgtataaggctaatgtaaagggtctgctagatctaatgtaaaggctaataagcagctaatttccctttttgcacgattaataagcctaatgttagtattgttgatgttcctgattcttgtcttcaagtactctccaaactttcaagcctaatgttacttgttctcagaaaacggttccttacaccatagagtactcttgtcattgtgcataatcatcatcgacgcccttagctgcggagatagctctcgttatcgacgtgaactccgagaagaatacaaagaagatgtttggaaatctacaatgatcagagaggatttagcgagaaaagcggagaagttatgcgatctgttaaacttagcagtattgagagtggttttaagacgaagaaaaaggaggaaatgttgtagattttgaaacgtatgattagagatttacaagtggagactgtggagaagaaataggttcagttgttagcaaaactgaaattagaaacagagaattagaaaaattattagtactttttaattctattcaattctaataaaatgctgaaaatgtaatcgttagaattgaaaagaatatttaaaatcttttgcaatgcgtgaaaatctgtaattatgtgtccaattcaattcaatcaaattctattaaactctttgatccaataagtttcattaaagcaaaattgaaacttaatgactacatgatgaaagtgctggaggtgtgtattctgctatccatatttccactctaattgtatccgttactttgttttcttcctagccttttatttcttctcattatgcactctgttagtcaaatgtttctttgtcgatatgtcatagcaatctggaactcaaagatactgtctcatttgctagctcgagccctcgtggtttttcatttattcatgaatttcttgctcttcatttgatctattcacagatagagaaccacatggctgcagtggcatgtgatacgcctttcaatttcttgaaccacatgacaattttaaatttatcgaactttaccctacctatgagtaatttgtttgataagaaaattcagctagatgttcatcaagtggttactgtttatatgatcagttaagtacttgagctcaactctttgatatcctttgagaaggagtgtatgttgttgcttgttagttcttcttctatgttgtgatattcttgaagatttgaatgaacaatcttctgtcctaaaagttcaattcttgtctccaggaaagaacaccagagaaagggcttaatggcttatgttacgttctcatcaaagtttcccagccaggacatggcaagggcatgatcagtccagtgttgggaccgccgtagcagctacagcaccgccactgttttcaaatgcagcatcatcaggattctcactctcagctacacgccctccttcatcatcagcccttcgtcaatttgaatcagcccggtctctatgttatccacccatctgattacatatcttagcaccaacacaatctcatgaaccgcccacaaccaccaccatagcttcctccttcctccgcataactcaaggtaagactttcttggaaacaacaacattcaactcatcgtttggctcaacacacaagctgtagtttccccttcctgttatacgttacgtttacaatccaaaagaaaaattccaattttgatagaagacccctagagtttgagatgtttgtattcatatgaatcttgatggaaacatgaaaagtatgataaatgcttagtgaataggacatcctaaggaagagttccaagttgaggcaaacacatattagacctcctgttttctgcttctctgtaaatctcaaacacatatttgaggcaaagttttcctaagatcatacaaaactacaagtaacaacatactttgtatttgtcaaaatttacaattaaaaattctaagggatccttaccattggagatggtaaaaacaactatttggagctcttgtcgccacgagaaagaaactcagtaatcttctccagagccaccgtacgaccaaactgagcaaaaccattgcaaagtccagtctctctgtctaggtcaacgagagttgacttcaacctcttccgttcctcttccacctctctcatagctacaaccaccgaagaccttttcttaacagcaaactccgccgtcaaactaattgacctctccacagactccaatcgactcacgagtttactaattttctccacttgcttgagagccacgataattcctctttccattgaactcatggccgtcttctcccttttcaaagattccgttgattttctccatcttgaagctacgaaggtactcaatccctctataggaactaatccggcaacgagtttactcaagaagattacagcaattaccggagctagtaaagctgccgtgacaatcgctcttcgtcctcgaacacgtctcagctttttgtcgatatctttcatcgtcttctccagtttaacgaccatcttcgccaactcttcatgacaagtctgaaactttctgagaaactcgcaataatccaagtcgtcttcttcaccggaattgttgttgtaaaaggcgttgaagttcctcagatctcggtaggtttttctgaaactagcttcttcgagtgacccaccataacctaatttttccaactcaaaatcaactagtgcttcatcaagtaagagacactcgttgttctcggatctctctaagcaagttctaagagactcgcagagctgggaaacacctttgctagtggtgaagtaatggttgagaagacggaacaagtcgggatcttcacggagatcagtttgttgaaactcgatgaagagtttagagacgtcttcgtccatattatccatacactcgccaagtttgttaagattatcttctgatcgtgatcgcagcatcccattactgtggccgatggaagacgaagtggtaggtgacgataggagaaacattgttggagaaatcatggagatcggtttacgcctgagaatgagtctcaagaaaggattgcaaaatttcatcgtcgttttttgcagagtaaaaagaagatcaatacgatctttagagaacagagtaaacaaaaatacgatctttagagaacagagtaagagagtttcacaattttgatcagatgaataagaatcattatagaaaaattagtcagcagtcgggttatattaataaacttgtaagaaatttccatttatttgcgaagaagtatttccttttttttttgccaagtcaaaatttccttttttcttacttttctacagctgtataaaccctcggaaaaaaagaaattgatgcaacggtcatattgaaatatttatgaataaaaattgagaaatttggtgttataaccaacaaaaatttaataattaagaaactaacctaaaaaaagatttgatatcatattctatatattttctatattaataccattttatcttttttcattgtacgtctcttgtctgaacagttcatctctctcgcctctcacttctttgtcctttttttaattacaattttatttttgtaattactctggtttgaattttttgcatagacatgaaaaaagaagaagaccacacgttggctccgaataaaacatggccgagtcaccctccgagtcaacctccgcgttgcttagcaccaccacatccactaagcccgctcaatccgggactgtttctatttcaagccctcaaagtcaccatgtcgtcttccctgagatcccaatcgagatcatcaatgaagaagaaatagttattctcgatgcagctcttgcagcctcccactccatcctaccttccgtcattcgttctgtttctccgtcacagatgatcgccggcggaagcccaataactattcgttcaattactcttttctccaagaggaaattatcagcttgtttatatatcgaagagtcttatctacatcgatttagaagaaatcagtctttaggtgtcacagatctcaccggtactgtacgtttgttttatatcacagtcatatcataggaagaagagatcgaatagtagcgacgacgtggacagcggctaattgtgagagatgatttagatttagtacaattgttaggtttaatatctctttttctggtgagattaatttgtggtccactactcatccatttcattaattttccatttcattgctcatgttatttcataatctacaaacatatctttggaatctcaccatgattgataatttcattaattccaaaaattagaactaaagttttatcatagaatttataaaatttgttgtttgggtttcttatatactattttagggtttagttttcctaattaaaaacaactaaaaatcttatagaaatatataaattggaaaagttgttgactttgaatcatttgtggagaaatatcgcctcttctatagtctgaaaattttagccggcgatgtatactaactcatcagtcatcacaaatagtaacgactttatacaaatagtatactatttgataatgtaatgctctcttccttgcgcatcttcatttatgttatactatatgcgtttaaactaaattgtttgttttgattgatacttctcattgtcatgatagggtgttttcattggcaaaaccacagtatttgaaattgtaatactatttgatattgcatctctggtttcttgtctatactatttcagtttttagaacacaaagtcgttttacttacaactacttttctattttgtaaatattagttcatttttaaaaatttaaaccccgacataatcagaaaaaaatctaatgttttttttaatatagttaggagtctgaatcagtttattttaaagagatttttagtaagaaaatataatggggtatgcaaataatattatacaaaaataataaataaagaaaagagagattctttctcttgtacgttcaccaccgcatcacgcgcctattgccttgcaaataaggagtttgtggacatttcatcctatctacatgttagttacttagttttggattttatggtgttagattcttaaatagtttatgaaatttggttacttttgcaattcacccataaaattaagcatatgaagtaatataaagacttttttgttgattctaaaacaattaaagccaattgggaggatacatctgtgtacacatagattttattttgttttttttgtgtttggtatttactatttacaaaaagatcttaaaaattaactgaaactattttttattaagctagaaaacattgtagttaaaacaatcaagggtgtaaatggattttgagctaagcttaaaaagtgaagcattgtagtactcgcatgctacgacaagtatttaatctactagttgaacatacctaattttttcattagtgtttcaagatttatcaatatgacgagtctccatcacttcgttgacctttttctttagagcagcttcattgtacatataaagagaaggtcttcctacatttatataaaaaagaaaatattattttaatctttaggtgtctataaaataaagacacaatgtcttaaatatcttgataaaagacattttttagaagatgtctctccaatttaaagaacctgcacatttgattaatgttttaatattgttaaagacactcttcttgtaatgtccaatgaaaatgctcttaggtggtatagcaccaccaccaaaacaatctccatcaatatatcttgttttgcttgtttgctaccaaaaactcataacaatactctatcgactaattattccctttattttttattttgttttactaaactctaacttttttttaaaaaaatatctaacaaacgtgaaaatgattcaaatgcttgaaatgtatttgcatctataaattatttctctgttggcttttattaaactaatttgatttgtgcgtgccagttagatccccaaataccaacgtccgaggttgtcttgaagataaacccatttatcagcattagataacatggcgtaggttagggaaaaaaaagtctttgtcatgaaacacaagtatttggggttgactttcatgcgactgtattcgttggatgatcatatggcattccttatattttaccgcgatattatattaattgatcaagtgtatgtttgtgtctattgttgttaggcgggttgagattgttttctttatctcggatttgtataaacgttgtggtcggctaaaaacctgcatgtcgaatctagctcatcaaaaacaaaacactgaactaggtttgaaataatgtcagaattaaccagatcgtatcatgtccacacagaagcaaattatgctttgcaaaatgccaaaatcacacttttatttattttattttttattaaattcacttccactttctatttttttttttaatcgaaacgaaggtaacacgaattatgggtttcattttcatgcatgtttataaattatgggtttcattttaaattataacttggattatggatcgtgagactttgtcttcatattcttatacatcataatcacacattcggttccgtcgtctccatactgaatactgataatattattttgtaattatctttatcttatacaaatcatagttgtatatttctaaaattattagtgtacgatatatatactacgaggaacattctctatggtgtcacactgcttgtagttgtaatttttaatgaagaaggaatagtcaaagaaatgaagaatcaattagagaatcacataacaataacacctaatgacgtgaatagataagttatagaattatacctagtaatactttttctgctcatgtataaaaaagtagcatgcgctaatgagcaactatgaacgaatggttcaattaaaagtgtcgaacgccaaggttgaaacacagtgtcgatgtgaatcaacaaatggttaacttatccttctaataagcagtaaaaaaaatcgcctaattaacttttttaattcttctaacatatatgctagatattttattttaatatcagccataaatgatgttaccatcaatttctttttttgtcaacatgtatcaaatgataagtaaagagatagaaaaaggtaaaaccgtcataaagcggtgtcatccttcacgtcatttatttataacacattttgtagtttagattttggtgttcacattatggtctcgtggctgctttctcatccgtttatcggatcggttaaaagaatatttgtcttgtaattccatttgttctcctagcaacttattagccctgttacaattgttcatacttggtttgcttaccaaaacataaattttgtatatgctctacttttctttttcggcaacaaaagaaatcaatccaaaattgtatagacaaatttgtacaacaactaatcttcctaatgccaacttttctgactatagtactatattaaaattgtgtgtattttaaaatcagagtttttttgtctaaattataaatattcaaatggaagtcgccgtcttttctcatagattcgacctggaatatgagacatattttgtaatttagtttttaaatgcaaataaatatttttgattacgagaaagcttaaaagacctctatataaatatgtatctgtcaaacacaaaagttacatgtatagagagaaaacaaaagaagagtagacttcccatcatcctccgctataatgcgccactctccgcgttatctataatacgctagtattccgtgcccgctataatgcgcaagtctccgtctcagcctctcttcgccgtctgatgtctgatcttctaggtcacctccacaaattcgaacaagaatttgtctttatgtgcaaaaccaaaatgggagtcaatgcttcagagccaaaacgaacacgatcgcgaccaagtcaatcgcaggggaggcatccgtcgacgagacgatctccgtcaacgagcaacaccggcacaacaacaaccacgacgacatcgaattctaacaaaactggtgcctcctcttcctcctccggtgcggcttcttcctcagtcgctagtcgaacatctctcgctagtctccgagaatccttaccggaaaatcctcacatatacaacgtctccgagattcgtgccgctaccaacaatttcctcgctaatcgcttatcttcctcttcctctaaagcctcctggcgttgcaatttaagagggaaagaagtcgttgtgtttcagagaaagtttaggcgaaggatcgacacggatgagcttagagatcgtctttcagatatttgccggagccaccacggaagcatcattaatctactcggcgcttctgtttccggcggtggaagagtaggaggaggaggaggaggaggaggtgatcacatctacttggtctacgaatacgtcaacggagcatctctagctgattgcttgagaaaccctaagaaccctaaatttacagttctatcgaattggacttcacggattcaaattgcaacagatctagctcatggactcgattacatccacaacaaaaccggattaaagatcgaaaacctagttcacaatcacatcaagagctcggcggtgatcgtgacggagccagatttcaacgctaagatctgtcacttcggaactgcgcagctttgcggcgaaacagatgaaatgtcactggagagagacgaatcgagaaattcaaggcgatctgatagcagagcgatcagattcgaaggagttagaggttacatgtcgccggaatttcaaaatttgggaatcgctactcagaaatcggatgtttacgctttcggagttatgatgttggagcttctctcaggcgaggagccgttgaagtacaggtatgataaagccacaggagatttcgagcggacgtcggtgattgaaacggcgagagcggcgatcgaagatggagatggtgatagagatggaagactgaggaggtggatggatcggagattggaggattcgtttcctgtgacggtggtggagaagttaacgaggctagcgttggattgtgttcaggatgatccagtgaataggccggagatgggaagagtcgccggaaaaatatcacaactgtatttagaatcggaaaaatggtcggcgaatatgaaacggccaacggatatcaccgtctctttcgctcccagatgagggaatcttcttattcctttttttcaaaagatgtaaattcgatagtaggcttattattattttctcccaaattagtgatgatttggatgtaatgacgacatttctttgtttgaagatcgttgaagagtaatagttaaaagtaagttatttagtgttcgtggggaatgaagattatgatatgagcaactaagaaattgtttggaattaaattcaatgtcagttttcaaacgtcaaaacgatggagaaaagagtataaaggttggtaatggaatctgctttttcgagtcgtgtggatgagcttgtaagtcacacacacttatgagttatgaatttcttctaaacatagacgtgaggtttgaattaataaaaatgcaaatgttatatattgtctctggactaaacataagtttcagaatcaagccttctagttgtttacagatatgtcaatttgtgttgtggattcgctttctatattcttcagaatcatgaaacaagatttggttatgaaacatttgaggttgctttcacgacataaaacatttgaggttgctttcacgaatatatgggctattgaacactgggcttatatattcgtgacccaatgacttttcattgttacccgactcacatgagcttcttctagaaaacatgtttggtattatgtttacgttatataacgatataaaacagtctaaacaaaatgtgatgctgcttggccgaattgtcaactgtttgttcagtggaaagaaccaaaaaaaaaaaaaaaaaacaggtggaagaaaatattttggttggagatgttgcatgttgcattctcttctgaaaaaatctatgattttacaagcaaactatccaaaaccaaattttcatgcgtaccacgagggttctaaaagaacatatatatactatcgattagttcaacatttagttaacagcatctgatgtaagggatggagagcatcaaaggatgaatgttgtagagtactaatggtcagataagttgctggcaatgcaaataagccgattataaattaattgggtagcggaaaaaaagaagacaaaatcatgaaaataaaaaaaggagaaggagagaaaggaagagaatgagaggtcaagtcaacacaagtccacatcacacatcacttcacacgcaaaagcatacaaactgtcttgtcttgtcaaatcatttttttgcatctcgacaatatcttactccccatacatatatacacttatacatatctgtgctcatttgatcagtgttaaaagtttagagctgatttggtagacgagactacgtttatttgatctgaagtctaaactaagcaattaatactctaaaatcaattttagtgaattaataactctttgaagctgtatgtaaatacgaatatgtatatataaatgtggttagacatgaaagatgaattatattcgctcggtagtgttgggggagctttttttgaggagatagtatcaagagatggatattcaaaaatatataaggatacatgcaatgtaatgattccgggatgatttaggaaaattattggtaaacatatctgttttgggaagcggagtgtaattctaaaaatataatgtgatttacaaaacgcgtaaatttctataaccacagtgtattcttttcaacagattattcgcctttacacatatatcccgtttcagctcaacttcgtggaaagttcgagtttacctaattaagagtttataaaggaaagagaaaagatgttttggagatttttttttttggtgagtaaaaagatgttttggagatttggaagcaaaggtttaaatctgctggttaattgagacagagaacgaaaaaaggaatttagctgcgatgataaatcgatcgtcttactgttttagatcttaatcataaccattaagattgatcggcatatttagtatttgttgaagtcgtttcggttgaaataaagatttagagtaatggttggatacttttgggtggatagttcacaattctctggataaatttagctagctaggtgaaatcttaagaacaccgtttcaaatagaattaaatgatagatactccttcataaatgaggtatgactttgaacagcgatctatggaatatcaaataatagacatagacttgaagtataaggacaagtagacttatatattaagacataataacatattctatagtaaatatgtatgcatgttcacattttttgttttttgcatgcaattgattagaaagttgagaagctttgatcgagaaagtaggtggacatggtttgcagatagggtaataacagcctttggaaacaagagcattattatacatgaccacactaaaagattttgttctatgttttaactttttactgttgaagtaaaatttcttctttctccaaacaaagagcagttaagatttactgtttcaccccctgtcttctttattattctttctttcttcaaattacaatttattttctttatcatatacaatccttaacaagcacttcttctgtctcatgccacaatacttagcggcagaactggaaactccagcttttcttgtctctctctttccacacacaaatatttacctttagtttttgaaataagaaaatttgtcatttgttttttttcttcatttatggtcatttgaccaaactctataattaataagcacaagtagtttctttgtatctttagtctctgtcagtcaatatgcctctggttctctgtattaaacaaagattttcccctctcagtgattcgggttcaaggaagtagagatacgttgtatacaaatataaatgtcttttgggattttcgattttagtttatatattatttaattggatgacccatatatgtcccaaatcgttgactaaatgaacgaaaaactagcctccatttgacccctattatagcattatggcagatgacaaatgttttccaaacaaacaaaataaaaactttttccttttaactaaaaagtaaaaacatttctgacctattttccattccattatttcttgaatccgtaatccattcgtttagtaaaggatgttatgatatctaatcttagcttatcaaatatttcttgacatgtattcagtttatatcttacatgttgatataatctaggtggatctcttgtgtagttgtgtgtatgtatctagaggcgttaagcatgcatacatattactatatgtcaacaaaaattggaaagtaaatagtgaaaggtattactaatatagtggataaacgaagatatgatacataacaacatgtagttatgcattaccgtgaacatgtgtggcatgtgtgaaagagataatacattcaaaggagggcatgtccatattctttattagttcatactcattcgttagttattaactgttcaagaacagtatacaaatcaaatgcagtattaattatactagttaagtcttaagtggataatttcacttgtctacttacaaaataggtatatttagtttcaggaattaggtgttatacatttaacatttcccttgatcttgtaacttaatagaaaatttaaaaaattgacaggaaattgacagtaaattctagctggtctcaactctcaacaaaattcaaataaatggaaacaagaagaaaaaaaagtaatttacgaatgaatgagtggcgatttataaaatgtgttagtcaaattttattttcataaggacaacttcattatttataaatagtttatattaattctctacacatatagtattgtttttcaccgagatcgcgaatcaatttatattggtttgatggacttgtccattttcatttgttaactacatattaacttgattgttttagatgctagaaattagtaaaagttttgataggagattttcggttaaaaatgaatagcaataaaaatgtcatacatgagaataatcatgtcggtaagacgtgtaatttggaatccgacaatgagtaattaattagaatgttctaatcggagtcttaatctatcactaacttaattaatatctgtaaaaacttcgagatgattctctattgacaaaagtgaatgaacaaaaaaaatccagtaaagagatcagaaagcaaaaccctaggatccggtcatccaagggatccactgaaagtaaatctttataataaaggaaattaaactatattatacatgagagagtgtgacatatcacatatgacatatgtatagatcaaatttgaaatattttattgtatgcacggaaattcattttcatggtcgaagaaaacaacaaaaaaggaaattgtttttatttattttttgagagagagagagtgaaaagacaagacaaacgtcaaatcggatctctttcttatcatacgactgccagtgccttcttgtgttgtcatcctttttacactaatatataccactttttctcagctatagcacaagttaaaaccaatttgtatatattgttttcgtcaaaaattgatggatttgggaaaaataaactgttcttttcttctttatttttctgtctaagcaaaatatggaaatcaaaaggaaatgtatagcaacccgcacgtgtgttcctgactgacctcatatgggtgtaccatttgaagaatatttcattcgagaagcactcctccagtttaacggtccatccgatgggaataccatttatgattattatttgtataaatagtagattagtagttatacaatttttctgctttcctcaaggaaacatgcttaagaattttaatcgaagtgatttatcaaattgaatgttatccatccttgaataatgattttaaaagatacttactacaacaacaaaaatatatgtaaaaaaaaaacaacaacacaaaaatattgtagcggtccgacagaaggacccgatcaacccggcagacacgcatccccatgcccttcgactctcctccaccaatttctcaaaattttcattatttattacttttggttttcttatcccatctgaattatattttttgcctcttaatttttaaacaaactgattctttcaacttcttgaagcatatgtagtataccgctaaaatgtattttagttattagttcatatttcataaaattagctaaaatatgtattaccagttgtattatttactttaaaatatatatttgcgccactaataactttatggaataaaaaaaaagtcacttaaaatgaaacaaaaagatgtagattggaatgatagattgattacaaaaaatctacattagaaatttcttttgtatttgtcactaattttaaaacatgaccaaaatttagagaacaataatatttgttagaagatttttacttattcatattcaacttgtataatatatattattgacgaataaaagctcctgaacttaattaacgtttttctgggtaataagtttgcacgcctctcctctgtaacataatcaattatcatcatggtccatggacatgaaggttttatttttattttttggttcggttagagaaacttcataatcatttacgttcttttcaaaatcctaatttttatgaacatgtaggaaataaagagattatgtaatgtgatgtaggataaaaagtggggaaacaagagaagagacggtcagaaatggaccaacggtcaaacaccagaccatcaaatcacattcacttaagttagtacagtggagactttcattggttttgccttaacgaattaggccaatgttcttatccatcaccgtcctgtccagtttaccattttatcccatctttatacataattatattagcaatttaatacgcatgcatatgggttcgaatagtgatcatggttggtctgttctttttctgcgataaatgtggtgaatgctttaaaaaaaaaaaaaagtttcatggacgtgtcgtgccgtgacgactgacgatggcacacatataaatgcgacacacacgataaaacattgtaaatatggtcgatccaaaccaacaggagaaaaataaatcgattcaaaccaacaattaaaagaataataatagaaattaccctaaaatatgacacttattaaatttttatttcaaaaatacgataattagtttatttttctaataataccacaaatttttatgtaaaatatttttattcaatcaaaagaaattacaaataaaattaaaatattatattaagtttcctattttcaatttaaagtttgtatttcctccatttaagtagagttttggaagaaaaactcaaaaatgtggtatttagagaatttccccaattttgaatgttaaatttttttggttgagatcaattaatttgcttaatttctctatcattttactgcacaatctttcgacttcatcaccattatactaaaatgcacaattatattcttatggtatctctctaaccttagtttgcccattaaaaaaaaaaatggcatctctctaatctctaaaccacttttttcatcgaagtagtcctcattttattagcattaggtgacgcagacaccccatatatatgatgaaaaaaaaaaaatatatatatatacatgtttttatgttatataatatgatatcgttgattaagtttcacgtatgtcgtgaaccaagccaaaaagacagttgccaaaggctctttttcatgattttattttccttgcaactaatttagttcgtgattatgtatacgactaagtgttacgtgacacacggggttgatttgggtccatagttagtcggtagctaatgatatttacatatcttatgattattaaaatacttaaatctctctctatttctttctacttttatattcacaaaactaatcatttcatcttttatattcgattgcccccaaatggatacggcccatacttctatgcttaacatacccttttctcactttgtcatttctctctaaactctaattactgatatgcttctgatgacaaaaaaaaatcaaatactacaaaactccaaatgctagtggccaataaataaaagcacaaacgtcgacattaatcattttattataaatttaattcgagaccccccggtccgcccattcagatctctgtctctttctctcactatatctatctatctacccacaaaccaatcttctaaacactatagtctctctctctcttcttcatcttctccataagcttctaaagatatataaaagcttgtgactcttcttcacttaaagaaatatttgcttacgaaagaaaaccctattctatatatcctacagcatactaaaatcaaagggtacgacatttttttcgttcttttaaaaccctaatttgttgtatcaaagaaatcaacaaaggagctatgagcaatactttcgaagaatcactcaaatctatgtcattggattacctaaacctcttaatcaacggtcaagctttctccgatgtcactttcagcgtcgaaggccgtctagtccacgctcaccgttgcatcctcgctgctcgtagcctcttcttccgcaaattcttctgtgaatctgatccttcgcaacccggagctgaacccgctaaccaaaccggatcaggagccagagcagccgcagtaggaggagtcataccggttaactcagtcggttacgaagttttcttacttctacttcaattcttgtacagtggtcaagtctcaattgtaccacataagcacgagccaagatcgaattgtggagatagaggatgctggcacacgcattgcactgcagccgtcgatctctctttagatattttagccgccgctcgctactttggcgtcgagcagctcgcgttgcttactcaggtactaattatctttatttaggttaatgattcttgttctttgatcttgatcttggtaaactaatctacggatttgttttagtttggttcggttgagatgaattctgaaactctatatattgatcatgataaacatttttttgttgaagactattaacaataaacatatgtggatatatagataggagttgttattttcttgatttcatgtgtaactaagcttaaagattgcttgcattgcacgtagtgcaactttctttccagatttagacggcaatggactgatgtgttttgcacaccgagaaatttccttaaaatggaatgatgcttttatttttttaatatacatactctttatttagtagaaaatatcttctaaaatagtaacttggagaaaaaaacagtgattttattagtagtcccaaaaattgagaattgtcttaatcattcattctgcgattttgcatgatattagtaatcgcatatttgtgaggatcgctgtttccgttcagcattcccgcaatttctcaaatgcaatgacctaatttaaaagaattttatcattttataggcttttagtgtaactagatttttctcgcttaagcaattttgccatttcattttgtattcttctccatatataataatctcttgaaccatagtcgcgtgaaacaactcctttataatgaaaatgatattcatccaatgaaatggaagtggtggatatatagtgtctctaacttcaatattgttttgtctttaaagccaactgtgtttttttccctcacagaaacatttgacaagtatggtggagaaagcctccattgaagatgtgatgaaagtgctcatagcttcaagaaagcaagacatgcatcaattatggactacttgctcttacttaatcgccaaatccggtcttccacaagagattctagccaaacatctcccaatcgaacttgtagccaagattgaggagctccgtctcaaatcttcaatgcctctccgttcactaatgcctcaccaccatgacctaacctcgactttagacctcgaagaccagaagatcaggaggatgagacgtgcattggactcctctgatgtcgagcttgtgaagctaatggtgatgggagaaggactcaatctagatgagtccctagctttgatttacgcggttgaaaattgtagtagagaggttgtaaaggcacttcttgagcttggagcagctgatgtgaactatcccgcgggtcccacagggaaaaccgctcttcacattgcggctgaaatggtgtctccggacatggtggctgttttactcgaccaccacgccgaccctaacgtccagacagtggatggaatcactcctctcgacatccttcgaaccctaacgtcagattttttgttcaagggggcaattcctggattgactcacattgagcccaataagcttaggctttgtctcgagctggtccagtccgcggcattggttatatcacgcgaagaaggaaacaataacagtaacgataacaacacaatgatctaccctaggatgaaagacgaacacacgagcggaagtagtttggattcaagattggtttatctgaatcttggtgctacaaatcgtgatattggagatgacaatagcaatcaaagggaaggaatgaatctgcatcatcatcatcatgacccatcaacgatgtatcatcaccaccaccaccatttctaggtctttttgtagtccctatcatccttttttgataaccatcatcctttaattaagataaacatattcaatatctaattaaattgttgttatggtattctttttttctctatgtatatggccatgcgaacaaatttaaacgttaactccatggagtcatggagagtggaagggaacacaaacaaaagggtcatttatatatagatggataaagatcttgagttatatcttgacatgtataagcttgattaatattaggtcgttggatttacattattcaattttcttataatcaaacaatgcattacagtgatcttgatcgtagcatttcctttccttttgggtaaagtgaggctaaaaaaaacaataatagcaaagaaaaaaagccaacatttatggaagtgtcaatgtcatcaccactacaatatgtacattagtgtattcaaagacaaacaacaaatggtcggagcttgtaactttgtagccatatgaaaaatacaaatcctgcaataatataataacattacttctgctccgaaggaaaaaaatagtttggtgaaacttgaaaattgaagaagctttgtggctaaaataagattttctcaaaactagaggactactctacaaaattttgaagcactgtataggttttgcaacctagtcctttagaagagaggaaattctctttgacttggtcagtcataagtgtctacagtgttactcatggtcatggattagattcgcctgagcgtctccgtcttccgacgccgagctctctccgtcaataatgtccttttccggcgaatcaagttgcacgctttccggagtctccggaatttcactttcgttttggctatcttccggctctgaattcatcctcaaattctctcctctaacgagattcaacacaaatccattgtgtgttcttcccgtctgaagataatcgccttccgtgacagtgatgctatgagaagacgacgaagcagctacaatcgaatcgttctccgaagctctaatctgttccggatcaacggcgtcgagattctggacgtagtcagtgaacatctgagcagaattggtcctcatcaatggtccgccagatctagtccaatcttcagcttctggagaatcacattcgcttcctgcgtcataggtatggcttaagttactggttcgattactattcctcccagatccaaccacgatatgctggtacaaccgtgaagcttcagctaggacatcatcatcgacggatccggaggagttctgacgagctatacaattccaggaagggattcttttggaggcgttgaatctattggttccggccaaaagatgtttagatggtggagaggaagagatggcggagaaagcagcggctctttctgcgctgcgtttaaggcggcgcatgtggttaagaacggtgacgcactcgtcgagtgctagttcgatcccgaagtttgctttgattactgctagtttttcccaggtgcatctccttccttgatttgctgccttttgaatctctacattgcttggattttgtatgatcttcaagtactgaacccggaaacatatagaacctctatacattaataattggattaagagtgaggaagttttctagttgggaatcattatttagtttacctgagaaaaagtagctggcatgacaattgtgacatcgccttcccattcttgagcaaatagtgaagctacttctcttagaggaagcccgagttctagtacttgattacatctatgcttcacttccatctccgcgagttgcgcgagctttggaatgattaagagatagaattaggcattggattataagtattgtggattaactagatagattatgaatcatacctttgctgcaaatcgacctccacaagctctcacaaactccttcatcctcaagaagggtgctatgtgagggttggcttgactgacaatgaaatggttgacattgaaaagctctttgagttgtatcatcggtaagtccatctccaaactaccgtccctccagcgccgaactgatgctgagccctcttcaggatctaagttaaatggtggatgataaggaacaatctctccagttctgtctttggccatgagttcttgagcttcgaaaagacctgggaaagcacaagatgcagtcactgcactccatatcacaacatgaggcgaagtcagataattgagacatctaggcggctcgtgtttcctcagggaacaaactgttatccctagaatccgtcctgttatgtcgtaagcttcttggaatgtgagattgttggtgagattcctcaacttccattgcagatgccggatctcatggactgcgccttgagtcataacccgcttcacagtagtgaaaattcctcccatctgatcaaagaactgcagagcatgccaggacccttcaaagaagctctgcaactcgggccatgaccttgtccccacaaccgcacacattacagaccccacgcttgaaccagctataattcttggcaatagcttatgttccacaagcgtcttgaccacaccaagatggaaagccccaagagaagctcctccactgagaagtagagctgttcttccatacgcgtgtctggtctcatgcataaaagaaagtttctcctccagagaaagctcttcagtgtccatgtcgcaaaccatcctaagctgtgtagagacctcatcgatatactctttgatgagtctcggcacgtgaagccttcccttgtgaagctcagggttacacatattaccgagatttctcacaagatcagctctcatacagaaaataatgtctctaagagagccctcatgacgtctatgcttaagttcatcaagcttattacttacgagctccacatcaaaaagatctgtctcgttcaccttgggagtctctttatctagcatctttgcggcgtgagaccattcctcatatgtcaatgcagctctcatcatgttcctccaaaattttctcctgtaagccatctcagcctttgcttttaagcttgtgtagcggttcaacagaaaggccatcgtcgtcaccattactaatatcccttgtggattcctgggatgtagcaaggacacaaacggtgatagtaaaaccctacctcctctgaggaaaaatttgagaattctgaaaactttgtgtctgaatatagacacggagttgcagaacaagatccggacggcaattgttcttccgattatagtcgtgggtcctataattgagaacgcatcaacgcctgcttcgttgcttatatccattgtctccgactcgaagacgagaacctaatcactggtttttacgacggacacaaagaatcgaacccagatgccaattttgtctgtaagaccagaatcagatgaatcaaaaaatcgattttttcaaacccattagagaagagaaggagatatcgctaacccaccgaggaatgaaattgagaaagatgagacagcaagtgatgggaggcatagggatctgcaagataacatagaaaaagaaaagattccgatgtataatagaggacttcaagatttcgtttttagcgaagaacagaggaaattcatttaaatgaaacctgagattcatttttgctatgagacaaaattggcgatctaagtaagacccaagctaatctttggactttctaattttgggaacataaactcgcgaacacgacaaattgcaaaagaataaaaaattgtctttttgcacaaatagtctctgttttttgaaactcgacgaatataaaaccgttgaattcaaacatctctggttcgtattaaataagttcggtattatccgagataatcatctctagacccagcgacagacaacaaaggactgagttctcgtaatcaggcccattttttggtcagggctaaggcccgtttgttgaaagttaaaaacccgtaacttttaatactgatttaggtctattattatcctcgttgccaaacagacaaacagacagacaagaagggcaaagaccaaaaacagagagagagaccacagtcatataactaaagggagaatctgcttagaactgaaactaaccttacaaaaacataaaatctggtaacgtaagcgagacgtagaatacaagcataaaatgccttttgtctcactttgttccagagtagatagataccgcaaaatcaaaagagttcaaaacttaaaaagcaccataacgcaaacccatctcattcctcatcatcctcactgtctttgttcttcttcttcttatccttctttttctttttcttctcactcttctctgctgctgattcatcttctgcgtcaacagcagcttcggtgtctttgctcttctttttcttcttcttctcagactttggtgaagctacctcttctataacctcctccttcttatctttcttcttcttcttttccttcttctcagacccggcttcctcttctttctcctcttccttatccttcttcttcttcttcttagaagacttcaccttctcttcagcctcttctccttcaacttctttggttttagatttcttggttgttacaggagcagggctatcactgctatcatcatgcttacgcttacgcgcttcccctgcttctccattctcagcgtcagcctttatctcctcaggagcagcagcagcaccagcaattatagcatctccaccggtaggcaaaaccacattcctgctccactcaaccggagtcttctcattaggcttcccatgcttatccaatttcccatcagcaataagcttcttcttcatagaagcccttggtcccaatccccacttcctcgggtaggtatctctatccatcaccacacgcttgatcttagctaccacaccatgatcacaagtagccatcacagatgttgtcatctcagcaatcccaacggcaatcgcctcacccttggtagtcataagaacgacttcagtaccaacatcaatgtcattctcgaatctcaacaacccaggaatcatcaacttagcaccataacagatagcattcacagcagaatccttgacaacaagtctcttgtaactcgtcaatatcatctcaagaggcataatcaccctcctaagataagactcatctctggagttgtcatacacaaattgggcatccatcacatcatgcatagtaaccatgttattattctcacccaaaatcccagacctaaccctcctaagctcctgcatatgcccaccaaccccaagaagtaaacccaagtgaacacacatagtcctaatgtaagtacccgcctcacaagaaacccagaaaacaaccaaatgcctatcagcatcatactcaagcagcttgctttcatagattgtcctaatcctaagctgtcttttaacagcagagatcaaaggaggcctctgaaacacagctccagtgagcgattcaagagctctagctactttagcaacatcagggacagctgagtgaagccgagcaacacaaacgtactctttacccgcaccttgctgcgatttcacaagccgtgtggctcggtcaatacagacaatgaggtttccagtgacttttgggtcaagagtaccactgtgaccggttttctcaacacggaggatacgcttaatccaagcaacgacctcgtgagaagaagggttcgcgggtttatcgagattgatgacaccgtacctgatatactcttgaagaggacgtttcagaggagagtgaccggcgctgattggagtgtagtgaccggtacggacgttgaggcggtcgtagttcttgaggaggatgggccactgagaagtgtcgatggctggagtgaaactctgtggcttgatcatgtagtctccggtgtcggcggcatcgttctccgttttgtcttgcttcttcttcttcgagtgtgagatgtcgacctccgccatggctccggtcggattagggttttgaaaaatggaggaggaggcgttaaaagttgtagcggaaaaagaggagacgactgattggtaatttataaaggactagggttttttagggttttaggcgacagtgatgacactggaagcttgaaggtaatcccttattgggcttgagttgggtttctttgattttaattgggcttttatacaagttcaattcgtttagtgcccaaataaacgaggtccatatacccgataaaacctttaattggactttcatacaagttcaattcgtttgaatattatcattcgtgaagtgaataccagtttaaagacctttcatagttcaaacttcaaagtaaatataaccctttttgtgtagataattaaggttctcttttgttgtgcccaaaatgtagaaaaaagctcttttgatacgagacaattgaatgttatgttaataaaactgcttatataattagaagtattgattggtcatataaacctaatgaagcatgaataacgcctcgtgataattattatattaagagtcgaacgtctgtctttttcagtaacaagaagacaatccttatattactaaaaccaagtcttgaccacagaaaatcataaatatggatgaatatagttaagtgtatactactctctttttccgcatatataaataccataagatttatgtggccattcaaagacatgaaaaattatcacgattttaaaatgtttcgagtgaagtgtttcgatttgattctaaaattcttgaacaaatcaaccaccgccctagaatatagtgaaataattcttcgaatatccttatttacgctaactgattcgcataatgaacaaaaataaccccaagttttttcaagaatataggtcccattgtttcagacttttacattttacaccttaagtttctgcatttaggtaaagtcagctctctggctctctctcttgtctcgccaataaatagtcgcttaacaaacaaacaatttttctttaaacctaaaactcaccaaagagaaaacactgggctgaagtaggaaatggccggccttcaatatagtttcttcccgaccgacttcttctacccacgagcttctcctccggctacgacaagccttgtcgccaccaatccaaaactggagaaaacccaaaagagagatggtttagtagtgattgatgaaactcgtgcttctctgtctctgtttatacgtgaaaagaagactaatcagtcacaaacatggaagaagcagccactttggatcgaagatgacatgtgatacatctggtttttgtcatagcttcatcaattctcatgtcttttctttcgttaactcaataaggtcatttatctatcaagtttcaagggtatatcaggattggctgttatttaaggctgaccttaacccaaaaaacagagtgttttctagattttaaaaaacctctaatgtgcctcgtgtggatctttgaattcttgtaattccagcgtaatttcaacgcaaatatcactgtcctagctctttacaatttgttcttatttctttctatcgttgccttatataaaagcaagttctttaagttggctatgaaggtgttatcagttttacaaattgttgaattttggtatcaaaatgatcatactaaataaatagggtgcaatcattagatgaagctaggaagaaaaagcagagggtaaaagccaataatgtgcaacatgaattgggtcacccaaccatttacattcccatttggcaaaatccaaataatctaatagtaactaagataaaatgcttagaagagagtcaagtctgtagagaaacgaaagagaatgagatgagatcatcggtataaaccaattttgcagcttcaagcggagacctccactcagaagcaagcgtccaagacacagtaacagcacagagcagcaatactgcaaaagcaaatcaccatactcagtcatatccagtactgaacacaacatgtattagccagataactccacaaagtgagaaagaaaacaaacttctgagtaatgaagacatgatggcacacatcttttctaataaccttcggttctgaggtttgaattatatcttacactcagatcagcactatcagattcaacatctttctatgcattactataaggtgaggaccaaatccaaatgaaaacaaacttatgaacaaacgtgacatgacatggtactaccgattcaatcaaatgatataaaaaaccatgaattctctctaaggatcaacaattctcgaaccaaaaactgaaaaaacattgaaagaacaatttaaagtcgagcaaataacttaccatccttcaagcataccaggactgtgtttctgttgctgttgttgctgaggtgggtaaccttgttgaggatatccttgttcagggtacccctgcggaggataaccttgaggaggataaccttgttgaggatatccctgcggaggaggatatccttgctgaggatagggttgtcccggaggtggataagcgtccttgggtggtccttccgccggataagctattcagatcgagatatagataacgtattcagatccatcaaagcagaataacacgaatttcgaaatcaaaattcagaatctaaacaacactttatatcatattttggagaagtagttagaaaaaactcaaatcttaaacaaaaagcgaagagaagtgagaccataataattcaaataatcaaaagcagaagagtaaggagtgaccatgagaaggaggaacaccaacagcaggaggttgttgactcattgtagttattttcttcttcttcgggagtttggaagatgatgcaacagagaaaaaaagtgagaagaaagaggaaaaggaaaagcgcatttttatttgtaggcgaattaggtttactctttttaaaggtattttctaacggttatcctatcaaattatatcttagtcaactttttttatgttttaaatgtatatcctaaatattttcttgatttttttttttaacttttgcttttgggaagtgaatccagattctattccctataagaagatatttttttggtaagccctataagaagatattgttacatttatctttgactattttaattacattaatttaatttggaaggatttttaatttttagatattaattacatttatttatttttcaaactttaaatttattttctcacttttcttgtatttaacttaatttttaaaaactttcttttccgtaaattcacaaaagcaattatattcaagaaaaaaaaagaatcttaccacatttttttttttttacttttcatattcctcaactttttaagaaaatcagaaaaacaacagaatatttaattaaattatttacattttgacatgcaaccaaatttcatcagcaatataatttcactagaaaaaatcatcattaatttcatataatttgtttttcatagatcaaatcaaaagatttttacatagttaaaccagagacaaggctgatgaacaaatcaagtaaaaagggccacaaatattgaaaaaggaatccatgttttccaatgttaacgattctcaccccttactcccctagttatctcattgtcttgtggagttaaattaaaacgctaagagatcagctggagaagtcatcatttgccacatgagctgatggaattatggcatagcatccagtactgtctcaatggcatgtggagccatggcctcggaggaggaagatcaagccccagttttgatggcattctggaaaagacgagagaaggtaaatgattttgaatagagagagagagagagagaatgacttaaattttgtgatcaagatcatataaaatcacctcttcccactgaggactccgcgagctgatgttgtcagagaagaagctgatattcctgaaaaaattgttttatagtgaggcaaaagaatctgtcctgcaatttgttcaatataaatgtcagcaaaaattgaataccaaacaaaagcataacagatcatctagattaacttgtcattagacttggaacaatctacaagtttacctaaggttagaaaattgctgcgaagattggaaaccattagagaattcttctcaggagtaccgtgttcttctagtagacttttggagtcttcgaaggcatcattggatttaaggatatgctctccacagtgttccatttcaaaccaaacaccacaggggaatcttttacgcctaacaagccaaatcataacctctgcatatggtgttgcatggatgacggagatggcaaattcaatcaacatacatatggagtttattgtagtgctcgtaatggtgaaaaagatgtagaaaactgatgttgttggcaagagaagcagaagaggagtgaacagaagagatcccactacatgttgcttcacagtgtaaccatagctgtccattctttgacgtagaggattcaattttcgccctctggaagaacaaagaagaattcaaggtaaggttactttaagtaaggaactgaggtgaacaaaaatggttcaccagtaagaagatataacaatactttagtattttcattgaattcaagaagtttaaaaaggaaacggaaaacgtattgcatgtctcctccttttagatttaagaaaaccaagaaaccgattcaccagatgttagttatcagcttaatgaatgaactcatctaatttaatactcaagatttacctgaaaagcctccacaaagctgctaaggcttggatttggtgagaatacacaagtgtgattgcccagtgaagagccattatatgaagtgttgcaaaagtaatgacatctatgacaaatgcggcagatactgtggcaccaaaagtaattccaaggatggcaattactcttatcaaacaaaagatgaaagaagccatgaagacccagagagtagaccatatctgtattacattaagagataccatgcccaaaactccagccaattctgtatttaacttaaaacccgctggaactcccatcaaccacacactaccagaccgcaaaataccattcgtaaactcctttgcaaagtcgaatacaaatgagcagacagattcggtgttaaacagtagacctagaccaatcaagttccccaaaacaagatcaacagccatggccgaccatgtagaatgtctttgcagtgcagcttcctctgcatgtttcacacaggatatggaccttgagaaacccagaagaattgtcataaattaataatcgtgtgaaacttctcagaaaaatgacaaatgcattgcataaaggtatctagaattaaactttttttatttcccaagattagtaggtaagcagttgttgttagaaaaaaaaatatgaagatgcaattttgagccaagggcaaacagaaaaagtttacaaatctaactaaagaagaaaatttgggtatacggttgaacttacatcatgtcaatctcttcaaggaagattggccaatataagatctgacaactacgtatcctgaagttgatccatgtattcttgagtaccctcctcgatgcgatgtgcacccatgaaaaaatcagaaaacttgaaagtaaatagaagaattgggcaaggctataatacagacttgataaagagcctaaaattgtggcgagtaaccgccatgttaaagaagatatcctgaaaagcaagatagaagcagttggaacaactaacaacaaagaagaaaagaattcaacaaggcaaaaaaaaatatcacgagggcttacaagtaactaatggaaaagttctgggaagaagtctccagctgcgtggatatcttcttataggcaatcttggcagctgcggcgcaatttaaggaaagaataacagtttcctgcttacataagaatgagagaatattagtaacaagtcgagaaagaaacaccacaacaaagagaagcattttggaaactactcaaccatttcattcagaggtttcctattgtgaagatcatcaacccacttgggtttcttaagaggagcttttgtctgaggagaagaattcgaaaagcttaacgagaaatggtgagaaccaaacactggagtgtcatagactatgacctgacaatgacatgtccatgtttaagggagtcaaacactggcagcgtgtaggttcagaaaagaataaaacaagagaaagacatcatgacttacatacgtggacatcgcattgagatacaatatccccattccagtgtatatgatgcaatctagaacttgaatggaattccataattctatgctctgcagaatcatgcaccatatgaatccagtaatttctcacagaatctttcctgaaatcctctaataagccatcaaccttatgacaaccacaactgaggccactatatttgcaaggcctaacataagctccagccttgcgggacatatctttgtctcttataatctttgatacgtttccattagcattacggcttatatcataacgaccaaggagtgtaaatgctgccttgtcccgtaaagttgagggcatcttctcatttgtttcacggagtacatcctgttagaaatcacaaaagagaaacgtcgcatacactgtttatcaaaaagctagagaaaaaggattttttgttttgttgaggtggagttattacttggagcttagatccggcattggacaaggagctctcatcagagatgaaggacacaacaacgtcaagacaagaagaggaatggcaaacgaaccacccaaacaatagactgtgactcaaatcatcagttgatgcgagctgtttaggcaaccaaatcctacattttctcttcatttcagctctctgccacacaattcccaaaatgccaaacgaaagagaacaacatatcaacaagaatttgaaaaagtgaacataatacgagaaaattccaaaataaaagagagtaatttatcgatctaagaagacacaacttcaaatgtgaactagagaactatgtaagtaaagtaaaaccccagaaaaatactcgcatcgaagaagagacgatgagtagtatcaacttctacaaggcaattggcgatcggaaagatgaaccgagattcataacacaaatctgaaccctagaaattcttcaattcaacttaaatctaatcacgaaaagacgaacctcgtgtttcaggagagaaggaagtctagagtcgaaacttggttctgcaaccggaagaaagatacattccggcgacgagaccaacggcgacaaggggaagagatagatatttttcactatgggccgggcttttcttaataacgaggttcactggattaaacaaatttgaattc

SEQ ID NO: 1368 - DNA, 90273 bp, Arabidopsis thaliana
aagcttgatgatgtttatatttggtatccaatgcagatggaaatatatagcttgatgatgtttatacatgtttcagttcagtttgcagtttcaaacataagagaatttgaattggttaggggacaaaaaaaacacataatttaaaagaggtcataacgattcaattttcaggtgtagaaaaataaaggcaaagactttattgtaaacagtgcaatcactgtatatattaatattccattttgattattataaaattatttcgttgggcattaccacaattcatatttgtgtccgtctcacaagggctccactttcgtatagttttgaatatttgtaatatgctgcattctatgattcgaattacttaaaagttcaaattttttttggactcttgatatttcacaatcagtttttttttttaaaaacagaataaatgagtagaggaagttgttgtggtttgagttgcttcgaagtagcgaaaccaaagagagtagagtatatgagaacgatgtctgaacaattcgataaaatccctaggaagctttacacgcatgaagacttgaatctcacaatgcagagccgatagtgaattcatacttttcaaagttaaacttccgaaaataaaatcaaattaataacatttcaaaacttttaatcagtagtttactagctgttacaaaccgaaatattttaataaacagagagagaaagttaaagagacaatgacaaaacacaaaccaacatggttgaaaggttgactcatatatatatatatatatatatatatatatatatatatattgagtatttaatttcttatttttaattccaaaaatcattattttagatcaatagtttttattgatttttttgtaaactattgaataatagagaattttaaattttcctagatccctaattccaacatacttatttctctgttgattctttttatctccaaaatcgactttaaaagattgatattcaatagttttaatcaaacagtttctattttaaaaatcgttgaaaccaaatctcgtggatttctagatctataactattaattcaagaagatttagatattgaacttttgtttcggaaagaaatagatataaaattatttcttcgaggacatatagatcgtgctcacaaatcagattctatctagtatgatgtgtcgaggaaatagactgttttccggaagagatagtcgaaattcgtatatgggccaatctttataagaaaataacctttagaaaagttacactagaagaaagtccggcccatctttataagaaaactattatgggccaaaataaaggtaggcccattaacccagggaaataatatatcagtgataaatccttcttctgtccccttcctccttaaaccctaatctctgtactctctcttcctcaatccctcccatgaccaccgcagtttcgccgccgccgccgcaggagcagcaacttgttcacgcttcgcagacttcaagagtgagtcccaagacagtggagagcgccctcaatggtcttatcaattggagaagcgacaaatcaaagacagagaagcctcaacttctcgaagaagacgagctcgtctaccttttcgttactttgaagaagattccacagaagacccgtacgaatgcttaccgtatccctttacctcatcctcttatcaacccgacggtcgattcgccggagatttgtctcatcatcgacgacagacctaaaagtggtctcaccaaagatgatgcgatgaagaagatcaaatctgagaatattccaatcaccaaggttattaagctttcgaaactgaagagtgattacaaggcgttcgaagcgaagaggaaactctgcgactcttacgacatgtttttcactgatcggaggatcattcctctgctgccgagggtgattgggaagaagttctttacgagcaagaagattccggtggcgcttgatttgaagcacaggaactggaaacatcagatagagaaagcttgtggatctgctatgttcttcataaggactgggacgtgtagtgtcattaaggttgggaaattgtctatggatatttgtgaaattactgagaatgtgatggcgacattgaatggactagttgagttcttgcctaataagtggacgtacgttaggtctttgcatttgaagttgtctgagagtttagctttgcctatatatcagtctgttcctgatttgaagcttaaaatcgatgcttttgggtctggaaagagtgttgttcaggaggagaaggaaggtgaagttgaagaagttgttgctgttgatggtggagagaagagtgttacagggaagggaaagaagaagaaaggtaggattcacgaggttaggtatatggatagtaatgtagctgaggtgcttgatgaggatgagattggtggtgacgaggataataatgagattgttgagtctgaggagaagaagatgaagaagaggaagaaggaggtaagtgaagttgcagagagtgagaagccgatgaagaaagctgccaaagggaagttgaaacctgatgttgagaaaccgatgaagaaagctgccaaagggaagtcgaaacccgatgttgagaaacctatgcagaaagctgcggtcaaggggaaagttaaaccagatgttgtgaagctggagaagagcaaggacggcttaaaggcgaaaaagacaacaatggttgcgaaagacgaatctggtggtggattgaagccgaagagaaagagtgtgcttaggaaatgaggcagaggaaggtcttgagtgtttgcttttgagtatgatttatgttttattttctatcgtagttcttattacatttttgagccatttcatatcttgtactacttctatgaaacattgaactggtgaatgtgggtttgatggttttgtggaggaaacatactactgttcaccttttaactttttaaaggtttttctttctaaacaaagactatttatctgaatttattgcaataagcattgatcaggttatgatggtacttgcatgatcttgatccccatctcttagtaaatggctcaccaaagctttaaccatttaaatcatatagaggtctcttagaacagttatacccaaaatctgcatgagtttttttattactcgcaagccagcacagcacttcaggcttcgtctttcagtcataagaagaattaaaagttgatatgatctagagaagacatgaaataaggaaatgcaaaagatcaatggaaacaaaatttatgataactaaatagaacactgtttatgagcaattttttgtgtagctgcatataaaaatagggggaaaaaattataatattaaactagtgaagtaatcataaagttgtatgtagtaaacattatcatacaacgacataggctggaacttaatgtggtcacaattatgtaagaacctcgaccattatgcagccagcctctgaatggtttaccaattattctcctgatcataagcacctttctctttctgctcttttttaatatgtttaatcctttttgtatttctcattttctaatcactggacctctgtacggaactctccatatcacaaagttatctggaggttgatactcttcaagccatgtcacatttgagatcacttctccattcatcacttcaatctcacctggtttcacatatgatgtcatcaacaacattgccatagtaacaaatgatagtcttaaaccaaatctgtttagcaatacagataatgagcatgttctatgagagtatgagaccttttctctaatcaacaacctagtggtttaaaccatgattcttccaaaattgttatgaaagctgttacattacgaaatatagtagcacttttaagaagttataaactggtatttcgtgaagtttgtgatattttaccaggtaagtctagcattggggattttcggaagtagttgcagtgtctgccatgagtagaagagtatggaggagataagatgtcgaagattgcacaatgagtaatggctttgaaacaatgaatgttgccaccggttgttggatatagagtggttgctgggctaggggaagtcatatcaatatccttgaccagcttcgcgggtcttgctatgagtaaaagggaacaacatattactcattttgaaatgattcatatagcacggaagttatactggggcagtttacaagtcactttttaccttgtaatggatcgtctagctctgattggtcaggctcagcccaatcatatgacttaacgtgcattgaaccataaacaagcttgcttagcactgtcatgcctggatgattatgaagtggtatgatagacccaggtggcatgcagaaaattccaatctgacaaaataatgatcaaagcataataagcagacaagtaaagcaagaatattgcatttcagaactttgtttaactgcagtaaacatgtggagcgtgttgctccatggcttaggcaagggccataccaggaaccaaaatgattagtgatgatgagaaatttggtttcaacatgagaaatctagcttaggtacttctacttaacctaaactttaatgcctacccacttactctcaagatttcatagccaatttctgactatatcgatgaaggcagactcaaactttaaaaggtgaaaactacatgcgataccatcctgcaagaatgtttgctcaccgagaagctgtcacactcatgtaactgaaggtattttattgctggcagagaatgatggtttccattacgctcgttcccaggaccaggccaattacgcaccaattgagcttcctgttcgagaccaacatcagacggcttgattttctctgaaataaaaattacaagtatcacgtatgtctgcaagtaatagacacgataaacaacagttgtctaatgccacaagaaggtgcgataaccaatatagaactgcaattcagacataacgagcaacacagtgtgcctaaagaacataatggagcaagcaagattgcagaaatagaagggaagaaaatttgcaagacagtgtatcaataatgtcgtcgtacccaagacattgcgaaccttgtctaaggcctcctcagacacaggaccattaggtgagagagatgacttgcaagtattgaaaagcctctgaataaaatatggcatgatacaaaaagaagacacagctccaagttcttgagcttctaactttggtaaccctctttcagcaaaacggctttgagttatcaaaacagcaccagcgatcaccttcttcaatgattctcaagcactgccctgaaaggagagaaaagaaaacaactttaacttcatatagagctccataatctaaacaaacacatctgaaaacaaatattacaaatccaggagctctgagtctctcacaaagtagtgtttttgacgaactctaacaagtgaatgattaatcttttttcttacatatcgaattcaaaatcactgcagctacctaaatgggctcactcaatgaagcaaaagtattgccaggaatagaatttaggtcagttattttgcaaaactgaatcatatatcgaattgaattgaattgaattgagctgtgcccagcaaattctctcaattcattgaagaatattacaagcagaaaaaaaaaaaaaaaaaaacgatttgaaaacatactggaacaagagaaatgatgatttggagttgttgcagcaagtagaagaagaagagcagctaaactagaagcaggagtgctacagagaagagaagagaagagaagggaagtttcaatttcaatagattaaaaaagagaagagtgagagacctttcgagcagaagagtgaaaatccgaagaacggcgacgaggagatgtatcggaggaaaccgatgatggaaatggttttttagtcggaaggaggaatcagaatttgatctcttctttttgtttcttttgctttgtgagtcgtttaaaaacgtcaagtctcactctctctccccttacttttcaaattagtcaatttcaaccccctttgctttttaagctcgaataaataattccacctatttttttaggacgagaacaaactgcaacttttttggtagtaccaacttactagtacaatttcgtatacattcattctcagattctcttgctaagttataagaatggtaaattatttaatgtgatttttgctatttgtgaaaatagaagataacgagcttattttaaaaaacaaaaaaaaaactataaacttcaaagattttgctatggttattagattatgacattaaaatattaattttaatagattttcattctaaaatgcatctagatttcaatattgatttccaagtagcaagaaaattatttaaaatcatagttaaattaaattaatcttaatttgatttaaaattaaaaaaactcaaaattaagttgtcaaactacaactgactgccacaaggttataattttaatttaagcgattgcaaatatagttcaagaaaccatgcattaaaaaaaaaaaaagtggacaaattttaggtgactttgggtatttatggtcatcaatgtactctattagtggacttgaaaactttgaaaagcccaacatttgttctggctctttaatctgagacctaaacattgctgatttggtccatctaaaaaacatagtcaaagtccgtttgtccggaagttttttctaccaattccaaaaggcctttctcggcctatatgacctttgtgttggtccctgacttctcctatgactaattgctgtgccctgtgtgccatttttttttaatcagagttttctcattttatatatcaacaagttatacaatttcggattaaattccgacatcgtcaaaaaggaagaaaaaatccgaccaactctaatattattggttatagtttttgcgtgttaacattttttagttaatatagagatcaaatttgggccaaaattatctacgagaaagtctgtctcaactatccaaagttaaagatattttcgctgagaagttaaaaataatatttcgatgggcccttcaatcttagctaatttactaaagtaacccttgtcgaaaaatcaaaaatataaaatcgcaaaacgaacacggcttagtttatcttcttgtctctctctcatttcttgttattatccacgaacgaagaaaaacctagaaaacagttgaagaaagaaaatcacaagagaagccatggccggaattggaccgattactcaggattgggaaccagttgtgatccgcaagagagctcctaacgctgcagctaagcgcgacgagaagactgtcaacgccgctcgtcgaagcggcgccgatattgagaccgttcgaaaatgtttgttttctttctttctctatctccgtctctctgatctacctttgtagcttaagttgtgggagaatatttctctggtttaggttaaatttggcgattgaatctagatgagttttattacgctgtgttttagtttccatgattagggttatttgccttcgtcgccgtcactggattattgtggttgtcttagaagagatctgtgttaggttttcgcctgttgtgattcgaatttcgtttgctgcagtaacagttcgtccgattttacttatggattcttgttcgtatcagattgatgtttctgttttgacatttgaatatgcctttatcattttttctttttcgtgaaatctcctttgttctatatgagtatttctagttgttgcaagtaatcatctaacgagatttgttgtttttgttattgctgggtttagtcaatgctggatcgaacaaggctgcatcaagcggcacctccttgaacacaaagaagctagatgatgatactgagaacttatctcgtgagttattcaatctctttctcaaggtgtattgatctgatttctatattgatatagtaatgttagtatctatctctatatcccttggacacagtgggtgaactagattcttagggtctgttttcttgcaatgtttgaattgtactagtgagtggaagtctttttttgttgatgggttattgggatgccacgagctgatgctttatgtactatttatccgcaaatcactgtgttttccatatgtgtcttagattgattagtagtgttggttatctttaacaccttggttgtgtatggttttgaaatcagatgatcgtgtgcccactgaattgaagaaagccatcatgcaagctagaggggagaagaagctgactcagtcccaacttgcccatgtactttcatttttctctgtatctttctctttcttttactgtctttcgtcagtaattgaattcattgtatgggttttgattctgtagctgatcaatgagaagccacaagtgatccaagaatacgagtctgggaaagcaattccgaatcaacagatcctttcaaagctggagagggcacttggtgctaaactccgtggaaagaagtagaagtgtagaacaaagctcttaaaggtaacaacaaaagctgatcgcagtttctctccagtccacatgctttaccatatcctaaaaactatatctatgtatggtttggtttaatggcgtagtagtttgttgcgaggaatctttcatgatgtaagaaaaacaaagctgtttggaaccttttgtcattataaataatctcttctctttctttttcgtcatgtctcgtaaactttatctgccacggatgtatgttcttaaagaaattgaagattgaaattgatcaattgccaataatgatctcttttgtctctgtatatgtattgattcaaacagaaatcatagtagaaaactgtcaagagaaattgaccttttaacataatatctaagtttgggctggataatatctaatttttgggcctggataacgttttacgcgtcagggactaagttgtacaaaatgaaactaaagggacaaaatagtaaagttgggtgccactgttccccgcgccacaaaacaaaaacagtacagtgagtcagtgaagctgacattcacacacacacactcacacaaaaaccaaaaactaattttcacgaaatccgaagcttaaaaattattcctctactgtttcaatttcatctcttcttcctcttgagttggcaatttctagggttttctcattttcctttttttccatttctggaaactggtaaaaggctttttctttgtctgtgggggagaaacaaaaatggagacagacgaagcataccaaaagaaagagcgagctgcattagtagccatcgttgtccttgcttgtcttgctttatcttctttgttcgtcgcctttagctactactgctatattcgtaacaaggtttctaagcgtcacagaattagcaagagtaagctcaacaattcacacttcatttctccttcttatctttttacctgtatttcttgttcttacgccggatgctgaaatttggttctaattaaggaataattttggaagataattgttcaattagggttcgatttatgttctgggtattgaatctgttattgttttacctgtcgatttttagggtttgattgtgaggaaaaaggcgattgtcagaaagtacaagatgttactgaaaatgggttgcaaattttcacctttaagcaattgcattcagcaactggtggatttagcaagtctaatgtggttgggaatggtgggtttggcttggtttatcgtggtgtgcttaacgatggcagaaaagttgctatcaagctcatggatcatgcaggaaagcaaggggaagaagaattcaagatggaggtttgattatttttagcttactctttgatctttattttttcaaagcttatgcacattttgctgtttgcagcgtttttgattacttgattgatcaattttttgtatctggtgccaggttgagttactgagccgtctgcgttcaccatacttgttggcacttcttggttattgctcagacaatagtcataagctgcttgtgtatgagttcatggcaaatggtggtctgcaggaacacctgtatcttcccaacagtaagtttctttttccagtagagttagaagttgctgcatgtttgaagttgtcatctgaagactccaaatttagtctatctgtctagatgctaacaatttgaacatgaatcctagatagtgtataataattacgaattggtgaatatacgtctggaattcttgttggatttgatagaaaaatctctttttcttgcatttagggtctggttctgtcccaccaagattagattgggaaactaggatgagaatagctgtggaagctgcaaaaggcttggaatatctccatgaacaagtatcacccccggtgattcatagagactttaagagcagcaatattctgctggacagaaacttcaatgccaaagtttcagattttggattggctaaagtcggatcagataaagctggtggacacgtttctacccgtgtattaggcacacaaggatatgtagctcctgagtatgtttttcactcaatcatctctttgttcttgtttccatcagttaactttgataggttggatactaataccaatattttcaatatcttatgtcaggtacgctttaactggtcacttgacaacaaagtcggatgtctatagctacggtgttgtcctgttagagttactaaccggtagagttccagtagatatgaagagagctacaggagaaggtgttcttgtctcttgggtacgcgttcctttcacaaactgctcttgtgtcatttcttcttgtctttgctctaataacttaacttttcctatctccaggctttgcctcaattggctgatagagacaaagtagtagacataatggatccaacactcgaaggacaatactctacgaaagaagttgttcaagttgcagcaatagcagcaatgtgtgttcaagcagaagctgactacagacccttaatggcagatgtggtgcagtcactggttccattagtgagaaaccgtaggtcagcttcaaagcttagtggctgctctagtagctttagcttggctcggtctcctaactctccgggtaaagcaagcataggttctcaatgaataaatcaatcagagaagacgaaatgtgaggcttttattatgtaacggtatttactaaaacagacaatgatgtaaacacttgagtgatcaaacatggagtcatagagataatcatcaaataaactttttcgaatctctatgggctactagttattgggccaatcctgacccattactatattctacagagacgagaatgatattagttcatgagaaaaaaggtcacgtgagggaacgtgggcttgatggagaaaggagggtacaatcgtcattttgagtactcgtaaaatttgcttagaaccctagaaggctaattagaactagggtttatatagtttgccgcttcatctccgtttcttctttccgattcgtgttttcccgtcggccggagatatatcgcaaccctaatccgaaatggtccgtcgcagttaactcctcttctttggtttcacgttttttgatgtttcaaatagagatttgatgatatatattttggttgaattcaggcgtcggagaagaagctatcgaacccaatgagggacattaaagtgcagaagctggttctcaacatctccgttggtgagagtggagatcgtctcaccagagcctccaaggtttcacttttttttatctgttttgtctggttttcatatcaaccctgtgtgtatgctcgattttaatggaattagttcttcgataacttggtaggtgttggaacaattgagtggtcagactcctgttttctccaagggtaagttattttctaagttgtatcaattcatcgttcgatctctgagaaaatttgctggagatagttagtgatctcgactaaaacaggggcacgatgcttctgaagtttaggacgatgagttagtttttttgaaggtcattagttcttactttttggtgtatgatttttaattgttactggcctggatccatagataatcgtagtgagaatcagtagctctatcaattgttttgtatcaattgcttggaagatgattgtaactttgttttggatgaagagagttttgacataaatcttaacacttgttatctcttttgcagctcgatacactgttcgttcttttggtataagacgtaatgagaagattgcttgctatgtgactgtcaggggagagaaggcaatgcagctccttgagagtggattgaaagttaaagaatacgaactcttgagaaggaacttcagcgacactggttgctttggttttggtattcaagagcacattgatttgggtatcaagtaagtctcattctttctaacacatacatagaacaactttagagtggcttttgtgtaaccagtgatcaaacgtacggggtttttaaatatatatttgatctcaggtatgatccatcgactggaatctacggcatggacttctatgttgttcttgagcgaccaggttaccgtgttgcgcgccgcagaagatgcaagactcgtgttggaatccagcatagagtgacgaaagatgatgccatgaaatggttccaggtgaaatatgaaggagtcattctcaacaagtctcagaacatcactggttaaacaaatgtgtcaaacaaatagctatcatctgttttgttttttttgggttcaaatcgtattttctcagttttgttttgcttctctgttcttcagacattttgattttcctttatatattttgcgtatctactactccgacaaaagctgactaaaggtctaaaacacatttccgaattttcgatactccgacaggtaatgaacattctctatatctacataactcatccccaaaccgtaattttgtaaaataacactcttagttcaacaataatcgtttgtgttatgacttataatcgcattctggtgttatagttaataactgcgttatagtttttcatgaggtaaaatgcatttttacataaatttttaaacgaatctttgactatgcgtctatatgtttaatatttagaagacgtgtcaattatataattaccctgtgtacttgtacattatttaacataacaacaacttcaaaaacattatccaatcatgtttcattgtcaattctcagttgcatcagattcgagcgaattattgattggttcgacattaattatcatgatcagaagtgaccaaatcaaacatatacattacatacgttttgtgtgtgtaaacacgcgttacatacataaactaatcagaaaacctatacaaccagaaaatacaagttttggctccattctgacagaagaagttggagacaataatggagtaattaaactaataattatgacacaggcttttatagttttatctatttatgattttacaatttaataaaggactggaggaatcttgacttgatcccacacagatttattataagccatttccagcccaaatttctgtacacatttataaaatattaaaagtcatttgtctctagacccatatatattttttattttttatttttactttttatctcagatgaattgcagtttttatctggccaaattcatccacaaaacgtcatcaaatgtgacatattaagatagtatccatttgtcatgaaaagggccatgtcactctctggaaactttttggttaagatctcataacctctttctgttggatggtacgggctaaaacattaaagcaaccgattttcttgcataaaagcgatgtgaatctgttgtttttgtgagcttcatgtttttaatactaatactacaatagtattggactattggttccttctcatttttcgatataagattcatagcacgtttttatttttttggtatcaagattcattgcacgttattttttggacctctgatcacttattttttggaccagatttttttttgtttgctaattcggttaaacccatgtgaacttgttggtaaataatgaattactcaatgtcattttatatattagggttggtaacctctagcttccaatgaaaagagagttctcgcggtatgtaaacttcttaaaacggaggagtcaataagatcttggatggggatatatacgaaaaaactaagcttagcagagaataagagaacattgtacatcaagtttttaaataacagaaacttcttatgaaaatgaccttgacataagattcaaattaaggttaattttcaatggaatatagatttagtccaaaatggataaatcgtaaacaataagaagaaaataagtaagcatgatatacaagaataatatgtcacgttcacaaacatgatgcattttgggaaaattcactaaccttagcctaagaactactatcatcttaaccgatgtacagtttcacttaaaagtttaaactaattctttgaactttaatcgcattacaacatctctagttaggagttcatataattaaccagctttagatcattagatgggttgcaactaactttattccggaaattacaaaaatgagcataatgttttcttttttttcttagatggacagcaaaaaaataaaaagatcacagtctatagatcagatgcggataattataatatagatttgcataattatgcatggacttaatcaaaatgtccagctaattaaagaaataatttgattagcaaacctcatggtattaataaaataaaattccacgagagaagagaacctttcaaaaaataaataaactaatccactacaaaacaactggtcatatctttattcaaataaaatagcaatgaccgatataataacaatataatacctttgatatttgcctgcacgtccccaaacaagtagagaataataatcacatcaagattgattaaaaccctctcactaatcaccttcttaatcaccaccctctccggctctcaacagaacaacaacaaaaaaacagcttccgttgtcctgttccggcgaaatcggacggtcgagatcaatcatgcatcgtagagcagcaattcaagaatcggatgacgaagaagatgagacttacaacgacgtcgttcctgaatctccttcttcttgtgaagactcaaagatctcaaaaccaactccaaagaaaaggtttgtgaacttttttttggctattattacgaattgttttggaaaacaagataaatgatctgaaaatgttaataattgttgtgtagtaggaggaacgtagagaagagagttgtctcagttccgatagctgacgtggaaggatctaagagcagaggcgaagtatatccaccgtccgattcatgggcctggagaaagtacggacaaaaaccgatcaaaggctcgccttatcccaggtaaacagactctttttttaattaccgttgtgtcctttttgtcgttttaatcagcggcggcttagaaatgagaaagcgtagagtagccttgacggtggttgggctaacgtacgcatctcgtagagttttgttgaattacggacgcgtttgatatcgcgtgggtacacgcgccagctccttaattcttggggggagtttttgatgttgtgaacttgtaattaaggaacaattagagatgggtcatcactcactaattgaatttttctttttaactagtactagtattatatttttggataaccttgggggaagtgtgaaatattaaagtagcggtagatcttgatttctaagaaaaagccacaaaaggtaatgcgcacaaaaaggaaaagtattttacatatatatatatctacgtgattaacgtgccaatattataccattatctaacattttattcatttgatttcctggggttaattttagttttttctgtatcaaaaactaacaattacatctgttaaaaaagtttgaattatttgatcataaaatgttatgttcataactttgattatattttctaatgtatttttgctaaaagagtttaaagttaatcacttggagatgaaagttagtaactttagtggatcaatctcttttttcttctttgcaggggatattacagatgtagtagctcaaaaggatgtccggcgaggaagcaggtggagagaagccgtgtggacccttctaagcttatgattacttacgcctgcgaccacaatcaccctttcccttcctcctccgctaacaccaaatcccaccaccgctcctccgtcgtcctcaaaaccgcaaagaaagaggaagaatacgaagaggaggaagaagaactaaccgtcaccgccgcagaggaaccaccggcgggacttgatctaagccacgtagactcaccgttgctattaggcggctgctacagcgaaatcggagagttcgggtggttctacgacgcgtcgatctcatcatcatctggttcttcgaatttcctcgacgtaactctagagagaggtttttcagtaggccaagaggaagatgagtctttgttcggtgatctcggtgatttacctgattgcgcctccgtgttccgccgtgggactgttgcgacggaggagcaacatcgaagatgtgattttggcgccattcctttctgtgatagttctagatgagtttgtgtgtgtagccaaaaccaaaagaaaaaaacacaatttttttattttccactgtaaaggtgtatcaatggtggattcatttttttaaaaaaggaaacccaaataataaatttaatatcatttgagagaattcaagtacaattaaagattctagcggcgacgaggattaccgaaaaggaaagtttcttccattgctcttaccacagagagtagctctaatgtgaagagatcattcgttgtcatgtctccggtgagatttgatccattagccggaggagaagagtcttgttttgtcggcttgagtatgacgaatctacagacaggacattgtcctttggtctttaaccatggaactatacattcctcgtgaaacatgtgtttgcaaggagtgagcatcactgtttccttgggctcgaagtcttctaaacacacggagcatcttttgtcgtcttcttcacctgagagattttgagtgtttcttgagctttcgcttcccgggtttttgtttctgtagtataagctcaggcttctgagaagggtgctttttggaactgggttatatgtttcttttgttagatgtttgaggatctcgtcttcttcattggtttgtgatgatgatcttgagctgctctcgggtctagttgattggttgtgaacggcttgtcttagtgcctcgaggtgttgtcttcgcaggttgttgctgttacggattggaatctgatgccgagtatgtgatggtggtactaaatctctgccaagaacaatatataatttttcaagttctgaaagaggatgtaaagactatacttttgaaacaaaatcaaaaccaggaataatcagaggatgatgatttttagtacacggttgatgaaatcgatgttcttgagtaagcggatatgggatcatcgatcaagtgtctgttaactatctgaaagagaatattaaaacataaggaggctaaaacattcctaggtgtatatctatgacaagacgaaaagttgatttactgaattactcctagaccaagcattccgcgaagagaaagcaggaactcgccaacccgacgatcgtgtatccgaatcataactataattgggttgatttggaacagaggaatagccatttctgttgttgttcatagctgagaaggaatggctttcttgttacatattagggatatgataagtttttgtattaatgcagtttatattccttttcttgctttgagttattctttctccacttatatgattctctaaaagctgataaattaagcaacgaatctgtcctagtatgtgatgccatgccttgtctcctgaacaagtatcatacgcttcacgaatgctttgtcactttattgatctaacttgaaatggattcacaaaattccttcccttctcattctgctatgcttaacccggccaccaataattatatccaaaagtaactttactcgagaaagcacaagaaagattctacatttgtttggtcttgaaacaggggaattataattactcaaaacagtaataatcacaaatctctcgaaaaattttatatcaaagcacaatccaagatgatacagtatttcatctacatcaaatccattttatttgaagaaacataagtctgatgaagagagtaataacagcgcgaaggcgaaaatagaaaccgagcaaacacagaaggcacaaagagagagagagagagagagagagagcccacacctcagaaaataatgtctgaatccttctcagcaccaccaacaaggaagttacgagcagcgtttatcgaaatccctctctgcatagagatgtcttcaagaaccatttcctcagcaaactccttagcattagctgcctgtcgttcgacttccctcctcttgtatccctgaatcttcttcaacctgaagaaatcctctctctcaagctcatcaagctctcccttgatgtaactgattgtattctccagctttggtttcaccacattctccagagcgttgaccctacggttagtcgtcttgattgcttcatcaagggtcaagaaagaagtctggagagaagcaagctcaactagaacttcaatggctttcacataagcaacacggcaagctcggacctgttgaccacctctagctaaaccggtcaagtcattcttggtctcaccttcagagaagtgatcaaacttaggcagcttcactccagcgatattctctgtccgagaacgaaccttcaaagtagcttctttaacgttctcgaggacaacatgtttgacattgtcaccagcaacatactttacttcggtaagagcaaaagacgatgtcttcatcatatctcccatagactccttagctgtaacgattttcttgagaagtgccctaaactgaacagttaaagcatcactctttttcttgaggagagcatgacctcttgtagcgccaacaagacgagctttcataaccccgagcatagtaacagtgggaaccacattcaaacgcgcgttttggccagccatatttcaaaactacagcaaatgaaagagatgggattaaacaaggacacaaacagacttactctattgacagaagccaacaacagaagatgatttttcgatgatgcgaaacaatacttgcatcattgaggaaagagatcaacatggaaatctcgtaaattctggtttactaattataattgaacaaacacgcaaagattcttaagtttcactaggaaaatcttaggctaatgaaccaagcacccaatcattatctcgaacgatccatacagagattcatcagattatccattttttgttcccagattgaatcaaagtctacgaattttctaattgaatcaaagtctacgactttaggatagatcgtttcccagaagatgaaatctagatcacagaacacacctaatcaattggactcagaattgagcagtcaggttatatggatacacgcctaaatttcccaccagattcaattgtttcaaaccaaactaagagaagaaaagagtgagatttgggattgacatacctgggcctctcaaaaggtgaattcttaacaagtaaatcactgaaattagattggaagaagccaaagagagaaagagagataggaagacaatgaaaattgatattaattcagaactgtcgacaggggtaagaagatcgtattcgacctcgtcgctgtgatcgtggagaagaaagaaatgggctaattgtgtaattaaccgtaaatataaagggcttattttttacaaataaaataaatacgtatacagctcatcacgtatggtggggcctactttcgtgtcctaaatctgagacccatcactttcgtctttagacgcggtgaactatatatctcacgttcttatttagtgcttaggacaaaaacaaaactcggccaaatacattttttcatttccaagtttcagggatgaaatcttgttgtatagagtttccaaatggttgaggagaaaataatctctcattcaacactatattgtatgacatttttttaaaaggatatgatttggtggttaactaattattccgaatcaatgtgtgatatataaaaaatcttagaactaaagcaatgtgttatattaactaaagaagaataagaagatcttcttttagaactttcctcacaaaaggcacaatatctatcaaaagttatgtcttaatttcctataccaacttaattattagatggaattgattatagaaccactatacttaagatatgttttaaatcataaattttaaaataacagacaaacaaatgaaaaacaaattcaatagtatgtagattattgagtgttttaactataaggagaaagaaaacaacacacattgttgagaagacccttttggttttcgtcattattgctgcatatatgttcaattaccaatctcatcttgatttgttgtctactatcttcttactgtttcggttatatttaatttagatttgaactgtttttatcactttatgattattgttcaacatcatattcttaaaaacatgctataatacacaaatatttttattttattttgacaacttatacatacatagacacacacacatgtattactaactcgaggtcggatggggtttacccaaactatattttatataagcatatatattctttatatatatttgtatattcgcttggctttccgagtcaaatttcatattagtagtataggaacgagacttgacccagctaacgccttcttgatgcattcgaaatggaaacttgacccaactgatccaaatccgaatcacagcttggttctttctctcactgtctcgtaatgccttatccccgctccagtatagacctgtgccaaaaaaaacttttgatctattcaaaaactgcatatatccattaaaaattgtattactcatgagccaaaaaaagaagaaggttcaagtcattaatatatccaagagtgtatgtatctatgcataatgtataatctcatgagcaaaaaagaaaacttaattactcattgatctatcaaaaagtgtctttattagccatgagccaatgttatctaaacaaagtcacttatatattaaaggtgtattttacctgttggggtctcatgatctttgtgtcaggatcatctaaagactcacgccagtgtgacaagtatccagcgatacgtgatactgcggtgaatgatgatgggattcccattgccctgtgttttggcccatttcagttaccaacaaaaaagattcaaataaagaaagaactcaatggttacaacaactcattagtcagaatttgttagataactaatcaatgtcttacctattgattaatccagagtagaaatcaacatttgggtacagctttctcttaacaaaatattcatcagaaagtgccgccttctctagagcatctcctacctgaaaacattatttatacaccaaatattttcttaaaccaaattcatcatacatatgaaggattcaacaaggaaacgtgagcaacaagaatacagagtacctcaaccagaggatcccttccaagaatggagaacacttcatccgccagtttcttaacgacttttcctctgggatcgtagtttttgtaaatgcggtgtccaaaacccgacaacctcctcttcctggaataaaaagagttaacattaatggaatattgaccatcacattctaggtatactctctaagaattgagttacttattcttcacgctttcaatgaactctggaatattttcaacagtcccaatctctgataacatgttaatcgtagcctcaactgcaccaccatgaaggggaccataaatggctccaacacctcccgaaacagcagtatacacatcaccaccactacataaacagaggatttatgtgctgattaaaaagtatctcatagcagactcaaatgaatctctaaccaatgataagtagtacctagaggaaaggtgcctagcagcagcagtagagcagttcatttcatgttcagcttgcagtatgaagaggatgtccagcactcgagccaaacgaggattaggcttgtaagacctatctcccctgtaatcaatggaagatgagactaaacaagtgcacagttttatggctaccatctccaaatcaaacaaagagggacaataacgtacattgattccaccatatagaggaaattctctgaataagaaaggttgctcaaaggttgaacaggaggcttgcctgccttcctcaaataagcagctgctgcaattgttggggcctgcagacacgttatattataattcatagtccggttatacattgaggcaccaaatcacacagacagaacaatacctgtccaagaacacgaacaatctgtttatcacgaacttgttttgacttgtaaacacctaggccctgcaccaaatggggatttccatgtcggcgtggaaattttcagaagaaagcaggattataaaaacgtaacttaccataagagacggatttgcatcaggataaaagatggaaagtgcactcattgcagtgacaagagctcctactggatgtacatcattaggcatggactgtatcatatcctgtgaaaacattcagataaatcatctcacctcgaagatctagagaaagttaggaaagagtagaagaaactcaccaatactccttgtggcacagctgaattctgagaaatcgcaaactcccaatcagctagctgtctttgagaaggcagattcccataaactgcatgcaaaaacaaaaaaagcagtagtaaactagagcactaagggagacaaaattttaaagaaatacccacacaaaagcaagactatgagctatacaagatgatcaagatgatcataattaagcaacaacaatgagctatacaagatgatcaagacttacttaggagataagtaacctctgtataagtacttttctcagccaactcctcaactgggtatccccgataacgtaggattccctcatctccatcgatgtaagaaatcgaagatcgaacaggagccgtgtttaagtaaccaggatcgtataagttaagccccttgtcatccttccctgtcgttatcttcacaccaaacatgaaaatccatttatacacactcacacaatatacaaaaaacaatctattcgtagtactaatggccacaatgaagaaataacttcagcataaaaactcattatatataccttcttgagatcaacggttttaacggtaccatgctctgagactgggacctgatattcattccccgtacgctcatcgacgatcttcaaatttcctttaagcgatccatgcggtgcagcggttatgtgagccgatgtgcaccatggttcgatcgctggcaacacctgattcggctcagatactgtcaagtgcgcattgagaacggctaatcgagctctagctctctccgaaatctccatttgtcacctcaaaaagatcacaattcaagaaagggaagcgaataagaaaccaagtggctgttgtagttcaaagtgatatataggcatgcatggttttatagtggggaaatttgataatttcattacgtaacacttttgtcttaatacttttgtgggtatgattggcgtgaatctacagtgtcttctttgtcttcaatcagagttttgtggcttttaaccaattttaagtatgtgtctctgcgacagttatgtattgttttggttgcttcttacttctttctgttaatcagtgtcaggtactccagggtttgttatttaacgtcacttttcttttatatttgttcacacttctcacaattgttctcatttgaaatggaaatattattggcaataatgcaaaatgataggaaactttcaggcaaattataaataccgtacaaaaaaatatgatatgatgttcaatgagtggttagcttattgttatcacttggaatctgcataacatattcaccctaaaaataacattcagttaatcctaaatgatatgatttggtggttgacattttccaaaccaatgtgttagacatgtcttcagaaattaacattaacaggaataaaagcgcaatttatcaaaagtacatgtcgttccctataacaagattattattattaaatcataacattttaaaataacagacaaacaataagaatagggttgtattattaagtgtttaagaataagagaaagaaaacaacacatgttgttgagaagactctcttgttttcccagaggtatcccaatgttttcttctttattggtgagtattaggattgagactaaagggcagatgatccagctaaacgccttcttgatgcattcgaaatggaaacttgaccaaacttatccttatccgaatcacttgataacgttcgttctctcactggctcgtaatgcctcatccacactccagtataggcctatatgcagccacacaattcagttagctcaaactataaaccttttgatctatcaaacaagttatgtattttacctgttggggtctcatgatcctagtgtcaggatcatctaacgactcacgccagtgtgacaagtatccagccatacgcgggactgcgaacaggactgtgaagaattctggtgggaatcccattgccctgtgtttttcccccatttcaattaccaacacaaggttcaggtaaagaacttaatggttacagggtctatgtcagatgaatcagcaatgtcttacctatagattaatccagagtagaaatcaacatttgggtacagctttctcttaacaaaatattcatcagacagtgccgccttctctagagcaactgctacctgaaaacatcatccgtcaaaacaaaatttaacccacagtcatgttatataagaatttttttgacaaccaaatactaggagagatacgtgagcacaaggatctacagtacctcgatgagaggatccctaccaacaatggagaacacttcatctgccagtttttttataacttttgctcgggggtcatagtttttgtaaacacgatgtccaaaacctgacatcttcctctttctgagaacatagaaaagggatataacattaccggcatgactcaccacaattcagagtacttggtgcttgtagttattaagcattgagttacctgttcttcacgccttcaatgaaatctggaatattttcagcagtcccaatctctgctaacatcttaagcacggcctcgttcgcgccaccatgaagtggaccataaagcgccccaacagctccagcacatgcggtgtacacatcaacaccactgcagaaacacaatactgatttaaacactcaaagaagtctaaatgaatatctctaatcagtgataactgataagtacctagaggcaagatgccgagcagcagcagtagagcagttcatttcatgttcagcatgcagtatgaagaggatgtccagcactcgagccaaacgaggattaggcttgtaagacctattgcccctgtaatcaattgaagattaaagaatgtatcctgtgttacagacacgtttgaagcttgaaacagatttaaactgactaaagaaacacagtttttctgactacccttttaaaatgcaagtgttaaatcaaataaagacagaagaaagaggggaaagtacattgaatccagcatatagaggaaattctctgaataagaaaggttggccgaaggaagaacaggaggcctgcctgccgtcctcaaataagcagctgctgcaattgttggtgcctgcaaacacgttgtaaaccctttttctagtcccgcaacttatacacagatacgttaaggaaacaaatcatcaacagatagaacaatacctttccgagaatgcgaacaatctgtttatcacgaacttgttttgacttgtaaatgtcttggccctgcacccaatgaaagaaaatcgagttggcatagccattttcagaaaaaggcatcttgacagtacgaaaagaacaggatttcaaaacttacactaagagcaggatttgcatcagggtgaaagatagaaagtgcactcatggcactcacaagaactcccattgggtgtgcatcatgaggcatggactgtatgatatcctgcaaaaacattcagaaatcgtctcagatcaaaaatccatagaaaattcttttactaagcatatacacataactatattcacaacggcgagtaagacataaggtactaatactagaaagagatccagtatccttaatagacatggtttacaagcaagacaaacaacttgtacacttgacaagaaatcattttcaaaatccctctttggtttggatttgcattctgatacaaagtttggaatttgcactagtatgaaaatccaaataacgaaagagtagaaatttcaccaatactccttgtggcacagctgaatgctgagaaacagtgaactcccaatcagctagctgactttgagaaggcagatttccatacactggagacaaaaaaaggggaattttaacacgacactaagagagacacaattttcaagacattttcttttccacaagtagacgccacaaaagtaaaataagcaacaacaacaacaagaataagcaacgagattgataaagacttactgaggagataagcaacctcaataaaagtactgctctcagccaactcttcaattgggtatccccgataacgtaagattccttcatctccgtcgatgtaacaaatcgaagatcgaaccggagccgtgttcaagtaaccaggatcgtacaacttcagccccttatcatccttccccgtcgttatctgcacaccaaacatgcaaatccatcaaattccttatcatattcagggaaaattaggtgagacgaatcaaaattcagataaaactaactcgattccacaattctgttcaggattacaaatccgttacataccttcttgagatcaacggctttaacggtaccatgctctgagacagggacctgatatttcttccccgtacgctcatcgacgatcgtcaagtttcctttgagtgatccatgaggtgcagcggtaatgtgagccgatgtacaccatggcgcgatcgccggcaacacctgttccaatccgacggtatcagacaccgccaaatgcgcggtgagaacggctaatctagctttcactctctgcgaaatctccatttcttcctctcaaaaaattttaaaaaaaatatctgaattcaatttcaaaggaaggaagcgaagaagaagaagaagaaacaatcttgcggtaagtgacttggcttttgtatcctgcatttgctaattttggtagtagctgatatttttattctctgcgggtaagtgtattgaaaatcggatccattgtttatccaaagctcgacggtgataagattattcagcttagatcaacggatagaattgttcgtcaaaaactaatatggaaagtctaaagaggcttatctgtcaagtttatcaaaggattaagactttcgtttctgaaatccacccgggcaagggcagtgaagactacgcgctcaatgagaatgacaggtggaagaacacgagcgagtgtctttcagacgctatgtagatcgagtagaagtcgattggcgtcctcggattgctaaataactatctggttttcgataatgggccaactcattggtctcacattgagaaatttaatttccctaagtgtattgatcggcccattagctctttacgcctgggctgatgacaatagtaataagaacaagggaaatggtccaatatctttgcagttaaaatttatgaacatatggaaattttatatttgtagcacaaagattcaccagtaagaggctggtaatacactgcattgggtcacaacgggccggtccattaaacccaattaactcttatgtatgagaaggaacttaaaaccccattcagtttttgatggacttgtgaacgctgctactaaaccaaggtcacttctcagttctcacaacacatatgttatgtttgcaaattaaatgcagttttataatttttagtatttaactgactatcccaaattattttcaaaatatctttgaaatttaaaaagtgattcaattatgaaacctccactcacacttttgtaccatcctttgcttttgcactaatcaaatttatttgtttgttcagttaaattgttcaaaaaaggagaaagttatgtccaacaaaaaagagagaaaaaaatgcaattagccttttaataaaaaaaggagtagtaattacaaaaaaaaatgaagtactgtagattatgatgagtagggaggaggaaaacgagtatgatacttcacccgcattaagaggcaaacccttaaagcctgctgattggttgggacttttttttctacttttctttttcttttctgttgctgccgttacagttccatttacagctcatattgcttgcggcagaaaattctcaccaagtcctctgttgaacatgacgattaagcctaaatcgccggcgagattcaagctaggtaggcagtcttcgcttgcgccggaatcaagaaccccgattgatacgttaacggaagatgaggacgacgacttggctgcggcggctacagctgggatcggggatccgacgattcgtttaatgtatttagccaacgaaggtgatatcgatggcatcaataagatgcttgattcgggtactaatgttgattaccgtgacatcgatgcccgtactgctcttcacgtcgccgcttgtcaaggacgaaccgatgtcgttgagctgctgcttagccgtggtgctaaggttgatacgaaggaccgatggggtagtacggtatgaattcgaactttctctgggctgaattttgtttgctttgcctgacttgacttctcgtagactctttagttcgttttgtgttcgacgaattgccgcacaaatcatatgttttactggagcacttagatttagcaaactcggttgcaataacagtgatggttaacaatttgtgattgatcttaccagcctcttgcagatgcagtgtattacaaaaatcatgatgtgattaaacttttggagaaacatggtgctaagcctacggtatgtgtttatccctcatagttgcattgatggatgttttagtttctgaatgtttggattgatttctttaataatcgtttctgattttagattgctcctatgcatgtcctaactgataaagaagttccagagtacgagattcatcctacagagcttgatttttccaactctgtcaaaatttcaaaggtaagtagttcccttgcccaaatttatttgttgctgttttcacttgcttttatttgctgttcacagttgtaattactgtctgtctgctttacagggtacctttaacaaggcttcatggcgtggaattgacgtggctgttaaaacctttggagaggaaatgttcactgatgaagacaaagtgtgagtctacatccattgatttctttgtattattgtattaatcatgctctaaaggttttcatatccttctggtatccaggaatgcatttagggacgaacttgcactgcttcaaaagatacgccatccgaatgttgttcagtttctaggggcagttactcagagtacccccatgatgattgtcaccgagtatttaccaaaggtcctaatctttctcaatctgaataaccacattcagaggatgtatgacctctccaggtttacaaattatcatcttagattcaagatccatcatgaacactagcagttggaatcctataaacattctggtaatacttggttgagtagatcttaagaagcttacaaaataaactgacaacgttttgagctagtcctttgtttacctcgacagttagttagatatgacatgaagaatggctttgatatttaattgttgtttaagatgtttagatcttaacctctgcaaactgctgtgtttcatatttcactgcataaaatctatgcttctaattattaagtgtttatttctagggagatcttcgacaatatctagacaggaaaggacctctaatgccagcacacgcagtgaagttcgcccttgaaattgctaggttaagtggctatttcctgtacttttatattttcctcatagtcatgcaggttcatattattgcattaccggtggcaatgatacatgaattctgatcgtatggcttctgattatctctatggtatcctttcatatatatatgcaggggaatgaattatttgcacgaacataaacctgaagcaataatccattgcgacctagaacctccgtatgtattcctcttgactgtatccgtataatttatttcattacacaatttttctattgtactatgtttcatatatccaaaaggttctcatttgttcgagtaagagaacagaaacatactgcgggatgattcgggacatctgaaagttgcagactttggagtcagcaagctgctggtagttaagaagacagttaaaaaagacagacctgttgttacatgcttggacagttcatgtaagtttctttaatctgacgatcttaaaaattcctctgtgaagttgtgtatgttcttgtcttgagctagcttagagctgttagctttaatgttttattgtctaaagctaaactacaaccaatctaatggttattttggaagggtctatgctgatgttactctcttttttcgttctggctaagcagggcgatatatggctccagaggtttataggaatgaagagtatgatacaaaagtagatgtattctctttcgctttaatcttacaagaggtaaagtaatcgagagagctattaagtttttctattcatagagtaaaaatcctccggcttaaacaatttataaacagaatgttgttttgtgggttaacagaatgttgttttgtgggttaacaaaacctaacagatgatagaaggttgtgaaccatttcatgagatagaagaccgcgaagttcctaaagcatatattgaagatgaacgtccaccattcaatgctccaacaaaatcatatcctttcgggttacaagagtaagtttgtcgaaaaagtgtcctgtttttgaaaccaacattcgttcatggctcctctctgaaagtcttaaaatctctatctatttgccaggctaatccaggattgttgggacaaagaagcatcaaaaagaccaacatttagagtaatcatctctactttggagttgataagtgatcgaattgcacgcaaaaggagctggaaggttgttattcattcgctatctctcccttacatacacacacacacgcgcgctctctttagtattttaagtatctgagactgtttgatggtaattactacacaggtgatgctaggaagatgccttccaagattcagattgtttacaaagcgagattatgtgaatcccggtggtagtaaccgctcatcaggctcattcaacagatgagtgactgcaaagagctttgggtttgtttttctttaattgccttaaaaggatgaaaaaatgtcaaatactttttaggtcttttgtatttatatatgacatcatgactgtttttcttaaccagaatgaacacggtggtgtgtattattttttacgcagtggcgaagtaaaataatgagatctctgagctaattctcgagttatttagtgtaattagtatctgaataagttgaagacgttaaattactatatttaaatcctttttttttgttgcgtgaaaaaaagaataggaagacctcgagccaataaaaagggtatacagtagggcgataaaaagtgtaaaagagtgtcttgtagaaaataagatgaggtcaaatcgagtcgtcctttttttggtatcagtagagtactttcagtcttacgtcaaatcgaatcagtagattttgactttttgagtaatgtagatactagtactaagctctgaccatttaaattatttacagatagactagaacgtcgtagttgttggggttagttgaagaaggcaagcgcgtgtggcctaatggttaagaaattaagccccctctcctctttcgctttcagttccatcaaaaagctgtaaaataataaatacggaagtaaaagcgcaataagatagagagattctccgagcgggaaaactcttgaaacctctttttctcatctctctatctacactttatctttcatctccttcatcgttctcttctcaagatatcgattccttcaactttgtctgatccatggaggttgattacggtggattttctatcaggtgatttggtcacatttctttataatatctttgatttttgtttataatgtgctgcattggcgagttttgaattttttgatttggcgaaatcgcagagagtacacggagaaggtaaggagtgataatgaacgaaaatgctggccgttcgccggagatcttattcagtcttttcttcctcccattactgtctccaagttccggtggtggtcgcatgagcttgcttctctgcttacgaaatctccggtctctgttgatgattctgatccgtcctttcgtcggaaggccaaagcaaagactagacagtgtaaaaagcgctccatcgtcgaaatttgtgcgacggcgccgaagatccagttagcagaagattatgtggtgcacaagaagaagatcaaaaccacgaaatccaaagattccggtgatcgggaattcactaacaaggttcttatacaaataacttttaaatctatgaaacttattatagatgatgtcaaatctctggagacgtttgtgtaggattaaactcgatagtcaatacttaaggagagcaaattataaaatcttcttatgttgcaattttctaaatcaattggtgcttctctatgttccattggctttgcattagttcattagtatgttatgtgaagcatccgtgtatactaacactagtgaatcggtgtcattgtatcttcaggttaaccaatgcaaagaacaaaaagtggatgatattggaaaatgcagtcttggaattaaagaaagctctggtgttatgtctcttagtagcaagaaggctggattagtcagtaaagatcatgattctgagtttcagattcctgcaattttcaaggcaaaacggaaagtatgctttgcgaggagtcctgataagtcaaaaactcatgtgaggttctctgatcaaagtgggaatctttctcagctggagaaaagtaccgtctctttacaactctgctgtttggaaatgaataggttgagtctctctgaaaatctttctcagaggaagaatcagtcatctgtaaatgacaagcaactgaaggttatgtcgactgatcagactagtacagttatgcatttggaaacaaggcaacaatacaagtttcagcctgcggtttcaaaatctcacttgtcttgtttccttggaccacatcttagttcacaggaaagagtaacggatgcattggatttggagagaaaggaatatgtggctcaagctattcaatcgtttatctctacttcgagtgagactccgtacagagcttgtccttctttttctcaacctgtgtcagctgatatgcaccgcgggacattgctgtaccaatcaccttttgatccacttcctaccgaatggatgcaaaaatcagttttaaatagacaaaggcatgtgggagaggcgatcttagggttccctctagatctacagggtgacctagttgatgcgaatggagagacttgtagaagttttgatcggtcaggtttatgtactagtttctctaaatctgcatctacaggtaatgatcttttacttggaaatttagtggaattttccagtgaaaagaagcatttaattgaggcagcacttgccaaagacaatgcaccgcttaatgagaaacgccacaagtactttcctgctaggttaggccttgatgagaccttcacagagaaagcatatttaacaaacactaatgatggagagtgcggctacacaccggtttctgaagtcaatccgaggagccacgcaatcaatatgtcaaagcgtaatggtgtcaaacagaacctaaatagcggaaaggtgattttaaagcgtgatgatttgtgtttacaaaacactcaagcaacaatgcggctgatgggtaaggatgtttctgtcagcacaagttactcaggtatgattagaacgggtgagaggatcataggaccggatgcttctatagattattcctctctggggacctatactcatcaaagctgggtatgtcaaaggacaactcttgaagtttcagagaatcattcaaccacaatattggataagaattggaacaaagctctgctacgtgatacttcaaaagatccctttcctttgttttgtgaaccacttgtcagcttggcttctcaatccagagcatatgctgttcctgattcagaatttccttccacaatcctgaatccatgttgctcgctcgcgtcttttcctttgtctgagaagaatctcaacttccatgggtctggtttagggccaccaaacagtttcacactcagccagcaacaactaccttttccatatgattataacaatgttgatattggtctcctacctgatgctagaaaacgatctttcggattgcctttatcgagtacaaattctgctagacggtcacagactccttgggctcaaagttcatctgagaactcttgttctgaattgtctttcgtcaaccccagcgagcaactaacgtccttctatgggtcaaggttatcttcgtccataaacgttggaactacaaataagcgggtagcacccgtagaggagtatccaatgaagaaccataaagtccccaagttgctgccaatgcaaggtggcttaaattatgttaaagaatttctttgcaggccagcaaattaggaaatcactaatctaggagtctaagggtatatagccttgtattgtttgaaccatcccttgtgtgttttatgaattatttggtgttagtgccttactcggaatgaattgttgtacatgattgccttgtttaagtcgtacaacaccaaaagcttctagatccgtataagcatgcgagtcccctctagaaattctgcgtttgttctgtatactactatgattctatctggaatatctggatcatctagctagcaattaaagaacataaatcggcatcaagataaatttgttcttagtgtcatgtatcaatttggaatccataaacattcttatatgcacgttattcaagatcaccaggaagaatcttgagtgagatagtaaaataaagaatatactccaacagacccaaaacaaaaaaggatcaaactgatgcaaagaagatctgattctcatttggtcttttgtttttgggttttatcctcatttggtctttcttcacaaatccttacttatgtgtctcatttttttcatttctgtgtttttatctaaaacacttttaaagaagtttttgaaagaagtacttatatgtgacttttttattaaaaaaaataaggtttctcaatttttccctatcaaaagaattggaatctctagattttagataaaacttattatgcatatataaaaaaaaattaaaaaaacaacgcatttagactttgcagtagtcgagatgcatacaaaattaaccagaagttgtattcagcagtggtcaatttttttataaaaaaagaaattgccaatgattaaactgagagcttgttacccgttagagtacttctaaatggctttaaacttgcatctaacagaaattaaactagagatattattagctggtgaaaataaccataattttttcccgcaaagatgaaacaaaacataagtccttccaaatgtttgaaatgacttggcacaatttaagataagttttgacttttgactaaatgattaatagtaaatgcaattactaattacaacgaaagacagggaggtatggaacaaagagagtttccatttgtaaacgaatagttaatgtgaactgtgacaagggttgtggatgattatgactattcgtatgattagtcaccattccttaatttcttgttccctcaattaagttgtcttctcatcatttttttttaaaatattcatcctgaatataaccaacaaacaaaaggttcgagtatctataaattccgcaatgcaatctaaattggactactagtgagatctgcaacagtgaaaagagaaaacaaaatggacttgaagaggttttgacaatgccagagataatgcttattccctaatatgttgccagccaagtgtcaaattggctttttaaatatggatttctgtatcagtggtcatatttgtggatccaacgtattcatcatcaagttctcaagtttgctttcagtgcaattctaattcacacgtttaactttaacatgcatgtcattattattacttcttcactaagacacaatacggcaaacctttcagattatattatctccataaatgaaataattaacctcataatcaagattcaatgtttctaaatatatatggacaaaatttacacggaagattagatacgtatattagtagatttagtctttcgtttgtgcgataagattaaccacctcatagatagtaatatcattgtcaaattcctctcggtttagtcgctaaattgtatcttttttaagcctaaaagtagtgtattcgcatatgacttctcgtcctaactttttttttaattaacaaaaaaatcgaaaagaaaataatctgttaaatattttttaagtactccattaagtttagtttctatttaaaaaatgcttgaaatttgacagttatgttcaacaattttgaatcatgagcgatgtctagatactcagaatttaatcaagatgtcttatcaaatttgttgtcactcgaggacccacgcaaaagaaaagactaatatgatttttatttggtctggatatttttgtagaggatgaaactaagagagtgaaagattcgaaatccacaatgttcaagagagctcaaagcacaaagaaaaatgaagatgaaggactaaagaacaataagcaactacttataccctatttcccataaaggattcaggtactaggagaagttgaggcaagtttcacatgcaagtccctgtcatcatatatccatattataccacacctacgtctctatgtgtatttcttggcatcgactttctcatgaatgattcaaattttcatttatttttacaatttaattcacctaagattattatgcatttctcatcattggtacattttctgtatagcgtatttacatatatgaaataaattaaatatgtcctcacgttgcaagtagttaatgaatgtccccacgcaaaaaaaaaatccctccaaatatgtccaccttttctttttaattccaaaattaccataaacttttggtttacaaaagatttctagaaattgaggaagatatcctaaatgattcatgaatccttcaataatctgaagtttgcgatattttccgattttcttcaagagttgcgatatttgtaatttggtgaccttaaaactttttttgataaagagtaaaacgttttttcttaaaagtaaaacttgattttatgttttagggttctagctcaactttgtattatatttcttgcaaaaagagttcgttaactgcattcttcaacactataaagtgattatcaaaaacatcttcatgaacattaagaaaaacaatatttggtttcggttagagcttggttttgcttggcttgattcacatacccattctagactttggcataaatttgatacgatagagagcatctaatggtaatgcagaagggtaaaaaaggaagagagaaaaggtgagaaagattaccaaaaataaggagtttccaaaagatggttctgatgagaaacagagcccatccctctccttttccccttcccatgaaagaaatcggatggtcctccttcaatgtcctccacctactcttctcttctttctttttttctttcttattattaaccatttaattaatttccccttcaatttcagtttctagttctgtaaaaagaaaatacacatctcacttatagatatccatatctatttatatgcatgtatagagaataaaaaagtgtgagtttctaggtatgttgagtatgtgctgtttggacaattgttagatgatctgtccatttttttcttttttcttctgtgtataaatatatttgagcacaaagaaaaactaataaccttctgttttcagcaagtagggtcttataaccttcaaagaaatattccttcaattgaaaacccataaaccaaaatagatattacaaaaggaaagagagatattttcaagaacaacataattagaaaagcagaagcagcagttaagtggtactgagataaatgatatagtttctcttcaagaacagtttctcattacccaccttctcctttttgctgatctatcgtaatcttgagaactcaggtaaggttgtgaatattatgcaccattcattaaccctaaaaataagagatttaaaataaatgtttcttctttctctgattcttgtgtaaccaattcatgggtttgatatgtttcttggttattgcttatcaacaaagagatttgatcattataaagtagattaataactcttaaacacacaaagtttctttattttttagttacatccctaattctagaccagaacatggatttgatctatttcttggttatgtattcttgatcaggaaaagggatttgatcatcaagattagccttctctctctctctctagatatctttcttgaatttagaaatctttatttaattatttggtgatgtcatatataggatcaatggaggaaggtgggagtagtcacgacgcagagagtagcaagaaactagggagagggaaaatagagataaagaggatagagaacacaacaaatcgtcaagttactttctgcaaacgacgcaatggtcttctcaagaaagcttatgaactctctgtcttgtgtgatgccgaagttgccctcgtcatcttctccactcgtggccgtctctatgagtacgccaacaacaggtacgcttctcctactctatttcttgatcttgttttcttaattttaactaaacaagatcctagttcaaatgataacaaagtggggattgagagccaagattagggtttggttaatttagaaaaccagatttcacttgttgatacatttaatatctctctagctagatttagtactctctcctctatatatgtgtgggtgtgtgtgtaagtgtgtatatgtatgcaaatgcaagaagaagaagaaaaagttatcttgtcttctcaaattctgatcagctttgaccttagtttcactcttttttctgcaaatcatttgaacctgatgcatgtcagtttctacaatacacttttaattttgacggcccatcaaatttcctagggtttacttcagtgaaaaaaattgggttcttgacacgatttagcatatatatataaaaataggggatgatcaagacttatgtaacctctgtctggtgaaactagggacaaagtctactgatgagttgtcactagggatccatttgatcatttaatcccaacaaaaatgaaacaaaattttgagaatttatatgctgaagtttttcaaccctcttttttaaataactttatattatgtagatttgtatttagggtaatttgtccaactagaagtcctaaaaatcaataaacacacggatgactttgtctaacattgttatcagtcatcaaatgtaaaattgtacaaataatgaaattaaagatttagtctcttttattttttttgtttagggtgtatatatatatatatatgtatatttgttgcattgatatatcaatgagagggagagaactcagagaagtgtcggaaattaaaatggtacgagccaattggaatctctggcattctgagcttcatttatttgttattagaaaaaaaaaaaaaaaaaagtcctttaaagataccttcatgatgacattgaatcatgtaatatacacgatacatggtctaattcctcctcaaaccctaattaccaatttcgaaaccataatatttactagtatgtttatatatccttactttaagacattgtttgtttataataccttgtgaattaagaaaaaaaaaaaaacttgtggatctattcaagccatgtgttagaataaatttataaattttctcctcgtactggtcagatattggtccaaactccaaagccttcccttttcaggaaaaaaaacatttcgaaattaactctaattaatcaagaatttcctacaatgtatacatctaatgttttttccgcgatcttacttattagtgtgaggggtacaattgaaaggtacaagaaagcttgttccgatgccgtcaaccctccttccgtcaccgaagctaatactcaggtaccaatttatattgtttgattctctttgttttatcttcttcttttcattatatatatgatcaacaaaaaatataacctacaaaaagagagagttcttggaaatgcattgaaacggtttcgttatggtgtttgaatacatggatttttgaagtactatcagcaagaagcctctaagcttcggaggcagattcgagatattcagaattcaaataggtaattcattaacttttcatgaactcttcgatttggtattaggtcacttaatttggtgtcggtccaaaagtccgcttgtagttttctttagaagttgttttgtttaatgttcatgtttacaaattgaaggcatattgttggggaatcacttggttccttgaacttcaaggaactcaaaaacctagaaggacgtcttgaaaaaggaatcagccgtgtccgctccaaaaaggtaaaatctacgttgctctctctctgtgtctctgtctctctctctatatatagtcccttagtttatatagttcatcacccttttgtgagaattttgcagaatgagctgttagtggcagagatagagtatatgcagaagagggtaagaacgtttctcccattccaagtaattagatctttcttcgtctttgtgagggtttgagttttcccataaatcatgtgtaggaaatggagttgcaacacaataacatgtacctgcgagcaaaggttagccacgttctgttccaaatcttaatctcaatatctactcttttcttcattgtataactaagataacgtgaataacaagaaaacttttgtttttgggtttaatagatagccgaaggcgccagattgaatccggaccagcaggaatcgagtgtgatacaagggacgacagtttacgaatccggtgtatcttctcatgaccagtcgcagcattataatcggaactatattccggtgaaccttcttgaaccgaatcagcaattctccggccaagaccaacctcctcttcaacttgtgtaactcaaaacatgataacttgtttcttctcctcataacgattaagagagagacgagagagttcattttatatttataacgcgactgtgtattcatagtttaggttctaataatgataataacaaaactgttgtttctttgcttaattacatcaacatttaaatccaaagttctaaaacacgtcgagatccaaagtttgtcatacaagattagacgcatacacgatcagttaatagattttaagtgccttttaatatttacatatagttgcagcttcgattagatcatgtccaccaaacactcacaattagagacaagcaaaactataaacattgatcataaaatcattacaacatgtccataaattaattatggattacaaaaataaaaacttacaaaagatctataatgtgataaattaatgtgtagctataattaaacaaaattacattttttactatagttactacttgagataatgatctcaaaaagaagcttcatacgcttaaagtctaatttgatactgtcctttatctaaattactgtttagtatatggacatgagagaaatatgagcagaggctgaaggcttaaaccttcttccctctgttctctcacacagccgcaagtattggcttcatcactcagttttctcttttctttatatttgttttctaatctgttttttagtctcagttcatgattttgcattttctaacgaagatgtcggaggaatttacgtatctataccaaagagatcgtacctcagggttactgatctctagccacggttttgctggaccgctgaaatgtaaaaccgaagcagatttcagaatctcttgaggggattttacggatcgagaacctagtccagcgacgtgccatgatggttcaagagactgtgtaagtcctttgaaagcaagtaatgtcggtggtaaagcccctggttgccataattgtagtcctgacctaacactctgcattaaaattaaacatcagaatttgtgtaactagttagagtacggaatacataacgcaaaaactgagatcgttctatatttacactcacgagtcttagccatgtagagtaagcttcagtaatattggtttgtctccaggctttgagatcaaagacattcataccagaaagccaagcacagtcttcttgaactaagtttgatgagatcaaaggatgtgagaagttgaaatagtctttgtattttcttccggggcaacagttgtctccgcaccacgaatcaacgacagcaccaacaactttaccgttgagatccgtttcccataaagacgaaagatcgctctgtactactacatcatcatccaacaacactatcttgttgagatctggaaaaagctgcgcggtccaacaaaaagaagattcgaaatgataaatggaatggtttttaagctcagagaagagttgagaggagagaaactttaccttgggaatgtaaatgcgaagatggttcaaaagggcaaggcagctaggatttagagcttgcaaggactgctcatgagtaccctcaacaaaactaaaatcagagtctttcaaattttgataatgtcgtctccaaattaagcggtgaatgtccagcatctctctaactttgaagttcacttcttgaggccaatcatactgatgaagtccctttacttcaacaactggtgatgaagcagagttgatagcaaaccaagcatgcataggggtataggttttcttatcggtaacaatatgaaagacaaacttctcgggattcacagcgttttgtacagtagacgatatgacgacagaggcagcaaggacattgtcagtcaggaggacaatatgatgaaaagatgggtcggtcagacgtgatacggactcaggcggaggcaaacgcattcgagccattgcatttacagagtactcttcagttaatctgagggaaaggcaatggaggcttttaggaataccgtgagaggctaaatgccagtacactaactcatgatgtttcgctgattggactttacgttccatctgcaacagctgaaatttaaagtgaacaaagtgtcaaataaatagaaggggcagagcaaaagtggaaatactccacttagctagtgagatattaagttctattcttgagtgcttgacatagaagagaataagcttttgtcttctcagtactagaagatttatgtctgataccattaatagacctcaaaaccaccatgtcattgtgttaaatctagacactaataatctcaatatgtcttagttttaaccttgtagaaagttcatcatctatgatagtgaagtacaagacacgacaatgacatcatttaggaaataaagctagaagggcataccatcttcttagtcacggaagcaaacgcccttatgtcacggcgttttaacgtcatctccttaacaaggtcgtcgaatgactccaatgatcccttcgttcctcttccattaacgtcctgatgatctgtcgtctcttccactagagcccgtgtcaactcttccccaattttctgaaagagacacaaacacgcattttcttgccgtgtgagttataacaaactaataagctgtcataataatgtctttacatcaactcacgacacaaaacaacaaaactgcttcaacagaaacagtgcaaatggaaagcgtttttttaagtcatgtattggaattattcgtctgtctcgtttctctttgttcctgtttgttgctacgtataaaggagaaagcaaccaagtggctatgcactttctggtggcagcaaaatctgccacgtatcctgtcagaaaaaaactgagtggaaagttgaaactcctacatctaactaaagtttactacattggttatggcatctatagtaatccatacgacgatttttgtttttttcttattcactaaaacttaaagttccctcaatgtagctgctaattacactctctagggcatgctatgttctaaataaaggtaaatagttgataagaaaccacattgtgggctcgtttccgacaatctcacatgttgacatcagatcaagctcgaataataacaaatgaatctatcaaagtaaacgatacacgaaaaagtcattgcgtggatagaaactagagcaaaatcacaatccacaaatcagaaatcagtaaaattcacccttatagactatttcatctctctgttcctagacaatgacatagatgataatgatcacggttttacatattttttaccccaccaggtccaagaggcaaagctcatctcatcactcactatacgacactagcaacactaacgtaaaacagctggcaataacttttttttttttgggttcccatacaacaatcatatctttcttccctttaatagcagcactatgtgcaagtgttgagattttttcctgtttcccattgattttaaagttaatgattacaactaaaccaaaatcatgaaatgaaaatatcttaaattaaagtacctaggtatataacatttgccgacatcaaataacagtgaagaaagacgttttaaattaaaacttttaatacacttgacttgaaaatgtactattcattagtattagagagtaaatataataaaagcttaccagagatgtgtcgcccccacggaaaagtctgagtcccatgcaatctgtgaatacagagtcaaatgaaaaaaatagtgttattaaatctacgaatcatacgaaaataaataaatacaaagaagaacaaaaaattaaagatgacaagcacatagcattcaatacgaacgaagaagatttatccatatcaataatcattaactgaattcacactttgaagctatctgaatcattcatatccagaaaataggtagatttgcaaattaattaccaagaagatactaaagtaagaaacgattaatcaaaatttatatggaatctaatactatgaagaatgagtgttttactataccgagtggtgaatcgcaaacggaggcagattcgaggacgagaaacgcgaacctgacgaagataaaagggaggacgatagcgagcagcagcagcaacagtaacaacgtgcgactagagaatctccgcgctgctaacgccgccgctgcagccgcacatcctccgcttcctttaccgattccgacgccgggatttgatatcgtaaccttcttaatccccgtcgctgatatgtaaaacttcatttcttcacagtttccctaactttctcacaacgtttcttcagttccatcaatccaaaacagtaacacacggctctgttttccagatctctgatctccactatcagttcatcaaaaacaacaaccaaaaccaacagggatcgagaagaagaagaagctcaatgacgaagatgtgatcaaaagcaaaacgcgaatccagtaggtcgagagggactgtttggtttttgatctgtacgacgggaataaaaaacaacattcaaagaggaatgaatttttctaaagaagccaagcggacatatgcttaccaaaataaatgcatttttgtaaaagataatatttcaccaatattattcctatcataatagtcacgagtttgtgaaaataattagtattcttttaaaaaagccaaaaccaatgccgcgttcatctccgcgggaatttagcacatagtctataaatgttttgtgtatgtatgtatagatgtataaattaatcatgtgtagttaatagggtaaaacgaattatggaaaactttacgataactaaaataaatattttactggtaaatggaaagagtaatgaatgatgcagacaattacaggagtgtccttctctacgaggatttgtattttgtggagtcacaccgacacattagcagggggagggttccagtgtgggagcccacatggagaattaatggtgcgttattcctggagatcaccgtccattaattgctctcttatggctatggagttggtagttaaccaagtttttgggattttaactataattaatcaattaatcttagtagcaatcaatgtaccacttccacaaacttattggtctcaagtctttctctgtaacttatagcgtgtcctcgtcgtcattataatagtttgtagttgtactctacttttttggaagatattattcttcagctagtgagaaaagaagtttgccgacaaaaaaataactctaacagaccctagttaaaaaagtaaacaacacctacactgcttattttataagcactcgtagaatttacgagtgttactgttagttatcgtgctattgtgcctaggtgtgaaatgtatgacatttaaacattaccttgattattttgtgtttttgttcatcatgctggtgaatggttggagacgaataagccatatcataattatgggaagtgtggaaggaaggtcactgatgatatgctactatattggatgagtgctactgatatttatcgatattgggaaattttctacattatgaagcaaatatgtgttatttagtctggcatagatagatcaaaagtccgtaaaaatcaataaatacaaaaacattgtcagctgtggataacataaatcatatgtttgaatgtagaaagttgtacaatttaatagtaatttcgaagacaacaagcgttttgtcgtttctgcatgtattggtagtgcaattgtcaatgttccttacacaagttgattacatcagtttttcatgcaatgttaaataaaaaaaaacggtttcaaaaccttaccttaaaactttacagcgtcacaacctttttcccccatactcttacgtacctaagaaagtcgtttaaagcttttaagtcaaattctttctccatactttggtcttagagatattctagttctaccccaaggttttctcttctcaatcgtggtacatactgtactcattaaactcctaacaatctcagccttgatttgaatattcccttttttttttgtttagttagtcttatcaattttgagattgtatgctcttgaatgaattattaagagtatgtatagggtaactaatttaatatttgtaacctacagaaatgcaaaaacgtattttatatagtgtcactggatcattgaagtcacggtttacgtgtctgtaccaattgtaatactccctttgtaccaagttatttgatgtttacttgttccataaaaattaatgttttgtaaaagtatgattattaattttgtttgtggccaatagtgaaaggagagagataacaataatattattaaactaacaaaataataattaaaaagtacaaaaagttacttttttcttaatttatgtgcaaaacttaaaacatcaaactttatgcaacagagatgataactttaaattatttccttggtttaaaacggcaggaactgcgagttataaatgcaaaacggagcgcttttcaccagaataataaaagaaaaaacggttgggagttgaatgttattattcacaatcgtgagcaaacggaacaaagtttaaagtcgtcgttcaaagcaacgtgagttctctcggaaccttacgggttacttacgggtaaaccactcgccggtcggaataaaggttttacaaattcctcttgtctcatccggtaagtgttgactgttagtcttagtccctgtgattcgttgtgggcaatgcttgatctgattcattagtgaaatttctgtagaatttggttgatatacgaatttgattctccgacaatgtgataattacaacttagaattgttctcagagttccgtttgatcctgagatttaacttgatctttgcagtgatgttgaagcgtactgacaaatggaaatcttcgcatggatctcgaatccatcaattcggacttgttttcgttgttgggatcttcctggtggtggttctgttattttgtttcagtggcaagaatcagagcacgaaaatgcaactaccgaaacagatctctaacaatgtcaagcccgaattgcaatctcagccaacattagagattcagaacgagactcaattgatatggacgataccaaattcaccaaaagcagttctgtttatagctcatggttgccacaggaaagcttcagacttttgggacaaatcttcagattgtcctcaatgtactggcctaccagaggagaggattcttatgcgatttgccctagctcgaaagtttgctgttttaactgtatctagcactggaacatgctggacatttgggaaggaaaaaacgattgttggaagtataataaaatcgtgggtcgagaagcataagctcgaaagacttccgcttgttgcgttaggggcttcatctggtggctactttgtctcggctcttgcaacagaaatgcagtttagtagcattgtgcttatgattgctgaaggagtctttgatcaaattagtatcagtaaacagtatccgcctactctgtttgtgcacatgcctaaagatgtgtatagacaacaaaagattagagagttcttagaaggtcttagaatggaaggtattgatgctgcagagattgaatgcttggatttgccgatttctccggatttcttggcagataggattccaggtcttgattcagatgtctcggccaaactatttaagttgtttcgagacaagggatttgttgatgagaagggatacatgaaacgtgatggacggagaacaccgtggaaacaagctcttagtggctacaaaatatcactggagcaaagtttgattactcctgttgaggaagaactgaatcttgcatatgcatatcatgagatgacgagcttgcagtctgatcaaatattcagctggtttgaatcgcatatgagctaattggctgtcagattttcatgtaacaagatcattctttgaaagctgtaagatgtattgcacaggacaatctatttgactccaatggaacatgcctaaacagtcgatttacttacgatttgagtctgaaaagatcatggtcactctggttgctgtgatttagagttaagaatagaattttggttagtgtaactaaactctccgtttaaattcagcagagtttcgtaaggtcagctgctttttgattctcatttgtagttaactaagaccgctaagtctgttgtggttttggaatctgtaagaactcttaatttaagaatgttggatgatattgcaatctcttgtaagctgctgtccatattgagggattttgtgggataataacctactctaaagcaagatagccaaagctagaaatcctcttgttaagacatcttatgatatacaaatctttgtttctactttcttcattcattctgcaggtagcgaaaggatttggtagttaaataagtggctggtcaacgaaaaatcaaaagcataatgctttcaagaaccaaggtatgtcttcttttatctgttattaaaatttctgataccgctttgtatatgtgctttgataggactacatgttttatgtgccctgataatcttcggaaattgaaaaagtcaaaccaaaaaaaatgatttgcagatcggctaatgaagaacagttcaattaaaagtctaatagatagtcttaaaataaagaaaggtttgatagtcaatagtcatttcgtgtctcagatggattaccaatgtaatatataatatatgatactatatagttttgagaaagagactagatgggaggcatgtatcatgactttctctatttctttttgttctctctcagttttccaatattgcgtataacttttggttttgaggttttatatataaagagtttgccagaatggtatggtgacacccaaattacatctcgatctctctcttacaaaaaaggtatcttacttgtttgtctctagacaaacactatatcgtctttcttcctcctgtcttgcgtccttatttctctcttttgatgcgtttttaattgcaaggagttgttttttttttcagatgaaagaccatattcatgagcatgaccacatggttcagatttgtggggaagtttcatcaggagaaacaagcttggtgggcatcaagaagacatgtggagaagcgccttgcggattctcagatgccaagaccagttcaatagaagctcaagagcgtgcagcatcaatgagaaagctattaatagctgttcttctctgtgccattttcatagttgtagaagtcgttggaggaatcaaggccaacagtcttgcgattctcacagatgcagctcatctgttatctgatgttgcagcctttgcaatatctttgttctcgctctgggcttcgggatggaaggcaaaccctcagcaatcttatgggtttttcagaatagagattcttggtgctcttgtctccattcaaatgatttggcttcttgctggtatcttggtttatgaagccattgttagacttaacaacggtagtggtgaagtggagggatctcttatgtttgctgtctctgcagttggcttacttgtgaacattgcaatggctattctgttaggtcatgaccatggtcatggtcatggtcatagtcatgacaatggtcacggtcatagtcatgatcatggccatggaatagccgcaaccgagcatcatcatgactctggtcatgatgaatcacaactatctgatgtcttaatcgagcaaaagaagcagcgtaatgtaaatattcaaggggcttatcttcacgtgctgggagattcgatacagagcgtaggagtgatgataggaggagcaatcatatggtataagccggagtggaagatccttgatttgatatgcacattggttttctctgtgattgtgttagggacaacaattgggatgcttaggaacattctagaggttttaatggagtcaacaccacgagagattgacccgacaatgcttgaaaagggagtgtgtgaaattgaagaagtggtggctgttcatgagcttcacatttgggcgattactgtcggcaaacttttgttggcatgtcatgttaaaatcagacctgaggcagaggcagatatggttttggacaagattatcgattacattaagagggaacacaacattagtcacgtgactattcagatcgaacgtcaatgaagcaacgtgacaaggcgtttttgcattatcatatctactttgtctgaccattttgtaatgtttgtcttgtgtacaaaagtgtttttttttcccaacgtatgtatcatattgtctataattgttttttggtttgaggataagccctgcgttaacgatcaaggacaaagtcccttttcccctgtttctagatctgtttcgtgttcttcacgaaatctttatttctatgtatgttaacaaaagggaactgctgatgaattagaagatgcttgtgggtatcatctatagaaaatggattataaaacgctaattgaagatcatagatgaagcagagcagatataagcattgttggactaagctcagttatcgaccatgactctggtttcggtttcatggaagttgattctcaattttaaacacttaacgtttaagaagaagaacatgattttcaggcatcatcaccaatttgcccactgggcttctatttgggcctgaattacgttatcagcccaaagtcaagcaatcctgctttgttttaccgaattaaaccgatgatatttagaaaaccggataaaacagaaccaaaacttacactagattctccgagtctgctgctttcaattttacggcttctccgatgcctttgtcgaactataagtctgggactttctctctgcctctcgctgggtattttgcatttcttcatatcttcgcttgtaaggccatagaagtcagctactaatcactcccactctctctctctctctctctctctctatctcttctcactggacgcattcattgaaatcgcttaattttgggtcttaaggtaggtggtgaagtttactcttttctactgcttctactaattatattctcctttgtgggtcctttttgttgtggtctaatttgcatagttacaaatccatgtttgaattaacctctccagttactccatttttaccttactgtcaaacattaacattcctctgtttgttgatcctgcacattggaactgtttgttatttatgtatccatgatgttttaataaaaagccttgagattttgtctacttaacaatatattattacctcttgtttcgtgcagagaagatggatggtgttagcagtctaccaaacgagcttctttgtcacatattgtccttccttaccacaaaggaggctgctttgacttctattctctccaagaggtggcgcaatctcattgcatttgttcctaatctttacattgatgacactgtgtttctccatccagaagagggtaagcgggataggcccgaaattatacagagcttcatggattttgtggatagaatactggctttgcagggtaattatcccattaagaaatgctccctcaagtgtttaaccgaggttgattcagttcgtgtggatgcttggataagtaatgtgttggcgcgtggtgttacggaccttgatctattaatcatcttggattgtgagagtgatgataactatcggctgtctccaaaatgtctccagagcagcacactagttagcctgaaaatagacggtggaattgatattggttgggtggctgggaccgttttcttaccgatgcttaaaactctctctctcttgactcagctcgggttgataactttgacattcttcttcttgctttgcctgcacttgaggaattagccctggttgatgtaatctggaaagatgaggatgtgatcgtatcaagtccaagcctcaagaccctaaccatatatgacatttattgttttagcaatttatcatttgatacaccgagtctcgtttactttaagtactatggttgtgttccgcaggattacccactagttaatatgaaaaacttatttgatgctcgaatcatcttcatgctacaactcccgggagctagagaaccagatgatgatcattggttcgaccaaaacgttgctctcagatatagcaatgtgtggaaactctttcttggcttacaaaatgttccaaatctttacttgtctcctgatactctcaaggtcagttttcaatctctcttggaatatttttattcaactggtctcgaggaaataaaacatgattttgtctcaactcctggagcataactggtctagttttgaaacatgtaattgcaaattatttagttgagttttttttttcttattttcaggtgctttctctatattgtgaatcgatgccggtgttcaaaaacctcaaatcattagctattaagagtggcaaggaacgaggttggcaggcaatcccagttcttctaaggaactgtccacatttagaaactctagtcattgaggtataaaagcaactcattttccaaacatgtacaaagattgagctcatactttgaatctcttattgtcttctttatgctttcagggtgtcttgcacaatgtcacagataaatgtggggatgcttgtgactgcatttctagggaggacaaaggtcgttcgctgacatcttgtccagtaaaaatgttagagattcgagggtttagaggaacaatgaaagagatgacaatgatgaagcatttcttggactattttctgtgtctgaaggcgatgaacatctatgttgaagagaatgatcctacagagctcagattccctgaagtgtctaaatgtatcatgcagatgatggaagaatacaacaagttatcgagttgcaacgtcgaactccttgtgactgattacttttacttctctgagaagtggactgcaaaaggaagaattctctgacaaaacaaaacttgctcaaagttttgtcaaaggtcccatggaaattcattccggttcttttgtttaattggcttgaaaaccgttcaaaaaaccaaaccaattgcaaaaccattgaactttcttattctttttctccgaatgtttatagtaatttactatcgatggcttacttcaattgattcttcgccacaaatttgctgagttgttctttgtgacgtctttacctttttttttcgaatgacgtggctaataagctacaacataccaatcatcttaagctcaatataggaagacttaaccgttttcatcgcaaaagatatacaacttttttccgaaacatcacatttttttgattccatacctctttgcgtaaatgttcttttaactatgaagacccctgatatgaagatcttgcgggtataaaaatacaagtacaatatcaaaaatggcattttttatcatgatgcatttggccaaaacccaaactcaaaatttcaattacaaaaaaaaaacaaggaacaaagttgttgttgcaatagcaaaatgagaatccttcttacaaatctgatggaactttaacaaactgtgttatatctgataccaaactatgatccacaggcttcaaaccttttctcaaccaacgtttcaacaaggccaactctaatctcctcacctgcaacaaaaaaaatgaaataaccccattcagctatattgtacaacatttttggaaagctaaaagtgagatgcagaaaatagttatgtgcttacttcccctgaatcagtaaaccaaagtgtacagttaaggaagaggagataaaaaccaacctgtctaacaatgaaaggctcctcagctcgactcaaaggctcggttaatacggttagaaatccgtttctgttcccgtaaacgatatctgtgaaaggtcgatcacccacctgcccacaaacacttaaacacataaagatcttatctaccaaaaatcaaattaccagtttaatccctaacactcatcatgaaattaccatgattagctctgaagatgtgcaaccaaagtgtttctcaacttcttcagcagttcctgcaggcttcttcactcctaaaatcatgattcaaaaacaatccttatcagttacaatgctaaaacatccaaggtaaccacagtagatcagaacaagtcacttactatgcctcaacactctaattcctatttcagcctccaatgctttagctttcgaatcatcatgatcgtattccgtgagccctgatagtatttcaccaaacccgaaagtaaacaaaagatgttagcttaaactccaacaaaaaccagacaaacaaacaaaaaaaattcaaaactttatccaaatgttaccagcggaattgctaaacacggcgatgtcatggccaaaaacggctttacaccgctcaatggaaggacgtaatggtggccaaatcgctagagaataaggagccgtaagagtgttatctttatcaaacactacacctttgaagccctttctcttcagcacttcccaatcaatgtatcttaaatctttcacagaaacatgcggaagaacaaattgacgatctttaacaacaacggagaccgaagaaacgataccctcaatattgattcgttgcccaagagccgctttcagatctgcccaccacatgttcgacgaaattgccaaccctttgttgttgtcttctactctcggcaacaccaattcgcgtggctctccgtcgaattgttccgggatccggttagagaatcctgggtcttcggtgggagagctaaattggtaaagaagaaacgaatcttcaaacgtgggtagacgcagattctgcttttggcttcgatgggttgtcgtcgtttgcagaggagacgaagaagaagacgaaggaggaggaggagagcaaatgggtttggtggagcaggagatgagattagggtttcgtttgtgacgaggaggagaaagaaggaagcttttggggattgggtagtaggaagtagtggaggcagccatcgatggggtctgcatctcagccttctttataataaatattgttgttttacttttattgaccctaaaatgtagttgtaagttgtttatcgagaatttccagatttcttggagctgttttagaaaaatatgatgactcttttccttccacacgctttgatttccaaaaatataaacggacactagtcaaattaaccttaacaaattgacaagtcaaattgtatgttttgctcatgtgtccctcttgtcttaaaatggtcacctttcaacacattcatttcatggcatctccatccactatgcgtgttgcagattttgaagtatctgaatccaaaaacggtcccttgatatgctcttccaagaagcaattttaaaacggttctaatgtaaagttagtactcgtggacttaggataaagaactatactggccaagcaattctgtttgaatcatgtttctcttaaaatccagtaaatagaagacaagaagaagtgatgacgaacggttccgaaatgcattttgtggcatattataaggtgaagtttttatctgttcccattcacaaaaccatgctagccaaactaccaacaaacataacaaactcaaatccaaacccaaagaaatttgtggcaaacctgtgtaaatccattcctgaaatcaatcttaagacagagtagaagtgataaagaacagttaccaaatgctgatctcatcaacaaaagtatgatagccaacaaccaacaaacatcacaaactcaaatccaaacccaaaacaaatttgtagccaacctatataattccatcccagatatcaatcttaagaacttggtcatcagttattctttcactaacatattcatcaaaatcaccttagcttagaatagcagacgaaaaaggtcgctgcaaccaaaccagcagctccaactgatccagcagcaaccactggccactgatactcagcttccaaggaacccttttggtcaccaccatttgtgtctctgactccattactaggcttcatggttctctcattcaaagcaaaaaccgtcttgttaccttcctcaaccttcttcagtaactcgtccttcttcaactccagctccttctctcgtttttgagtttcactcaaagcttcctccgtgagcttcttcttagacttccatttcttcaattcttctacattcttcaccaattccagattcaaaacaatgactgtcttctgcaattcctcaatctctctctttttctcatcatctatctccctcatttcctcttctgatctaagtttcttactcttctcctccatttccctcacttccaaaaccccaatcttcctttccaaatccctaaccctcttctcaacctcagctctatctttccttaaaccctcagcttccttctcacacccctccagcttctccactatctccgccaacgctttcttcagctccgccacttcttccgccgtcttatccactccgttcaaggaagtgatcagatcgtcatgaagattcgacacctcagtttcaagctccacagctctagtagaaatagcttccaaagccttcttctcttcctcgtactcctcgatctctttctccatctctccgaatctctgattcatctccgcttctacgtctttcatctcttcaatttctcccgtaagcctctctaacctctccttcaattcacgattctctctcgtgagctcctgattcttgttctccatatcctcaatcttcctttccagttccgtcgtctttacaccaccttgatcgtagtcagagatccccttcgccgcacgatcttcaacatccgccatttacgcttctactagagaaaattcaacacagaattaagactcaataacacgaataactcaacaaaatgtaaagtttgatgctttagagaagaatcagtcactctgactttttcccagcaatctcacacatcaatcatcatgatgatgataatgacatttcgttaatcggaaaaatctggtatgacgaataacaaaaaaatagtaagagaattctattgaggtttaccttccgattttccggtggagggatcggctaatcggaaagattcgatttttagggtttatactttacagagtgagtgacaacaaatggcgttgagaaattgggcggtcctgaatacccacgtgtttaaagcaagtccacttggctgcatcattttcagtgatctctgttatatgggccttaaggtccattagtagttaagctccatcaggcccaaatcgttgcttgcagagttattattattcttgttcggtgagttctattttgtcttccttgtttcatgagttttatatatgttttttttgaaccttattggtaatgcgctctatcagacccaagtctgctattatcgcttgcagagttattattgttcgtttattctttgttcgatgagttctttttttggcttccttgtttcatgagtttatatgttttttctgacaatattattggtgactaaatataaagataaagaaaaaaataattatttttcacttctttatttgatgtaaattaaatgttaaattttataccattttcattttcattttttggtgtaaatgtcaattattttcattttattggcatgtgttttatcaaatctaatggctggagcaccgaaagttatatacttatattacttatatgaatttgagatatcaaaggagaaattgtggagataaaattttcatttctcgtaatattttggaataaaaacacataagattgttttttttttaagaactaaattatgaacccgaactaaacagcaatatataaaaaaaaaaaatataaggtgaaaataaatgaaaaaacagagagaattccaaattgtttttttttttcttctgattttcagaattctaaattgtttgttcaatcttcaacctccaaacttcatatcttttttctcacaacgctcaagaaacgtagtaagaactttaatggcattgatctgacattgcagagccaaaatgtaactagctgtctcttcgaacagcgcgtcgacaccaagttccgttcctccgggaactattgtctgaagcgcctcgatcttctcctccactccttcttcatcttcatcttcatcttctacgtcggtctcgcttacactcgccgttgcatcggacaatctctgtctggttctgcggttgaaaccagtggagcttgtgttcacggcggaggatggagacggaggagaagagcgtttggtatgggaagtggctagggttttctccattgacggagggagagaagatgtgttggaagaaaaggagtaaagagacctgtgtgtatttatatgagtgatgtgaattagtagattgaagtaggaccggttaaagtcattccggttcgttttactttggtttactcttgtttgcctttaatgatttgattatgagctgaatcttagtgcgtttggttaagactttagtttagtactatgttttggttgtgcgatttaggtttggggtttggctataattttggaaattgggtaatgccggtatgccatcaaagctgggtccagttgtgattttcttttctttttttgttcttgagtgtttcgaattatgtgttggagtgtttgttttgttggtttatttattaagagagattttggatcgtgattgtcacgcgctatgttgtgtggtttagtggagacgtcactttactcaagtggatctccctgaggtcctgacagatagatagattgtatctttatttgtcttttaaaacactatacatcacaaaagtttaatacataattgaaaatatgcgtgtcattaacaaatttgtaacatgcttagtttagtaataatagagttatcgacatgtgtttaaaacttaacccagactttgacttgtgggtctttgttttgtattcttttcggaaacattaatgatgtgtttgaatcaatatttcaccataaagataagctagttatttgtatcttacaacttaattatgcatgcatacgacaaatgcaatacatgctcttcatccagatttcaaaccaaaaatgaatgaaaatatgtattagagttagcttgaccattctcttatataatccatattttttttggatcaggcgattttttaaaaaatgtgttgaagatataagatgatgcatggaccttagaatgtgagattaagaaaacaatcaatcttaacttgtaacttatatattgatttgattatcatattaggttacataattaacatttcaagtttcaaacttgagctcagcttgacttaaatctagttaagaatggtatattactaatcacaaattaaagagctaatcccacatactctctctctctcgcacgttagaagaagggaggagaggaatcacctgcgacaggtgcatgggagcagaggagatgggagccacaaaagctccgtaaaaaaggaaaagagaaaaggaaagcacatgtgctcacatgagtttctccatctatcttaatattagctcgcatgtgcctctctttcttacttccacacacattatgatacactctctctctctctctctctctctctctctctctctctctctctctctctctctctctctctctctctctttataatagggagaggaatgaattaatagagagatacagttgtagatagtgaagtggtggtggtactggtaccatgatgatctacttaactagttgcagttgcacagaagaagatccacatgattttccatctcgcatgggagccacgtgacatcttttatggaacctaccttttcatttcctactattctatccctaaatcttttgtcaactcccttttttttcactatttccaagaatttccaaggaagtgtttattatagagaaaccatttaaaacaaaaaaaaaaggagaatagagaaaagtcgtcctcatgtcggcattaatctttgcacaattcactcgagttcatcctcttttttatttttttcaacacaaggctatattttaatttttaagtttaactacttattttgttattcttattctatggatatagtaacactccgtatttactaaatagttatactagattactagttacttaagaagttccctcaccatcataaatctaatgttattatatcgaagtttacaattataactatattaataacttaacaattaatttgataatatatactacaagagaaaaaatcgagggtaggtgatgtttccaaggagggaacggagagggggttggtttcttgggattgagattatcagtattggtttctttcaccatcgaccaacctgacacttacgccaattctagtctttatattggtgggttaatacgatatttatatcaatatgtacacaaacttgcatcaataatcgaccctaaaaagatctacatagccaaagctctacatagccaaagctctcttctattagcattggttaatcattattcaaccgcaaccttttctgtcttctttttttatttatttttttgatcaaacattttttctgtttttatagtaaatgttttttggtcatctaaattaatagtcacatcaatggggttagttaatgtgcgttgttaaaacaagaaatggtgttgagagatgagatcattggtcttttttgaggggaagaatggaaaagaaagtaagatgaagaggacaaaagacaaatgatatgttatggttttattagttgcagattatttgtcttctcattttgtgggtgagaaatatgggccaaccaagtagacccaatacgacggttgatcttttgggacaatggttacatgggtgtggatcccatctgcatcatacattgtctgtaaatccgattttttttttttttcttctagcatgaatagaatcatatgttcatattatttctgaatttttaaacccacaccacgatcaaaacatcttataagctccgatggaaaccttgtaatgttataatcgtcatcaaaaacaaatattttgatcttctcatattacaaaatgattaacaactctataaaattactattttaaaaaactaaaattgcattttgaagtgtccaaatgtccactggaacttggagataatgacattatttcagaaattaattcgtttttgaatagtcaatgaggaccagatttggttagatacggtaaagacgcaaatcactaattccaaaagagaacgtgtttggatgtattcgttcttcagatgttaattgttgctgtattagctcacataaacaaaacaaaagcaaattctacaaaaggtctactacacacattatacaagaacattaaatatggttttctttgatgtagaatagatttaagtgtatagtgcagattttgtttttaattgactccggaagaagaaaacaaagtaatgctcgtgacatgggcgatccactgccacagcccacatgcgtcggatctgccatgagaatatcatcaacatcataagtgatttcatcataaagatcatcatcatgtgcatgtgcaacgatcgcatattctcatcctatctgtcaccaggtaagtatggctacaacaaagttgtttgtccacagcagaaacaaaacaattttttctataaaaaaaaacacgtaacagtttgtgtcggtgatatttttgtactaacaggtttgaaacatacgatatgtatttgttccgagcgatcaaagccaattttggtattagtatacatttttgacatactagaacatatactagtattctgattcacgtccaaacgataaaacactagaaaacagaggtattgtaaccaaagagagtcattaattattcaactaggaaagaacaaaagtttgtacttcaagcattacttagttttcccataacacttgatcattctcctattaaaaagataaaaagttcgtgcgtagagcattctcctattaaaagctaaagattgtgaaaacgtaaaattttgaaattgtagagaagcaggaatggttctgtctagtacatgaatcaaatcgtacttaagcagaataaaaaaaaaactaaaaagagaaacaacgaaagcaagtttcatcctccaagacttcattttcgagtccacctccagtacaagggagccagcaccctgtaattaatagtgcaactcgacatctcgttgtattgcatcagcgtatcctcgacaatttcaagccatttagggatttcaaacagagtaggttcctttgtttcgacaattatctccatctccttcaaactcggacaaaagtccaagaaatgctttatcatgtgcacctctctgattgttcctctaaatccttgaatctgtatcttattcacagggcaagccatgagcgagcgccctttcttctttctaggaatgcagtcacaaacatccccgcatttattcgtgacagtgtgcaagagtccctgaaaaagcataaaggagactataagcgatttccaaagtccaaagcggggaaactaagaaaaatgttttggtgttttataccccaaggtacagagtttccaaatttggacagttctttagaagaagtggcattgcttgccatccttgctgcatcacagtcctaatatttaaagtggtaaggtttttaaaaaccggcatggcttcacaggaaagagagagcacctgaatcaagaaacattgttatacagtactccacgaattgagacaatgatcttcggctttccttcttacaaaaaaactagctgaaataagtgttacataggaaacttacctcgaaagtaacaggggatatgtgaaagatctcagcgttttgtattccatgaattaggttccacacattatctcttgctcgattgattcgatctgcagtaagaacaaggttgatcccaacctcaactaagtttttcaagtttactattggataatcctctgcaacgtaatcatagtagtctaagaaaacaagattcggtgtatcgaatgacaaagtgcctaaacagccgtcttcggaggtaatcttaaggttcttaaggcttgaacttgacaagatcacattcctatccttccactccatattaagcagcattaattcctcaaggacaggacaagcaggaagaagtgtctgaaactgacccctaccaaactcaactgattcaagaacaagagtcttaagcatcggtaagaacatgtcatcgtcccacaaataaagatcaactccatatcctgtttttagctcaactaatgtcttactcacagatatctcgtaaggcagcgaatattcttcttcgaaatccatgaatagagcaaggtgagaaacaccgcgttgcaacacattacatatccaacgatccacacggtcaggatcaacaccagttttaacatttagggagaatttcttaatgggagaagcgccctgcaatgccaaaaccctatccacgaaatccatgaaactccgaagaattccgtccttttcccgtttaccctcttggggatgaagaaaatcagagtcattgaaatcgagacttgggacaaacgcaaacagataacgccacttctttgcgagaaccgatgttgaagcagcctctttggttggaagggatgacaagatatgagaaataacctcgtccggtaacttgctgaagagatccatcttctccgagtccattgtctacacaaatctcctaagcaatagaaaaatcaagcatacatcagtaccaaacagtaatattctaggatctaaaaactgagaaaggaacagagcgatttaattcaaacaagaagcaaattaaaatccctaaattatagcagaaaaatcacatatacgcaattgctaaatcaatgacgattgatttgatttggggaaccctaaattaggggggattactgaatctcccaataaatggccataaagaagatttgagttgatatggagtacctaccacgttatgaagaacaaagttcaaaactttcagatttgagggaaaagcatacgcatatttttgcacccaatatttcgtaattttattaaattttcggaaaacggataatatacaattcagtatgataaagctcataaattttagaaatgttttctttgtaccattagagatgcgttgaattcagaagggtttagcattcgtaaatatcgtaaccatgatctatattcatgatgatcatatgatgaattactacttgccaaaatgaaattctcatgatgaattacgttgtacaagtcatagctaaaatgttttgttatatttacttgatgatctcacttaaacctataaatgcaagcaaaactcgcatgaaaagaaagaaagaaagaaaactgtgaagataaaatcaatacacgagagcttttctaagaaaggcacaatcgttgcctcgtttcaagagcttttctctctctcttgaagaaaattttctagatctagatttagttttctgggtagtgttcttcatcgcaggccaaagtctttatacgatggttcaggagtgagctcgttactcttcgccgtcaacggtggtgaggtttgtctccatcgatgtggtcgtcgctttagattggcggaggaggagctctgcagcgtgggtttctcggttgtggacgccgaggagtgctccgtagtttctcttgcccggccgttgatctattgttgtgcggctacggcggaagttggtggtggctaggtgggtttcgttgtttggcgtggtggtcaactgtggatctgtttggatcttagatggctaatgtggaggcaagggttcagtcggtttgggtgagctccgacttctggatccgccgcgtttggcatccatccgcccggtttggagagtaacggcttaaggaaatcggcgaagatccggtcatagaagaaaggggttaatccccagtgtgttgggatgcttggtatggaaccgacaccgtcgatccggtgtgtcggagtggctagttttccgggagagttgtagttggtttggtgcgtcggcggagagcgtctatggacggaaaccggaaccctccgtctacggttcgcgttccttcgaggcgttccagttctaatctagccctaaaaagtaaaaacaaaaaaataaaaaataataataaaaagtatgtagaaagaaaacgtagcgttttggatcggttttgaaaaaccaaattaaccaaaccaaaatcaaaaccattcatacgccaaatccttagaatcgacagtcgagcatacttaacagcttaagctataaaatgtataatagatttacgattctttgatttcgaaagcaagttgatgtattattggcatgctacaaaccgtgcacaaattaaacagcatcgtatcaagttcatcactcaacgtgtttgatactcccaccaaaaacaaaaatacgtctttattaggaaaaacatcaaagcaagaagttgactcttttagcttcatagctattaatttggaaaataaaacttccaccaagacttcattgggtagtccacaacctatgtcaaacaacagtgcaccttgaatttaacattgcgacccgataagtcgttgaatgggttagaatccggcgttataggggactgtggacgaccatctttaacatagatatccagctcctccaagcaggagaaatagtccaagaaatgcttgatcatgtccatctctcttgacgttccttgaaactcacgaatctctaaccttttcaccggacaagatgcgagtgaacggcctttctcttcccgaagaatacaggtacaagcgtccccacagtcatcaaaggttgggagggaaacaaagaaggcgaaaaagatgttttagggtttgccaaagtgaagaaggttttaattttcctttacgtgccctacataatcaagtgaaacgcagccttttataaagtgattaatttaaacagctagcgttttataaagtgttaaaagttaaacacacaaaactagtttagatgcgatatgatgagttccccgaattaagtttaagaaaccaaagctaaacgcaaaacttattgccactcaacctatgatttcagttgtgtaactttgtgttgtttcttgcctaaagttaaatcaagttggtatctgatgtgttgtacattaaagtcaagatgtaggtatttttttttttttttgctaacgtttagtcaattcgagtaaagctctattaaagactttgcaagcaaaaggaattgtgaagagttagaacatccaaattttaagcgaggttctaaagttcacgtaactgttttcaacgaggcaagcaaagtaacaccagaagaaaattatggggttttctgcactagtctggtttagttggactgggttttcaaatccagtagatcaaaccgagcccaaatcaaatcaaaaagcactaataatactcgttgttttagtgtgctgataaagtttctttcttttgtttgagagttgagactgggatcccattgttgaagaagcgtcactttaacgacatgttctaggtgattaaacaatactgtgaacaagctttatttattgttagttcgagtatgatcatcgatcatttataaaactcaactaagtagtcatcaatataagatagatttacgattctttgatctcgaatgcaagttgatgtattattggcagactcggctacaaatcgtgcacaatacggcatcgtatcaagttcatcactcaacctgtttgatactccgacgaaaagcaaaaaataaaccatttttatcagcaaaaactatcaaagcaagaagttgactcctctttttagcttcggagatattaatttggaaaagtaaacttaaagttccaccaagaccttcattgtgctgtccacagcctatgtcaaagaaccgtgcaccttgattataacattgcgacccaataagtgcttgaatgggttagaatccgacgctaaaggggctaggaactgtggacgaccatctttaacatagatctccatctccttcaaacagaggaaacagtaatagaaatgcttgatcatttccatctctctcaacgttccttgaaactcacgaatctctaaccgcttcactggacaagatgcaagcgaacggcctttctcctcccgagaaatgcaggtacaagcgtccccgcagtcagctgcgacacagtgtacgagaccaccctaaaagcagaaaggagacattagggatttccaatcgtgaactgtatctctgcaaacgtgttattcaagtcatttgatggtttatattttataccttaatgactagagtttctagacgtggacaatttttcaagagaaccggcattgcttgccatcttatatccatgctactctcaatgactaagaatgtgaggttgttgaacaccggcattgcctgagagcattggccaagcacctgaaacaacaaaaagtcccaaataaacattaaccagctgcaatatttgtttcaaaatcacaagggttgtttctctgttcaaaactagaagacttaaacacccggaagaccttgacttgtactttaatttgaaccatgctcctcaagtaactaggatgtctaatttacttgagtttttttgttctccctttattgtttaagagagaacaaaacagcatactgacctggagagtcccgggagataagtaaagcttccgaacactggatatgccacgaataagtttctgcacttcactaagcatgagaagaccattctttcggacgcttactagcttgattagacgatcagttaatacaaacttgatttgagcctcaactaagtattccaaattaactaatggatagtcgtcctcaaacaatgcagtgtaatttaagcaaagaagattcggtgtatcaaatgagaaaacgtgtgcagggcctgacaaactgacagacttaattgttagagtcttgaggcttgcaattgacacggtcgcattcggatatgacccatgcacattagccaagtttaatgcctcgagtgcagggcaagcagaaagtagcctctcaagctgaccactatcagaccaactaactgagtcaagagtgagagtcttaagcataggtaaggccgaaatgtgttcaggcccaaaagcaatacgacatccacttcctaatttcagttcaactagtgttctgctcatgaaaatttcgatgaacatacatctatgtcccaaatccatggacagatcaatgagcaaaacaccgcgctgcagcacattacatatccactgattcagaagatctaaatcaacaccggttttacacttgagtgagaattttctgatgggagaatctccatgcaaagccaatactctatccacaaaatctataaagctctgtcgagttccttcccttgtctgtttaccttcttctgggttcagaaaggcagagtcatcaaactcgagataagggacaaaagcaatgagatagcgccacctcttggagagaatagaagtcaaagcagcctcctttgtggtaagtaaggacaatatatgaccaaggagatcatctggtagactgctaacaagatccaccatctctgcagtagaaagtacatttaacacaaactcctaagcaatccgaacatgaacataaattacaaaaaagaagttgcacttggggatcttatacagacgaagatctgtaaacactgatgcttaaactttgagtcaaattatagatccccaaggaaaattagaaaatatgaattcgcttaggcatttaccgctgtacattcgcggagtcctacacatatttaacttgtagagacaggggtcaaaggttgggagggaagcaaagaaggcgaaaaagtagatttagggtttgcccaaagtgaaggagtcacggagaaaaggttttaattttccttttacgtgcccctacatagcgttttataaagttttaagttataataaaattcgtttagaagtttagatgagataataagatatatcatgattgatgatgattaaaaaatcaaagctaaacacaaaaattagcacaaatgacccaattataaatgatacttctatagaaattatttttaaaaaattattatgcagattgaaattgtaacctctgatttcagttgtataacttgtgttgttttttgggctccctaaagttagatcaagttggtatctctgatatgttgtcattatagtcaagatctaggtagtttttttcttgctaattaacctttaaattaattagtcagtttgagtaaagcattgttaaagacatcaacaagaataaatcaaagcaaattacttgtgagaatattatcaaaacaatccaattgctagaaattcaagagtgtacacaacaacaaaaactatctttattagcgaaaacaagctgcagttgactccttttagcttatacaacaagaattcaatgcaactttggcataacaatgcaaaccctcttcctagttccagcacaacaattggtcttgcaacttgcaagtgaagacagctaaaggcaagtgattacttggtttaaaaacccggtccaaatcagtctcgattccgattcctattctgatgatcatgatgatgactatcatctgcctcaaaagttgtttgtcagtagcactttagtcaagatgatattaagaagtaaatttggtattggcctctaggtggaggcactttcttaccaatgcttaaaactctcattatcaaggctaagtggattggttctggtatgcttgcgacgcttcttccttgtttccccgtacttgaggaattaagcattgctattactgagtagctagaatgggatgaaaccgtgtcaagtgcaagcctcaggaagctagttatctattgccaaggtggttgtgcagacttgctgaattcaaagagtatttctttcgatactccaagtcttctttaccttgtgtattctgtttttgttgcggaggactatccaaaagtcaacttgacaaatttggttgaagctaaattcaaccttatgttacttgacgaacaaatcgagcaaataagagagccgaatgatgaggatgatgtttttctccgtcttggaaatgtgttgaagctctttgctggcataagaaatgttcagaaactttacttatctgcaaatattcttgaggtcagttgctattttgtttactattgtagtacatttcttgctagtctcaaggaataccaattaatcagacagccttgtctaactttctgaagcatgagaacaaattcattgttagtccgagtgttatgctgagtcactacacagattgtaacgccagctgcaatattacaaatgttgcacccgaatagcgttgagttgagctttgtcttgttgcaggtcctttctctatgctgtgaatcatttccggtgttcaacaacctcaaaattttacgaataaggagtgccgaggatcgaggatggcaagcaatgccggttctcttaaggaactgtccacatttagaaactctagtccttgaggtatggacagaactcatatgtctaactttaaccaagacaaggatcagtatttgtagtccctttatttgtctggtttcagggtcttatacactatgtgacaggtgaatgtgggaatgcttgtgactgcaaatctcgggagggaatagttagttcgctcttatcatgtccagtgaagaaggtgcagattaaagggtttaaaggaacgatgagagagtcgtcaatgatatggcatttcatgacgtctttcccgtgtttaaaggttgtttatgccgaagagaatgattttacaacaatctttgaaatcctgggacgatgaaacttgtcgtgcatatgctctacaaagagttctttagttctgatgtcgagttcttggtgtacactcccatggataagaagtggattttcggagtggctttttcgaatgtaagagttttcataatcgacattgtcatgattattatcttcctcagttaaaccttagtctgctaatatgtatttcttatgaagaccaattactcagtcatcattttctgctctgtacttttctcaaaacctttacgttgtctaaatcatgcgatttgattgtgttttacgtctggtttatttgctttaataaccggtccaaaccaaaccattataatttactaaattttttcggtttgcgtttatcaagattgaattccggttcaaagattcttcctgtaaaatggatctttcatatattcccttgtctctcgaaatccaaaacaatctaccatcgatttcggtcttaggtaggtgctgaagctaactattcccttctgttcttatacttctttgaacgtatcttagatcattttgcttttggttgcgttgttaaatttcgatcaatcgcttctctgtttatgtatggttagatgttccaatagctttgtgtagttcagaggatggatctattcagcagtctaccaaatgaactcctttatcatatattgtccttcctatccacaaaggaggctgctttgacatcggttctctccaagaggtggcgcaatctgtttgcttttgtcccttacctcgagtttgatgactctgtctttcttcatccagaagagcgtaagcgggaaaaagaaggaattttgcagagcttcatggattttgtggatagagttttggatttgcatggtgattctctcataaagacgttctccctcaagtgtaaaactggtgttgactcagatcatgtggatcgttggatatgtaatgtgttggctcgtggtgtttcagaccttgatcttttcattgatttcagagatttatattctctgcctcacgaggttggtgtgagtaggacacttgttgtgctgagagtaggaagtgaatctgatctttattggtggcagaagtttttatgcttaccgatgcttaaaactctcgttcttgactcctgctggttatgtattggtcagtttcaaattcttcttcttgcttgccctgcgcttgaggagttagacatgactaatacgcggtggaaggattccaatgtgactgtgtctagctcgatcctcaaggagctgactattgatctccatggttgttgtagcgtagttaatctgaagagtctttcatttgatgctccaagtcttgtttacttttattactgtgattctcttgcggaggactatccacaagtgaacttgaaaaacttggtcgaggctcaaatcaaccttttactaactcaagctcaaatcgagcaagtaagagcactaaataatgaaatgttggtggctgatgatgtttttcctggtcttggcaatgcttggaagctcattactggcctaagaaatgttcaacaactttacttgtctcctgatacccttgaggtcagttttctctctttagtgtatttctggctggttgggaggatataaagaacgcaaatattccaatcgcgtgattgctagcgttgtaggtgctttctaggtgctgtgaagggatgccggtgttcaacaacctcaaagtgttaagtatttggagtgacatgaataggggatggcaagctatgccagttcttctaaggaactgtccacatttagaaactctcatcattgaggtagaactactgtataatccatgaaattttgtggacaaaacattcgttaaagttgcagttcatactcgcaattactttactgtctcctttatgtgcgttttcagggactcttacactatgcgacggataaatgcggggatgtttgtgactgcatttctcgggattacaaagaccattcgctcacatcttgtccagtgaagaagttacagatatatgagtttcgaggaacaattagagagttagagatgatcaagcatttcttgaagatttttccatgtttgaaggagatggatatatatgctcatgagaatagtcatacactatttaaagaccctacaatttttgaacgtgttgggaaggtgatgaatttctacaatatgttatcgagttgcagtgttcaattactagtgcgcggtccattgtaagggaagtgactgcactgtgaagtatttgtgggagtaaacacagctcatagttttggtcaaagtctacttagttttctgttgccttttctcattgacattctgttacgttttttgctatttttcaaaatgttacattgtcacgaggcttaacttccttgggcaaacttttgcattgtcataatgatgagggatgactgaaaccattcaaattagaaacaatcataaggcaaaagaagaagaagaagaagaagaagaagaagaagaagaagaagaagaagaagaagaagaagaagaagaaaattcgtttgaatttcaaaccagttaacaaaactgaacaatttctgaaaagactggcagataagttgtgtttcataccgcaatgcttagagtttctagatgtggacagttctttaggagaactggcactgcttgccatggactctcgcccctcctaaatcgtaacaatttgaggttgttgaacaccggcatcgactcacagcatagagagagcaccggaagcaatagacatttttgcaaccacatgtttcaaaacacttgtcttgtgcgtaaaaaaaagggaccaaattcaggttttcttcttttatatcccatggatagaagaagatatgactagagaaaacaaaatagcatactgatctcgagagtactagaggtcaagcaaagtttatgaactttttcgtatgccaagtcgaagagcaatatcatcctcatcatcttctaaccaaccattatttggggctcttgctcgttcgatttgatccttagttactacaaggttgattcgagcctcaaaaagattttgaaaattagctaagggatagtcttctgcaacaaaatcagagtaacctaagtacacaagatttggtgtatcaaatgagaaagagcctgaaccaacactggaatctatttttagggtcttgaggcttgcacttgacacggtcgcatccgaatctaatacctttatattagccatctctaattcctcaagcgcaggacaagcaggaaagagtatctcaaacctagcaacacaaaattcaactgaatcaagaacaagagttttcagcatcggtaagaaaatgctctcagtccaccaacaaagatcaattccacttcctatcttcagcttaactagtttggaaaccaattggaccaaaaacgatgcatagatcaaggtcggaaacaccacggactttattaacgggataatttccctgcaaagataatattctatccacaaaatgcatgaagctctctagaattcccgcttgccctcttccggatgaagaaagacagagtcatcgaattcaagattaggaacaaaatcaatgagatagcgccacctcttggagagaagagaagtcaaagcagtctcctttgtggtaaggaaggacagtatatgacaaagaagctcatctggtagactgctaacacgatccatcctctgaactaatattttaaaacaaatggtgctatttaattattaaattttggatgtttcagcttctcaaaagcatttttgcacgtctgagagtttcctgtctcttggcgtctgtatcaaggtatataccgagttttctcatcatcttcaagctctgagttttatttttcggaggagtaaaaagggttgtctactctagggtttggctagaggatggataggattagcaatctaccaaatgagatcatttgccacatcgtatcgttcctttctgcaaaggaagctgctttcgcatcagttctgtcaaagaggtggcagaatctctttaccattgtacaaaaacttgagtttgatgactcagtcaagaatcaagggagtttgatggattttgtcaatggcgtattggctcttccggtcactacccgcattagtaagttctctctaagatttgacagttttttaaagcggaaacttgagactggtcttgttattggtccacatgttgtcaaccgttgtctctgtaatgtcctgaagcgtggtgtcttggatcttaaactggaaatatatggtgaagatggatatttactgccttctgaggtcttcacttgcaaaacaattgttgacctgaaactcacttcctgcatattcgctgagtcttatgttattgatgttatccctgagaatgcattccttccggggcttgagtctctctttctcaaatcaatttggttctctgatctacgcggatgtgctttccaaacgcttctttctgcttgtcctgtgcttaagacattaaccatatatgatgtgcagtgggaaaaatggaaatggtctcgcactgtatcaagtgcaacccttgaaaggcttattattcaacgtacagaattcacttattttaacgggtctgatttcaaaagcattacttttgatactccgagtcttacctacttaaagtacattgattttgttccggaggagtatccagttgttaatcttgattccattgtcgaagccaagctccatcttattctcactgggaatcaagattaccctgtaagatacctaggccgagaagatgatcctattacaagcaatccaactaatttgatcaaggggttaagaaatgttgagatcttgcatttatctactgcaactgcgcaggtaattaagtgtgtttggtttcttctatttctccaatgcctaaataaaagaaagatgaaaaggagaatcaagcgtgcatctcaagttacataggatgttccagttacgtatatgacgaattgtttttgtgatgttttgtttcctataaattgcacttattttatttttatttgatttcagatgctttgtttcttcccccgtgaaacacttccagagtttgtaaacctacatcatttaactattggaccaacttattacgagtgttttaactggcgacttctgccaattttgctaaaaaagactccaaatctaaagacgctcatgatcaaggtatggccatacttttgcaagtaaaaatattgacaaaccgcaatttccaaaagtccttgtatactcctaaatgtttaatttcttattctctcgattgcgtcagggtccattgcatttgtactacagagacttcaatgatgatgaagaagaagaagaacctgaatattattgcgagtgctcgtcgggatgtaattgtctattgtcatgtcatatggaagtcctggagatctcccattacagaggaactaccaaagaactggagaaactgaagcatttcttagggaagttgtcatgtcttgagcatgtgaaacttggtgtttgggcaagtagcgacaaggaaaagttgagtatcaccactgatctactaatgcttcctagagcttcggtcaattgtaagatccagatcaacttttcttaaaactactaccaaataattgcttttaaacactctgctttattactttgtttcatctcttgttatctgagtctgatcttatcttctttctaagacttgttttgactttgatatattcaccagtgatgggttttcttatgaacgtactccaatgtagagtctgagaagttcaatgcaaggaaaatggtgacgaattataatagccttcaggattttcttttacaaaaccataaaaactgcccaaggaaaatgcatttcaattttttaaccaaagaaactactctgttttgggtcaactatggaaacatgccttcgacaccttttagtttgcacaagtaaatcaaaggaaacatggcattagaaaaatcatgaacacgttttcatactcgtagacttcattgtgtagtccatttcctacgcatgtaaccccacaccaggaagtaaacatcacaattcgatatctcattgtagagcttcaatatcttctcaacatactcaaacgctccaggattttcaaagtttgtaggaccctcttcttcaggaaatatccccatctcctttaaacacttaaaagacctcaagaagtgccctatcatgtttatctctctcatcgttcctctaaacccttgaatctctaccttcttcacgggacaagaagcaagcgatcgacctttgtcttcccgagaaatgcagtcacaagcatccccgcatttatctgtcacattgtgtaagagaccctgaaatcataaagaatacgataagattaccgagtatattgagtctgaccaacatctttaacaaatgttttgtcaagtagttccatggtttgtaattaacctcaatgattagatattctagatgcggacagtttctcagaagagctggcactgcttgccaaccgcgaccctcttcactcttaatacctaaggttttgaggttgttgaacaccggcattgattcacagcatagagaaagtacctgaaaacaagaattaaaaaccaactacatactttgcaactaatctttctcaaatagaccagagagaacgaaatagagaactgacctcaagagtatcagcagttaagtaaagtatctgaatattttggatgccgttcatgagcttcaccacattgccaaattggagaacaacattacccgcatcatcctgtaacaagtcattatttggctctcttacccgcttgatctgatcatcttttactataaggttgattcgagcctcaagtaactttcccatattaactaatggataatcctcggcaactaaatcagagtagtttaagtaaagaagacttggagtatcaaaagaaatgctctttggattcacatagtcttcacaaccggtgccaaggatacttagcttcctgaggcttgcacttgacacggtttcgtgtgattccttccactccatactagccattcgtaattcctcaagcacagggaaagaagaaagaaaccttttcatcttaccccaaagaatcaagtccgagtcaatataaagacttttaagcattggtaaggaagtgcctccctttccacaccaccaatccacacaacgatcatttcttattttcagcttgaccaatgtcttactgacgaacatctcttgaggtagcatatcctcatcctcttgggtatcctcataggaaaaatcaatgaaaagatcaagatcggaaacaccacgctgcagcacattacatatccaacgattcacatgatctggatgaataccagttatacacttgagagagaatctatcaatgggagaatcatcctgcaaagccaaaactctgtccacgaaatcaacgaagctctgtcgaatttcaagcctttccgctttaccctcttccgggtgaagaaattcagagtcatcaatgtcgagaatagggataagtttccagagattgagccagctctttgagagaaccgaagtcaaagcaatgtgcttggcgggaaggaaggacaagatatgaccacgaaccccgtctggtagattgctgacacgatccatcttgcgtacacgagattaagagtacgttattacggctacaggtaaaacatgaaagttgacaacttttccccaaaagatgagagagtagaaacgggaacagagaaaaccctaattcacaattcacacgaaaatatgaattcacacgaaaatatgaattcacacaaagaaaactttgaatcaagaaacagaatcagtggaagcagaggagataggtaaaacttgagcatttacctcgctacgaatggcttaatcgaagatcaaaattttggagaatgcgtccagtgataagagtgagagttgggagtgctaggtcactggtttctatcgtagaggagaagaaaagtcacagactttcagttcgacaatacatgcaaatgcatcagagtagccgaaacatccaactttaagaagaagaagacagcagacaaacgaaattgagggtttttaaaaccaagtgtggatgttgttggttctactttaatcaccggtttaattcggtaaacaaaccggaattgtttgactttgggttacggaggtgaggcccaacgcccagttgcaaaattgattaggattataaacagagaagcatcgtgatgagctgatgatgctattgaattttggatgtctcagcttcttaaactgaaagtttgctttttatcgggaagaaaaaagaactgaaagcttaagttggtttggttaatgcgaaccggacaattcaaatcaaataactttatatgcagtcgaacataattacttgtacccgcaaaaatgatataagataccttcaaaggagtataaaatcagcagagacagaagagaacagttagcttccgcacctaccgtgtacagatgcaacgtcgagagagtagggaagatatgaagatccaaatttacaagctgcttcgcttcaggattttgaactggaattccaactaaataaacacaaaccgaaccaaattggaaagcattaagaaaacaatcacagatctattctccttctcgtgggggaaaatatgttgccgtagcttggccgagctcggtcatctcctgattactggatgtctcagcacgctctgagtcggttgcacgcagagctctaactgccgatgctagcattgggttctgctcgacaatgatatcgaacagagcatcatagtcccgctccttctcggtcatctcctgaccactcgacgccttttctcgctctgagttagttgcctctctagccctcaacgctgaggctataattgggttctggtcaacaatcatatctaacatagcccgtagcctctccttaagatccgcaagcttggcttcctggtctcgttgcctctccttaagatccgcaacttcaagttgcatctgaaggtagtcttgagacatctcttgtggcggaggaggaggtaccgtggaagaagctctacgcatgaagaagaacatatcgtagatacgctctttattgcggggagccaactgtaaaagaaaagaaaagacagttagtttattcaaagctgtcatgaatttatgtgattgaaaacggtgatcaaatagtgtacctcatagtacatctcatccatctgggtctgggaccaacccccagattgtgccgaactctgccaatgtccaactatctctgtcgagaccacatcgtggagcctatacgcgacaacttttaaaattctaggcacttcaaagtttgtagaatcattctcttcggcatctatctccatctcatccaaacacgggaaatactccaagaaatgccttatcatctctttctctcgaattgttccacgaaaccctctaacctctaacttcttcactggacaagatatgagcgaacgacctttgtcttcccgcgaaatgcagtcacaagcatccccgcatttatctgtcacagagtgtaagagaccctgaaagcataaagaagacaataagacgattgagtctaaccaacaactttaacaaatgtgttgtccgagtagttttatggtctgtaattgacctcaatgattagaaattctagatgtggacagtttctcagaagagctggcactgcctgccaaccgcgaccctcatcacttttaagtcctaaggttttgaggttgttgaacacaggcattgattcacagcacatagtaagaacctgaaaacaagaaaaaaaaaacccgaatgaggtactttgcaattgatctttcaaaaatggaccagagagaacataatagaaaactgacctcaagagtatcttcagttaagtaaagtgtctgaatattttgtatgccgttaatgagcttcaccacattgcaaaattggagaacaacatcaccctcatcatcctctaacaaattggttctcttatccgcttgatctgatcttcattttttattataagatggattcgagcctcaagtaactttcccattttaactaatggataatcctccgcaactaaatcagaatagtttaagtaaagcagatttggagtatcaatagaaatgctctttggatgttcaaactcttcaacaccggtgccgtggatacttagcttcgtgaggcttgcacttgacatggtttcatctaattctctccactccatattagccatgtgtacttcctcaagcacagggaaagaagaaagaaatttctccatctcaccaaagaaaatcaagtccgagtcaatattaagacttttaagatttggtaaggaagcgccaatatcccaatgccaccaattaacacagtgttcacttcttaatttcagcttaaccagtgttctactgacgaacatctcttgaggtagcctataaccaccatcctcttcggtatcctcatcagaaaaatcagtgaaaagataaagatccgaaacaccacgctgcagcacattacatatccaacgattcacatgatctggatgaataccagttatacacttgagggagaatttctcaatgggagaatcaccctgcaaagccagtactccgtccacgaattccacgaagctctgtcgaatttcatccctttccgctttgccctcttccggatgaagaaaatcagagtcatcaatgtcaagattagtttcaaatttccacagattgagccagctcttggagagaaccgaagtcaaagcagcgtgcttggtgggaaggaaggacaagatatgacaacgaacctcctctggtagattgctgacacgatccatcttctgtacacgagattaaaagtacattacttcatctacaactagagacagctttaacagtaaggtaacattaagcaatcaggaatctaaaacatgaaatcaaacagctttcccccaaaagaggagaagtgggaacagagataaacccagttcacagaatcagtagaaacagagaagatgattaaacttcagcatttacctcgttacaaacgcttaatctagtatccaaatgttggggatttcagtgaatgcgtccagtgggaagagagagagcgagaatagattgcttaatcgctagttcatatggccgtagacgcaaagatatgaagtcaacgcaaacatttagcggaaggtagaggggaaagtcccagactttcagttcgagaagacatgctaatgcatcggagaagccgaaaccaaattgaggattttgcattgaaagcggacaccactagtccactacactacaccagtgaggtgacccagtcgagtttaggctccggtttcggtttattgggtaaacgggtaaacaaaccggggcagtttgaatttgggctacgaaacggcgaaagtatggtggaacaagtcaagcccaagtaaaagcccagtagcaaactggtaaaacctggcctgtggctggttgttgcaagtggtggtatttaaaacaaagtctccttcctcttcttcttaaacgttgggtttaaaattgcagagaagtctatctatataaagagccatagagggagaagaaagcaaacttgtcgaaagaaaagcagaagatgtcccagatatatatcaaatatctgaatgaaatggtgtcgttttaatttagcttctaacaagaatcaaaaagagcctttgacatcaaactatgagctaagtttttcccaagaagacttcaatcactgtgcagtccacttcttatccaaggaactacgcaccaggaactgaacatcgcaactatagaactcgttgtagagtctgagcatccgcgcaataagttcaaacatcccagggacttcaaggtctgtgcgagtgcgacccttctcttcagcataaatctctaccttctccaaacacctaaaagagtacaagaaatgctttatcatctctaactctctaattgttcctcgaaaccctttgatctgtaacttcttcaccggacaagacacgagcgaacggcctttgtcttccctagacacgtagtcacaagcatccccacatttattggtcacaaaatgtcttagaccctgaaagcagataagtatagagtaagggaattcaaagaatggtctctgtcattgttaatgtttgacaaatgatctgtgttaatacctcaaagaccagtgtttctaaatgtgggcagttccttaagagaaccggcattccctcccatccttcattctcggcagtcttaacacttaacaatttgaggttgttgaacaccggcatcgatttacagcataaagaaagcacctgaaacaaggcaaagccaaactcaacattacaactgcaatatgtccaggattgtttcgatatataaaagcaggagccttagaacaacaatgaagtgtgcattagaacctgtgaaagggcttaagaattgtacactcggaataacataaatttgaatctcatacttccacaatttagatgggtttacttgagtgcagtgaaaaaaatactatcaaaacaaaataaaaacagacctggagagtatctaaagatatgtaaagtttctgaacatttcttatgccactcataagcttccacccatttcgaagacgcagaagaacgtcgtcctcatcgttatttggcgctcttcctcgcttgatttgatcttgatctaataaaaggctgattcgagcctcaactacgcttgtcaagttaacttttggataatcctccgcaaccatatcataatactcaaagtaaaccagacttgggatatcaaaagagatgctctttggatttgaaaagttttcacagccaatggtaaagatacttagcttcctgaggcttgcacttgtcacggtttcatcccaatccggccactcattaatagacatggataattcctcaagaacagggaaagtaggaagaaacgtctcaatcgtatcacaacgaatccaagctgagtcaataatgagagttttgagcattggtaagacaggacctagtctagcccacgctacccactaattaacacctaatgaacatcttagtttcagctcgactagtgactcactgaagaacagttttcgaggcaaaaaagattcttcgtcaaaatcgatgtaaagatccatgtccaaaacaccacgctgcagcacgttacatatccaaccatcaagtcgacgtggatgaacaccagttttacacttgagggaaaacttcttaatgggagaatcagcctgcaatgccaatacattatccacaaaatccatgaagctcagcagaatttcttctctttccctcttcccctcttcatcaatgtcaagattagggacaagtgcaaactgatttcgccacctcttggagacaacagatgccaaagcagcctcttttgtggtaaggaaggataatatatgacagagaacctcatctggtagactgctgaagagatccatcttctctgcacggatacaaaggaagaaattaaactatcaacaattcccaaataggaaaccacccaaagcaaaaagattttgagactgtgaacgaaaaagaatgcccaaatgagaatacaactagtagaagaagaagatatgaggtaacttcagcagctaccttgatacagagacaaagtccaatactttcgactcttaagccttagggaaaaggaaactaagcaaaattcgcagcagtaacacttgaaattaggtcaactcctcaacaaaggcgtacgatgacagtgataaaagagaggcgaagtggtgaaacattggtttctatgaccctacaaacaaacaaaggtctcatgacaaatctataaaaacaaacatactttcaaaatggagatagaaaaattcgagacctaccttgggaggaacaaacgctaaatcaaagacctagacttgggtttcaatgaatgtgtctgtctagtgttcctttatttaaatatcatcgatcgaaatcaaacgttttcgtcatgaccacgttttaaacaatgcgttttttcctttttttttatatattaaaatgctcctcctggtttagctccagaaaccgcacctgcatctgcaccatcagaaagtgattctccagctccggctccagataagtctggcaagaagaagatggcagcagctgatgaggctgaaccaccttctcgacgaagaacccaagaagatccttcttctgttgtccaacatatcaagatgtaagtagatttgaatttgttttttttggtgtttgatcggtaaaaagtagtgagaagagagagcccgtgttgtgtgaatagtcatggaaatgcgtcggagaggaagctgaaaacttctcaatttcctcctggttaggttcctcgattggtttggttctggttttgatttcttcgcctgaattcgtttggttttaaaccgaaaattcgcccggttttataatctcggtttacttaaccaaaacggagcgtttgtgagaaaataaaaaatgttcacaacatgtttacacctcatcatcatgatgattgatgttcataaacttttgtatgggaattatgagcttcaacgtaaccttcaatatggggtatggaatcaaagtaataaacttctatggcttcagttgggtcctgttgtagttgaaattgaatcttgttaagatttgtcactttgaataaaacgtcaaaagacaacaactcaaagcaaataactgatgaaaaatcctatcaatagaatctagctgacagaaaaccaagaagaaaagaaacagagtaatgctcaaacagagctacgaggaggaataaactcgaactgggtcttgcacttagacgatctaggaagattcagcagattggttctgagttgaacatgttcctcttcatctctttcatgagaaaaaactttgacaagctcaagacatgacaatttctccaggaaatgtttcatgtgcttcaactctattttagttccgctgtactcgcttatctctacggtcttcacaagacatgactctaggaaagaataatctgacaagcactcacaaataggctcatcatcgtcagactccgattcctcctcatcatcatcttcagaataaatctcctcagactcataaccatcgcccaactgataattgtagtgcaagggaccctgtaacaagaaggagaattagagattggagacttcattaggtgttgttgtatacctgaaatgttttggggtccataccccaatgacgagagactctagatttggagacttcttcagcagatatggcagagttcgccaacagaattcacgttcagttgcaatagataaacgatgcaagttttcaaatactgggattgcttcattggagaaataaaacgcctgaagaacaaaaataaaaataaaaatcataacctcaagaaacaatttcatatcaaacgagattttgattcttataccacccggaagcggaagtgaagcaacgataagtgaaaaggttaaaagtagcaaagagtaaaaaaaaaggagcacacttacagccacagtatcagtacttgataagttcaaggtctcaacgtttcttaaccctttgatcagattggttacgcttggaacagtatcaccacgacgtgcatgttttccggtccaggcgtgatgtagtggcaacgtaagagagattgtagcttcaacaagggagtcgagattaaccgtcggatatgatttcggaggaagatcatagtactttaagctggttagactcggagtatcaaaagtaatgccctccatatcataataagtattaccaaagtgatatctgtggttcatagtaagtttctctagggttggactagacactctgcgagaccattgccaatgctcccattgcacattaagcatccttaactctacaagcacagggcaagaagacagaagcttttggaacgcacaaccagattgatcagagaattgaactgcatcaataatgagagtcttaagcgccggaagaagagcattctcaggaacaagatcaatttgtaaaatagacccaagttcaagctcaacaagcgtcttgcaagtgaagacttcaacaggtagtgaatatcttccgtcgagggtaacccatatatcaagtttaagcttcaagacaccacgcttcagcacattacagagaaaacggttgagatcagcatcacgatttggtccatcacgcccgcgacgttttatagagacattctttatgcgggtactggccggaagagccagcaaaccattcaagaaatccgtcaaacttccttgattctcaagtgtgttatcaaactcaagatttggtacgatggtatagatattttgccacctctttgagagaaccgatgcgacagcagcgtcttttgccgaaaggaaagatacgatgttactaatgatatcatttgatagactgctgattctatccatctctttactcaactaattggaagaaagttctcgatctacaaacatagaaacgtcataatacgattctctggaaacgaaaatactttgaaagtggagatatataccgaagatatgcggagaagaagcaatactaactacgtgagactataagaaaccatggttagaaattttcagaaataccttactacgggagagccgagaggcgagaaagcagaagagaagtcacaaactttgactttgagaggacgacgtacaaactacaaacgcagccgaacctatttctatttggcaacgagaattttagggtttcggaaagtaaatctgttcggtttactttaaggtaacttgggagaaaaaccaaaacgaaaatttagggttttggaaagtaaagcggtttggctaactttaaaattggtttggttggaccagttttaataaccaaaaataaaccacaccgaaccaaatcaaatcaacccataaacttaagttcgacaacggaaagcagttgatgatgaactcgataccaaggtagaggatgaatgttttgtgtgaggaatatagagaaaaatcattggaagagtaataagagagagctttgagaagagagcaaactagttgaagagttcaattatgtgcacaattagtttaaacattttaatgacttcgatgtctgaatataattctcttcaacatatatactcttatatcatttccatctacatgtgttcctcaacaacatatatgaatcactaacgtcttcactggacaagatatgagtgaaacaactctgtccagtaacatatgtataaattattacacaagtggcacatggtttgtaagagagagggagattatgagcctagcagcttcttccacctggcgtaaccaagagtgaccatgaaaagcacaatgcaaagtgcagtaacactccacacaaagtaaccaaagacgccatgtatgctatacaatggacatggtatgttcattccaaacaagctggccaacaatgtctctgcggctattgcaaacgaggctatggtcagcgtcagctgcagctggatcagttcgtttcgttgattatccagttgaatgttcacgtagtcttctgtgtcgtcaatgtactccctcactgtaagaatcttgttccgcattccatccagttgcatgaagtatgcctccaacaacatctccaaatcctccacgtcatcttcctctgtattgctcgtcaccatactcgcacttctgtttgatgtgagccggtgaagatttgatgtattatgtgctgggagggcaatgctgtttgatgctgtacccgccagtattgcctcggtttgctggttctggatccatttccttgttaagtataagtcagccatgtcttcgttgtcatctaacaaatgctcgagttcatctctcacctgaataacacaacagtttaatgtttccatccaccacacaacattatagtatcctgggaaatggtaacttattaagcctctaccttttgtacacgagctagcaagcgggtgagattacttttcaaacttcgtacatattcaagattctcagtgctgacattcttagtgagttcatcaaggacaggccaagctt

SEQ ID NO: 1369 - DNA, 89517 bp, Arabidopsis thaliana
gaattcgtttggttttaaaccgaaaattcgcccggttttataatctcggtttacttaaccaaaacggagcgtttgtgagaaaataaaaaatgttcacaacatgtttacacctcatcatcatgatgattgatgttcataaacttttgtatgggaattatgagcttcaacgtaaccttcaatatggggtatggaatcaaagtaataaacttctatggcttcagttgggtcctgttgtagttgaaattgaatcttgttaagatttgtcactttgaataaaacgtcaaaagacaacaactcaaagcaaataactgatgaaaaatcctatcaatagaatctagctgacagaaaaccaagaagaaaagaaacagagtaatgctcaaacagagctacgaggaggaataaactcgaactgggtcttgcacttagacgatctaggaagattcagcagattggttctgagttgaacatgttcctcttcatctctttcatgagaaaaaactttgacaagctcaagacatgacaatttctccaggaaatgtttcatgtgcttcaactctattttagttccgctgtactcgcttatctctacggtcttcacaagacatgactctaggaaagaataatctgacaagcactcacaaataggctcatcatcgtcagactccgattcctcctcatcatcatcttcagaataaatctcctcagactcataaccatcgcccaactgataattgtagtgcaagggaccctgtaacaagaaggagaattagagattggagacttcattaggtgttgttgtatacctgaaatgttttggggtccataccccaatgacgagagactctagatttggagacttcttcagcagatatggcagagttcgccaacagaattcacgttcagttgcaatagataaacgatgcaagttttcaaatactgggattgcttcattggagaaataaaacgcctgaagaacaaaaataaaaataaaaatcataacctcaagaaacaatttcatatcaaacgagattttgattcttataccacccggaagcggaagtgaagcaacgataagtgaaaaggttaaaagtagcaaagagtaaaaaaaaaggagcacacttacagccacagtatcagtacttgataagttcaaggtctcaacgtttcttaaccctttgatcagattggttacgcttggaacagtatcaccacgacgtgcatgttttccggtccaggcgtgatgtagtggcaacgtaagagagattgtagcttcaacaagggagtcgagattaaccgtcggatatgatttcggaggaagatcatagtactttaagctggttagactcggagtatcaaaagtaatgccctccatatcataataagtattaccaaagtgatatctgtggttcatagtaagtttctctagggttggactagacactctgcgagaccattgccaatgctcccattgcacattaagcatccttaactctacaagcacagggcaagaagacagaagcttttggaacgcacaaccagattgatcagagaattgaactgcatcaataatgagagtcttaagcgccggaagaagagcattctcaggaacaagatcaatttgtaaaatagacccaagttcaagctcaacaagcgtcttgcaagtgaagacttcaacaggtagtgaatatcttccgtcgagggtaacccatatatcaagtttaagcttcaagacaccacgcttcagcacattacagagaaaacggttgagatcagcatcacgatttggtccatcacgcccgcgacgttttatagagacattctttatgcgggtactggccggaagagccagcaaaccattcaagaaatccgtcaaacttccttgattctcaagtgtgttatcaaactcaagatttggtacgatggtatagatattttgccacctctttgagagaaccgatgcgacagcagcgtcttttgccgaaaggaaagatacgatgttactaatgatatcatttgatagactgctgattctatccatctctttactcaactaattggaagaaagttctcgatctacaaacatagaaacgtcataatacgattctctggaaacgaaaatactttgaaagtggagatatataccgaagatatgcggagaagaagcaatactaactacgtgagactataagaaaccatggttagaaattttcagaaataccttactacgggagagccgagaggcgagaaagcagaagagaagtcacaaactttgactttgagaggacgacgtacaaactacaaacgcagccgaacctatttctatttggcaacgagaattttagggtttcggaaagtaaatctgttcggtttactttaaggtaacttgggagaaaaaccaaaacgaaaatttagggttttggaaagtaaagcggtttggctaactttaaaattggtttggttggaccagttttaataaccaaaaataaaccacaccgaaccaaatcaaatcaacccataaacttaagttcgacaacggaaagcagttgatgatgaactcgataccaaggtagaggatgaatgttttgtgtgaggaatatagagaaaaatcattggaagagtaataagagagagctttgagaagagagcaaactagttgaagagttcaattatgtgcacaattagtttaaacattttaatgacttcgatgtctgaatataattctcttcaacatatatactcttatatcatttccatctacatgtgttcctcaacaacatatatgaatcactaacgtcttcactggacaagatatgagtgaaacaactctgtccagtaacatatgtataaattattacacaagtggcacatggtttgtaagagagagggagattatgagcctagcagcttcttccacctggcgtaaccaagagtgaccatgaaaagcacaatgcaaagtgcagtaacactccacacaaagtaaccaaagacgccatgtatgctatacaatggacatggtatgttcattccaaacaagctggccaacaatgtctctgcggctattgcaaacgaggctatggtcagcgtcagctgcagctggatcagttcgtttcgttgattatccagttgaatgttcacgtagtcttctgtgtcgtcaatgtactccctcactgtaagaatcttgttccgcattccatccagttgcatgaagtatgcctccaacaacatctccaaatcctccacgtcatcttcctctgtattgctcgtcaccatactcgcacttctgtttgatgtgagccggtgaagatttgatgtattatgtgctgggagggcaatgctgtttgatgctgtacccgccagtattgcctcggtttgctggttctggatccatttccttgttaagtataagtcagccatgtcttcgttgtcatctaacaaatgctcgagttcatctctcacctgaataacacaacagtttaatgtttccatccaccacacaacattatagtatcctgggaaatggtaacttattaagcctctaccttttgtacacgagctagcaagcgggtgagattacttttcaaacttcgtacatattcaagattctcagtgctgacattcttagtgagttcatcaaggacaggccaagcttctgtctcaagagcagccacacttttatcaacaaatgagcagacgacctcaagtgcaatctccaggacctgaaactcaaaaggaagctcactctgcaaaccctctgcagcttctggatcaagaggagattgtacattcgcagaagcttgcagtgcattttcattcccattcctctgaggaaactgttgctttagtcgttcaacgaatggaagaacttcaggacggagaggatccaacaacaacacttcttctgcagtaactattgcctttatgacctctaaattcacaacaatagctttctctctggctgcagagcaaaaaaacaagcttataacttcagaaacacaatgtccaagctaatttgcagcaattgtgatcttatgacctaatccaggaattagcaaatcgaagtttttaccgagaatgttagaggagtgagagaagacagggccaagtatcctcaaatccctagcgggaacagaagcacgtttgatgattgtactcttatcgcactccaccacttccatagcaccagtccgatcaaacctcatccacagcctagctcctccggttttcttcttcgccttccccgtcgctcccacagccgatccgccagcatgaatcggtaggggaggcggtggagatgaaggcgtcgatgtctgtgcggagtcatccttcaccgcagaaccttttttccggtgacggatgcttgaaagacggcgaaacgataaggggcccttccccatggattccagccacgaaacaaataattgtttcagtcaacttcttcgtcgcaggtcagagatctggtggtggctgtaggagaaagcgccgatctctgccgcttcttcttcgctttctccaattccgatgaatccttcctctgccataaacgtcagggtcagtgaggaatagggttcgattgacggaaaaaaaaagaatagggttcgattttgtaactaaaactttcttacggcgaaattgctatagtcgatatcgatgtattgaaacggtatcgtttggtttctgaagcggtttggttttggttttaatttcctggccagaatcggtttggttcggacccaacgatcacacagaacatgtataatctattttatcgagttcaattctctgggctgcgtatgcatcgtgaaagactataggcccaactagataagcccagttatcgttattcaaacataattaacaagagaagaactcaagggcaatttctgatgaagaataaaatcaaaacaattcatttgagagtttgggagtttgagagttgaacctacaagcaacactgtacataaaacagtttaaattaacaaatagagcaagtagtaacaaactgaaactggggtcttgcaattgagtgatctgggaagctttagtagattgtttctaagacaatgcttttctatgggctctgttgcataaggacgaactttgacaagctcaaggtcaatctaatgaatctgttttgatctcctttagttccccggtaatcggtgatctctagcattttcacaggacacgacattaggaaaatatccggacaagcactcacaaacaggtttcatacttatcctcctcctcatcataatcatcttcccacatatccggacaagcactcagtcacaaacagtgtcatagatcttaaactgctcttaaagggtaacaatggatatactaatgttaggtttctgaaaaagttatcttttgcaaattgaacttattatattgagctttaaccatagtaaatgacaggaaacaatgcataaaaacaagagattttggttggaaacaaaacgtagagtgattcagttaaacataagagaagaggaaactaaggttttgggattaatttggtttggtttgaaaagaaactagaataaccgaagacaaattccaaggggactttggcaaaactttgagcaagttttgttttctcagagaattcttcctgctgcagtccacttttcagacaaataatcagttataaggagctgaacattgcaactcgataacttgttgtactcttccatcatctgtatgataactttagacacttgagggaatctgagctctgtaggatcatactcctcaacatagatgttcatctccttcagacacggaaagtagaccaagaaatgctttatcattgtcatctctttcattgttcctctaaaccctcgaatctctaacttcttcactggacaagatgtaagcgaacgacctttgtcttcccgagaaatgcaatcacaagcatccccacatttatccgtcatatagtgtaagagaccctgaaagcataaaggagacaataagattgttgagtaagaacaacatctttaacacatgttttccaagtagtttcatggtttataactggacctcaacgagtagaaattctacatatggacatttacttacaagaactggcatcgcttgccatcctcgtccctcctcactcgtgatacctaatgttttgaggttgttgaacagcggcaccgattcacagcacagagaaagcacctgaaaacaagaaaactagacattttgcaattaatgcttcacaactagacaaaagagaagaaaaatagaaaactgacctcgatagtatcagcagttaagtaaagtttctgaacattttgtatgccattcatgagcttcaccacattgctgaatcggagaacaacatcaacttcatcatcttgtaaccaatcttcatttggtgctcttactcgcttgatttgtttttcagtaactataaagttgattcgagcctcaaataatgccttcatgttaactaatggatagtcctcggcaactaaatcagagtagttaaaggaaagcagacttggagtatcaaaagaaatgctctttggatttcaaaagccttgacaaccggtgccatgaatacttagcagcttgatggttgcacttgacacggtttcatccgactctgtccactccatattagccattcgtaaatactcaagcacagggaaagaaggtagaaacatatcaatcgtaccacaatgaatagattctgagtcaatgtcaagagtcttaagcattggtaagacagtgcctctatctctacgccaccaatcaacataacgttcacttcttattttcagctcaactagtgtcctactgaggaatatctcagggatttcttaatgggagacacgccctgcaaagccaaaactctgtccacgaaatccacaaagctctgacgaatttcatccctttcccctttaccctcttctggaagaagaaattcagagtcatcgatgtcaagattagggactagtttccacagattgagccagctctttgagagaaccgaagtcaaagcagcgtgcttggtgggaaggaaggacaagatatggcaccgaacctcttcaggtagattgctgacaagatccaccttctgtacacgagatttaaactacagtatcgcaaaaacaggaggagacgaaattgcaaatagaaatttagcaaaaccccccaaaagagaagaaattcatcagtagaagcagaagaaatgagtacacttgaccatttacctcgttacaaacgacgcttaatcccaaaatctccagagaaaagacacggagagcgagagtttaaactttaagtgggggtatcaaaatgtcgaatctagtgtgagtgattggttctattttatccggtttagatacgactggtttaattcggtaaactaaatcaggaacgcctgaccttgggctaccaaagtatgatgaaacgagttaggcccacatatttaccactgggcttctctatttgggcctatcttaagaatcaaccactcaaatcaaattaaacaactcaaggagttgggagtgcttaaatcgtcttcaatttggtttaatggttcttgttaaacattgatgatgccttaatggttccttaatgtcaatcgtcttcttgctccttttttcctgtagttgcaataacaattacagaaaataagaaagaatacaaaagagcacacttacatccatagtctcaagatctcaacatttcttaaccctttgattagattggttggatcgctggtaaagggatcgtcatcatcttctacaagatcagttgtaaaaccaagattgagcttagcctcgacaagggagtcaagattaacagttggatacgatcccggaacatgagcattgtagtctaagtaggtaagactcggagtatcaaaagtaaagctctccaagttatgttcagcccaatatctatggtcaatagtaagtctctcaagggtttgactggacgcacagccagaccattcccaatcttcccattccagattacgcatcactgattccacaagcacagggcaagcagaaagaagcttttggaatgcacaacaaccacaacgatcatagaacttaactgaatcaagaatgagagtcttgagcgatggaagaagagcattctctagagaatcataatgctttaaaaagaatcagtatatgtctcaaaaaaagaagacataaaccgaaggtataaggacaagaagcaaaaataagttgcaaaagagattataaaaccctgacacatactttactacagagcaaaattcaattcccaatcactctagaacttgtaccttgtgtaataagaaaccaaaaaggaaaattttaggcttttagaattatccacgcctaataatatacatactgagtttcattttacagtttcctaagaatctatcaaagcaaattacaaatgaaaagcgaatcaaaacaggctccagaaagttgataagttcaaaataggacaacaaggagaatccgacaaaagataaacagaggatataagtgagtaagagtgttcactatccaaaatgatacaacagatagattgcaactaggaggatcaaagcttttaagaaaacgtgaccttgatcttgcacttagaggaagctctgggaagcattaataactttttcttgtcgctaccaaatcttgtaagagaatgaagtttcaccaacttgagaccggacagtttctctagaaaatgcttcaattgctccacctctccaggagttccactatagtcggttatctgtaagacctctaaaggacatgacaataagaaagaatatcccgacaaacagtggcaaacagatttgggtcggtcttcattgtagtgcaatggaccctgaagcaactcaacaagagaaaatattagaaactgaaaatcaaggagtatctacaaggttttattgcatttgtacaataaacttttgggtattgatcgtacatcgatgacaagagtctttagatttggacacttctttatcacaaatggtagaaattcccaacagaacccaattacagtatcattatttgtgatagttaaatgataaaggtttttaaacaccggtattgcttcatggaagtaagaaaatgcctgaaacaaaataaatcaattagtcattcattatatgtatatatttggatgaagacgacctctaggatatattttcatttatgtaacaagagaactggaacatcttaagaaacctaagatgcacacctgaatgttaaaacgattttgattcttcatatttttgttttaatcaaactcaaactgtaataacatgttacagagaaagaagaaacaatagcacactaacctgaaaagtattaggagattgcaagttcatgatttcaacatttcttaacccattaatcagatttgttggattgctagaaatcgtgtcgttgtcatctacatatccatggtacttgtgatctaccatcaacgtaagatcgagcttaacttcaacaagggagtcaagattaacaattggatagtcatccggtacagcatcagacaactctaaataggtaagattcggagtatctaaatttattctcgtaaactcacactcatagagatctacatgactaatagtaagtctttcaagggttggactggatatgttgccagaccatttccaacgttcccactccatattatgtatgactagttccttgagcacaaggcaagcagaaagaagcttttcaaacgcacaacggcggagatctttaaaccgaatatagttaagaaggagggtctcaagcgctggtagaaaagcatcctcagggacaagatcaacaacaaagccaccaaaatcactcccaagttccagcttaacgagtgttttgcaagtgaaaacctcaagtggtagtgaatatcgtctcccagcacatatgtctagtttaagatccaagataccacgcttcagcaaagcacatatacaacgattgaaatcatcataatgagtcggatcaaactctcttcgacattctagagagcaactccttacacgagaactggtaggcagagccaatactccatcgacaaaatccttcaaactcccttcattcttgactgagtcatcaaactgaagttttattacaatggtaaagagattccgccacctctttgacagaatcgatgcgaaagcagcttcctttgccgaaaggaaagatacaatgtgacaaatgatctcatttggtagattgctaatcctatccatcctcttgtcaaaccctagaaaacccctttcactactcagttaatttcaattgagacttcaaaccacaaattcaactaacattcacccactgcaaaataatacaaacaggaaaaggagtttcaaagcggagataaacacacttaacttcaacagaaacagaattatacaacagatagagtatatgtgataagaattacaattgaaagagatgagaaatcttcgaaaccaaccttagtacagatgcgaaggcagaagaagaaccttaaactttcagttcgagaggacatgcaaatgcatctaagaaaagaggaacattgaagaaaacgaaggtcttgtacaaaaaccattgcaagcctttttgggcacttgtttatatcgctgtttccacgtggcaaacaaagtcgaaccagaagaaattttggtttggtaataatttatttcgttagtaccggttctcgaaccaaataaaccaaaccggattaaactcagaaccgataaattatggatccgattacattcaagcagaaggaatcatgccggcttttcttgcataagcgaagattccaccggcgtcgatcaccggaccggcatcaccgagcggtttcagtttgtattctttcctcgtcgtatgattgatcagcaaactactaccgtcttccttgtgttcgattgtcaccacatcccctgttttgcactcgtcgcaaatcctaacctccgattccaacgggaaaatctcacctgtagctacacagttcctgaaaaagatcctagcgtacgattccgccaccacagctttagctcccgccgcgccgagacaaactggagcgtgttcgcgggaagatccgcaaccgaaattatcgccgccgatgatgactgagtactttgatttcatctctcctggaacaacgaaacgttcgttgtagaattttggtaagccgttaagcgcgaaagagccgagtttctcgcgatcttctggaatcgaagggatgagagtgccgtactcggcggggattatttgatcggtgtcgatgttgtctttcaagacgaagcagaggccgtggaaagtctctctggttattgactcgcctgaatcggaggatgatgcagcgacgcgtgtgatgatcgtggcggaggaggaagtaagtggtttgtaattgaaaattgtggaggcggacttgagttgcaagaaaggagatgggcagagagtacatgagtttttgtttgaggaagctaaggatttgaagagtgtagggtttaaaaattgctgagaagtcgccattgttctgctacttcttaagtgaagcaggaaacgaaacagagtcatttatagagggaaaatgaatatacaatttttaattacgactataagttagtatttacgaaaacgccattctaagtcctaaacgtgcgtattgagacacgaaggttggtcgttgtgtactaaaacgtggactctttcgttgttatctgtttgttaatttggttaaaaatattacactaactcagcgttcaagaagtcaaaagaatgaactgattattttttccagcaattttcagcaaatatgaatttcacactcatggtatacggaaaaaaattttttatgaaaagtgtgaaattgaagtagttaaaattaccgaaagtacaaaacttcacagggctgacgagtgacgactgacgacgaccatatttgcgacaaatctacaaactgtaattttagtgagggttttgctagttctgtttataggatgaaacaaaaactatttttacgatttcatacgcatattataccctaacttaaaggttcgtcatgtttagctcatctatataaaaatccggaagtaagaattataatattatgtcaaattttcaatcaatcacaacgctttccaaatgcattggaatatgagaacatccaaaacgcaaggaataaatttaggtaatattttggattggttcggtttagttctaaattcttggcttgatttacttttccgtttggaccgatttttaaaccaaaaatcaagaagtcctcctgatttgtttaccgagataaaccggtggattttggaggaaccaggtagaatagaaccaattgacatcttcaattttaaaccactcaatttcacttttctgttaaaccggtggatttcaaggaaccgggtaacattgaatcaaaattgacattttcaactttaaccctcaatttggtttactgccgtcttcctctttaaaaattgagactttattccctttacctctcgctgggcatcttcgcgaaccagcgatttaagcactcccaactctcactttctcccttctcccttctcgctggacgcattcactgaaatcaccaaatttggggcttggaacgaggtagataccgacttttactcatctcttctgcttctactgattctgttctccttttggggatttcttagttcaaagtttccttttggtggatttctgtttgcgttgttaattgggcttccgcttgctctgtttgatttcaagtttcacttattcctctatttcgatatttcacaaaccatgattgcctggactttactcatctgttaaatttcatgtttgaatcaattgtttttaccagtttcacgtatttccttccacttgctctgtttgtagatcattatcactggaactgtttggtaatcatgttactgctgatgttcttataaaagctttgagatttgtgtacttagtatacctcttctttcgtgcagaggagatggatcgtgttggcagtctaccagacgagcttctttctcatatactgtcattccttaccacaaaggaggctgctttgacttctcttctctccaagaggtggcgctatctcattgcttttgttcctaatcttgcttttgatgacattgtctttcttcatccggaagagggcaagccggaaagggatgaaattaggcagagcttcatggattttgtagatagggtgttggctctgcaggctgagtctcccattaagaaattctccctcaagtgtagaattggtgttgattcagatcgtgtggatggttggataagtaatgtgctaaaccgtggtgtttcagagcttgatctattaatcattttaggtatgactatggaagatagctatcggctgtctccaaaaggtttcgccagcaagacactagttaagctggaaataggttgtggaattgatattagttgggtagctgggagcattttcttaccaatgcttaagactctcgttcttgactctgtttggttttatgttgataagtttgagactctacttcttgctttgcctgcgcttgaggaattagtcctggttgatgtaaactggttagattcggatgtcaccatctcaaatgcaagcctcaagaccctaacaatagattccgacggtcatttaggcactttttcatttgatacacctagtcttgtttatttctgttactctgattatgctgcggaagactatcccgtagttaaaatggaaaacttacgtgaggctcgaatcttccttttggttactgataatgaaatagagcgagtaagactaccaattaatgatggattagaggatgctatggacaatgttgttctcagatttggacatgtggggaagctcatgaatggcatacgaaatgttgagtatctggagttgtctgctgatactctcgaggtcactatcctttttcttttctcacttttaatttttttattcccctggtctcgaggatataacagaaagaaattaggacttggtctcaattcctggagcacaatggtcatattaaccagactacttcctaggcatcttttgatttgtaactcaatcgatcggttcttagttgatgttttaacttttcatatgtgatttagttgtgttttatcctgttcttaggtgctttctctatgctgtgagtcaatgccagtgttcaaaaacctcaaatcgttagctattaaaagtactgaaggtcgaggatggcaagcaatgccagttcttctaaggaattgtccacatttagagtttctactcattgaggtataaaaacaaatcatttgccaaacatatacagagataaagttcatactttgaatctcttattgtttcgttatgctttcagggactcttgcaccatgtcacagataaatgcggggatgcttgtgactgcgttcctcgggaggacaaaggtcgttcgctgacatcttgtccagtaaatatgttagagatccatgggtttcgagggacaaagaaagagatgcaaatgataaaacatttcttggactattttcctagtttgaaggagatggacatatatgctgacgaggatggtcctacaaacctcgaagctcctgggatgtttgaacaaattacgcaactttttacactctacgacgagttttatacttgtgatgtccagtttatggtgcgtggttccttatataagaagctgactgcacagtgttgtgtcttcaaggaagaaaacttacctcatagattggttcggactcttggttagaagtttaaatgtataccaagtcgtttcagttttatagatctcttacattttctgccctgttcagaaaagtttgctagatcttgtcgcttatctctcttcctgtttcttctctcaatttgtaaaccctacgttgtcaaaatcttttccttgatcatatggagagaaggatttggctaccgatacacataagaattgattgaagaagaagtaggagaatgctctgttttgattttcctatttaagtcaaacctttcagagccatactattgaacatacagaacattttggagcaagatacttgcagatgacaagagtttccttatttaacgtatcattttcttggttgcttaagtaattcaggtacgaatacgctcatatatatacctaataatattgacgtatatgtttgcaccattgttccattgattcttgcttcaagtcaggttgtgcataataattattaattattaatttctatagagattatactagtttttgtaatttatttaaaaatctatatgaaaagcagttgttgtttttgttatcaaaccaattaaaagtagaatagcaattaaaagtagaaaacaacttattaagttttagaaaataataccaaaaaatttcgacatagtaaaaatattaaaaatgaactcttccaaaaattaatacaaaattaagaaaaaaacaatatagtagtcatatttcactaaatgtttttacatataatatttaagtacatgtgaatatgtgatagtaatttatatcatgatgcaagtggatatagatattctgggtattcttgcttattgtcatgtcctgtgaaagtcctaaaataactgataacatcagaactacgggagatgtggaacaatcagggcatttcttagggaaattgtcatgtcttgagctgttggaagttaagatttggggaacaagagacagagacgggttgcaaatacactaaggaacttctaatgcttcccaaagcttcgtccaagtgcaagatcatggtcaattaactcatgcattgtgcattccacaaaccaaattagtcttcactgtgcattccacaaaccaaattagtctccttccttttttcttgtaatcataattaaagattcattgatggtgtcctccattcccttatcattttattagttgtcacttgtctcatatattcaagagtagtataaagaacaatttacacaaaataatgtaattattctgatagaaatcgaatgtaaattgacattaccaattttttatatacaataccaattttcacacttttattcatgacaagaacatttacaactatgataggagtatacaaccaatcacaaaatgcaatacacaactatatttaattacatttacgtttttttttttttaccacatgattgattagttaatatcaatttaaagcagtatatgaatatcatgatcagagtaaaaattcatttaaaacgtcacttaaattataaaaggccagagtcgaaaacgacacctgttgacggcaaccaagaattcccgtcaatgaaacccgaaacagtaaacccttgagcttcagtcaacgtcaacgccgggtgatacccggcccaactaacccgacccgacaccgatgatccaggacccgaattcccaaattctccgtaataaagagtcttcaaagcaaagttactcgaccaaggagaccaacccgaagggtgaatcgagccgtctataaacgattgcatcacaacagtcctcgaatactgcttccatggacgacccaagtaagtcttggtcgaaccggttattctgcaattatggatagaaataccggtgttctggttcgggtcggaccggccttgggccgtgacgtagttctggtccgaggagcctttacgagatacgaggttgcagctttggaaaacgacggcagagtttccgaagatgaaatcgacggtgcctgttatgtcggtttctctatagaactgtcgtttggagagagtgtagagtgagtcttggtacccatctattgagcatctgtataccacggacctatctgatccgacccgtaatgctacagcttgctccgagtttggtccggcactgttcacgaatgttatgtctcgagctatgaatccatctcccatggcggcttccataattaaaccaaaatttggaaagggtttagtacttcaatgagaaacaaaccttaaaatataaaactgtgaagttgaccgaaacaaaaccttaaaatacagcataaaatatcataaatagaaaatataacacttctctgaattaccttagttacatgtaaagaaaaaaacatgagagtattttaacacaatcaacttgtaaaattgtaaatatttaaacgaaaaaactaacctaaaataacacataagaatacaataatttattacttggatcttttaaacatcttgacttatttaaggatagccattagttcttgattcagaaattttggttttctaaatttgaatagaaaaacagcctatatgaaggggaaaaaaaattctatactataaaaagtcatttactaaatgatttgatgcaatggtattaaaaaaaaaaattgttcactgaattgaataatttagtaattaattttagtgaaaatctcaccgacagtagcggattggtaagtattccagccgcctctgttacttctgctaccgacaatgactgttttgcccttcccgtcaccgaccaacataacgttcttctgtttgctcggaatattcagattctctttataggttccggctgttaaatggattacgcttctgccacttcccttctccaaagacgccaacgcttcggctacgctcatgtgagtcccgcttccgtcggctgccaccacagcgtgaggtctcagctcttctactgaagcttctaaaagcttccggtctgacgaagaaacccacgtcggaaaatcatgatcggacaacagtttccggccaccagttagattagacgaagaagaactcttctgtttatcagacacgaacatgtctagtgaattggtcagtaaaccggtgaggtttcttgcgaaagaatctatcgcaattccttctttgttgaagctagatttctcactgaggctttgcttacatgtctcttgattagtcaacgccgcgcttagccacgtatgtacatcatcattgacgtgatctttacgcttgatgacaacgatgcgatacaacatgtcgagggtgtcgtcaagcagctcaaggcagtcgttgacaggatctagcatgagggtttgagaagtacggtgcgaaagcgtgagattaaaggcgagagaacgagcaaagagagcgtggtccaagctgagttggactgagctgagaaaccctttgttggaagaagttgagggtttggttctcgaagatgaatcggagtttgggtgtcttgagatttttgtgaatttagagtttgatgaatgggcaaatactgaagtctgaagggacaagaggttcaagactaggaacaacattagtttgatcccgaacttatgatttggtaatgagaatgatgtagttgccattgtgatatatgtgcaactttgatgattcgtgtgtagtagagaagaagtgttatgtgattgctaatctatatatagtttcgtaataaactactactaggttattaagaaaaaaaactaaactagaactaggtgtacgaagaaccttttgaagaggaggtggaccaaattcataaattcgagttccgaaggacaaggttgggaagagactttttattaatgtattattgcccgttatgatacatcgggttagaaaaattacgagtggaaatactcttaagaaaaaaaggtcatatatctttagatcaatattattacatttctaagaaaactcaaatgataagtttatttgaattgattagcatatttcttaccgttttcttaaaatcttatttttgattgaaaactatatatttataaagagatatagttttattgaaaactatagttttactgtaatgttgtcatgttgaaactgttgacatatcaacatagcgtttaacttacttgtggttttaagttttagtgaatcagtcaatataaactaaataaattttcttatatataaagaatattacatttgatcgagttttgtaaacaattggttgtattagtgacaataatgtgtgagttacttcgatggtaaaaaaaaaaactgatctaaatttttttcaatcatactttgtcaacatcaatgtgtttccgttttcaaatagattgacggttccaaaataaataaagtttcatacttaatacatccgtggttgtaattaattctttcacgattttacttctacgcagaatagaatcttgtaggtgtatgatttgactattttcttctccatttttatttcttgttattacttcatgactcttaagcttcaaccaattatataggaaaacgaataaggaaattattatatataaacctattgaagaataatccaattttgaacctttttggatataagacagccaccatctcttcctgtccggtaataattgatggctttttgaaaggttgatttgtttttgtttctcaacattttattggtttacagtgatacattatctctttatgtttttcgattacaatttacgaatttttattgtttctaaaaactataaatttataatgattcgacgacaaaaagaaaattttgtttttatttaaaagttaagaagaaatgttgcatgagatgtaaatgttataacaacttttgaataagtgtttcttaattaaatgattatataaatggaccccgatattaattgttctatgtatgtaatgattttaatgcaaacccttagacaaaagcagaaacctttagttgggctttagatgttgccagactgtagcaaattagtaattagtatttgatgtgcatgctagcacctatttttcgtctctttacgattctgcggatgtatatgatgtgttaacttttttcagaaaaacttttttctgtaattagtggtttaaatcttataggattgtctgatttatggtcgatttgattacaaaaagttaagcagaacttggtacttggtccttggtaggtccttggtgaggattttcaaaaactatatcaacaaaacatgattgaccatgatatatctacaaacttgaactgtttagaacgttatatcgatatttgaatcagagtttcaattccaaaagaagtttcatatatatttccgtggaaaaaaaattcacatttagggttctctttttattgagctaattatcagctaatgcgtagttaaggttgtaaacatttttgttgatctaaagttaagtattccaaaccaattaaacgatatgcggatgcgagagatagtttttagttacgtaccaaagtattattgagaaatttaagacgaattaatagcgcatgatatctgcatggataaatgattccacctaacgcacatggatatgtaaatttgtaattaatgagatagatatctttttctcggagaccctagctcttataagatttaatggccgcgacacacgtcactcgtcgtcgtcactgcatgctactcaacgacttggacccgccgggaacaaatttaagccgcaactaaatttcaattattcaaagagaacttgtcgattctcatttagtgtattagaatttgtattacttttagtataatactaccatgattagagtttttcgtgtcaaaaacctcaattcatattaaatgtgtttacggattttgtccatttaacagtattaatgtctacagaaatatctacgtagaaaatttgtgttactccattaatctgatgttaatggaagttggagagtgaagagatcacattatgatatctcgactctatatgagccagctgttagtatctttatataatatttgaacttatatcgcatggaaattgtgtaagatgaaactttacaatgatattaggttaatgtccaaaaaaatcaaaaataacaaataaaatgaaaaagtgagctgaagaaatgagccataaatatgtttaagaatatgtgggccaaaaggaattgcacatttcgatggtaaggcacagttttagggttagatcatatgcttagtaaataatcctatcatgcaacgatatatgttatcaataaacaagtagagattcgaacaagattatggtttgataatagtaaatgttggtcccccgtagtccgatacaatataaaggctactatatctttattttatatagggagaataacgtaggttaagtcatgcatgaggggatgaaatattataaattgataaaaacaaaaaaaaacaattccaatacttcgtaggaaaataaataattttgaagtactgcagaatggacggaacaaagtgggtgggttttgcttttaggtgacctctatagtatcaattataatccttaaatttgtagtagtaccaaaatgctagaagatagaatcttcttttaactctcatgggagaataaagaaaacatattccgttcatatttatagaaatatagacacacacgtaaacacaaaaagaaagaaagaaaatatgaggaagattagcgaaacaagaagtctaccacttgggccatggagatgtctttgtctgtgagttgaaatctgagctggaaaacatgcatgccactaaagactaaacacattgatgctctatagtacctatactcatggatttatagatttaaatcattttttctaatactaatcacgatcaatatgatcgtttctttttcattctatcgcaactttagactagaaatttcaagattcatctcgatatcgttctggaaaatacgatcattaagaaaatatactgtccatacatatctatctataatatatagataatagatccatgagtcatccctcatgcgtaaaagttgagaacgatatttttaccactcgattaccatctattcattacaaaaaatatttagtacgtactattttaaagtttttttttcttgtttaaatgtatattaagatttgaatcgcaaggaattaaaacggacccaataaatattaagacgatcgatggttgtagaatgaagccaaagaattgacttattaaattagaggaggtgaagtcagcaagtatcatgttcgcgtacacaaaaatactatcccctcgatttttctttgcaacatttactagtatttatgaataaagcataatgatcatatgaattatgtggatataggtaattcactggtattgttatcatgtccgcattcagattcaacacaaaaagtttttgattggatattatatgagatttttacaagaaaatatgttatgatctattgtcaaagagcattctaacatgtaatacaattatttgtattagtgttgttgttgtgaattactaccttgaatcaaatctgcatttatgcacgttgatgataaaataaaataaaattatagacattgtatggttatcaaaagaagatacatacatagtactacaaatttaggattagaaaagattagacgggttaaatttccggttgtgggtgcgtaacaaatcaatcgacaacttacaatccataagtttttcgccaaaaaggccaaagataacgaatatgatggtctatcactattttgtgaacgtcaattactacttagtcattgaccttatttaactaactactagtattgaactatatatatacccctttttataagttacacgtatatataccccaatcaattggattaactgcaaaaaaatcactttcatggaaattggtcgtattctcgatccattaacctcgtaataataatatgtcagtctgtcggctgtcttcgaattatcttgcccttgtaaagatgaagattggtttatcaaataaataaaactagaaaaagctttagaaatgaatgcagactaatgaatacgattaagggattgaaattgattgatttgatttcgattgtaaaaagcacgaaaacgaaggttttagaagtgtcattggcacctaacgcttttgttataattcgtttaacagaaacgaaaagtcattagtccacagatttatatacatttcaatactaattaataaaggcaaacaaaaagagctaattttaactcttcataatttcttgtcattggcaaagaaaatatgaaagacactcaacgaacggtatgtgtaggttcacccttctagaagtgtcattcgaattgcaaaataaacgtcttcaaccaaatgaggaaatggtttcaatatcatcgaaactcgaaagatagcatcacttttttttgttctctagttcttatgattttaaaatgaaggttctaattaattaaacaatgtggatttgacaaaggtgaaaataccttaatcttaaaaatagatatcattgttttgataaaccctgaatgatgcacttgatctaatcataacataagttgacgacgaaaaaccctaataagtaaaccatacttttttttacatacttacaaaactttataaaaaaaaaaatccgaaaactgtaatcataattgatattacaatactgatataattaatctgttgacttcgagcattaacacaaataaaatttgtgtatcattttactataaacaatcatggaagagtagatatttgagcatattaacatatgacatatcaaacaatgaccattattatgcaaatataattctaatcttatggtagtaattcaataagtttataattatcgtatgacaaagattaacaaagcaaaaagcagaaaattcgtcgtttattacaatcgagatctacttgaaatcaaaattacagacagtgaatggagtgatatagcattacacgtgtggagaaacaagtgcgaagtcaatatggaaaataattaaataagagagtctggagtttccacacacgtgtaatgatatatcacagagcttgattggcgatggctgggaacgaacagtgtaaagaacgactcaaatcaagcaataataaatgtgacaaacatagataatagtaataaaaaaaaactatgtgctttttttttatatatgcctccaaaatcccaatcggagaacataaaaccccccaaagggtttctgtgttctgtctgaaatgaaataaaataaagaaaacccgaaatgggtttagtcttttgtcttgttggtcttatggatgattaaaacaaaaaaaaagaatgatgatgatgatgatgaaatgcaaaactggagatggcagagattggtctctcttaagacatgaactgactaatgagagtcgaccagactcacctctacaagcctctctacttttgaggaatataaagaggcttatgaaaaaatgcagccaattgagagcgccaacgattggtttttcaaggactgagccgtggataaaatcaggaagcaaccgttgcagaagattgcttctcaagtttctcctttagaatctctgctcttctcagctccgtgtgttgagctattgtgcttgcgagtccatggtagtgcgggtctagtgtctgggtaaggctttggaaccttggcgagtctgatacttgcattgctattacaaaaagaaggaaattagatgacaatatgtcaaatatatatacatggaaaaaacaatatatagagtatcagttctcttgtacctgtgactgcatccatgaagagtacgaaaggatccacttcatcaattggagattctaattcctcgtcatcgctaaaatcatcgtctgaaaagtcatcatcatcgctgtaagagcggaagtcctttgcctaatgataatacacaaaggaagtaacttagtgagctactacgactagcaaatttcacatttcatgagatcagagtagaggattagtttagggtcaaagaagacagacctgtgctgctaacttgcggagtgtacttccatcagtttcatctggattctcgtcatcgccgtcctcatcttcatcatctgtttggaattcatccatgtcgtcatcatcaccatcttcatcttcttcttcctcttctgcctttgccgcttctgtcacaaatgttcaaataggaatatcagcgaggtctgttataagaaaaatgagagatatgaaaagtcactgaccagcaagttgatccttgtatgccactaaaagctcgagaagagccctgaatacatgtggcaagacctctccaggcaattgaccagctggaaggctgaaaagtgatgtcaaccccaagatgcaaactttcttatcatgttctctgcatgtgaaccaaggaagaatgttatcttgaaagaaatgtgaggagaagagagaggagagagtgagatagaggttaaaaaaatttagattcacccacctcttgaagttagaacgtgcaccactcttcttcttttcttgcagcatttggaaccatagagtaaaaatttctgttgcgataccaaatcgttgcagtatgccaagtgccaaaggggtattgtagtaaaaggcatttgcaacctgcccaagggtatcaaagcagtacattcagcaattaatgccaatccttagcttaactcagtgacagacagcttaaaaaaagtagtaattaactctatgaagctaaaaataactgccgctactttccttaccacttcaaccagaaggcacttgaaggaagatttctcagcaccgcgtagccgatcaagtgtgattctcaggtagggttctacccattgatccacctggcccttgcatgtctgaagcactatccctaatagcttcggagctggctcgaggtcactgtcatcaatatttttattcgccataagctgcacatgagaaagatttaacaagttaaaccaacataagtatgtgtacggtggaaggaaaaaaaggatgaggccatctactgttttgtttatacgagtaaacgtacagaaactatcagatagtgagcttaccacagatatcacattccaaagattttgctggtaatctggttccttgcaagtaagataatgcccagtccccctggatatatagttgtgcaacgggaccaatatatctaatattatccaataggacgatcaaagaaaaaggaaactaaattaggaaaataaaatgaaactttatgaaaatggaaacggcaaaaaaaaacccactaccggtatcgtacttgggaaaaagtcaatagcccaatccacgagtgcttccatcattaaaggccatagactccacatctccaatgatattgtaggtgaaaaagtagtaatatatgagacgatctccagaacctcttcaaacacatctggccataatgaatgaatgaccatgattaaaacaaactccacatgtggcataaaccacaatgcgttcaaaggaacccaagaaatgactaacatgtcaaaatatatggagtctcttaaaacattatgcataccttgaccatcagttgtcagcattttccgcattattggcagtaactgtggttcaatctgaccataaagatgagggagactactgatagattcaagaatggtactgatggcacggagacatcccactgcagccaatgcaccagcatcatcagtttcatcatcaccgttgtcagtgtcgatacacctccagaaagcactggcctggaattaattaacaagaacaaggtatattagtgccaaacgtaaaacaacactcaaaatggggacacaacagaatattatcttaccaagttttggcacaaacccaaagcatacggagaaatctcctctccaaacttatacacaatagtctctaatgtaaaagcaaggtcttcgttttcaacttccttcattagcttgaaaaattctgcacagcacaagtccacctcaattatttcagtagattaacatgatgtttggttttagcaaatcattcgtaaagcataccatcaagaagttgaggaagaactgggcggatttcatctaaatctgcagggcaaatacagttagttgaatttctactaatccacgttaatacaaaaaaatcaggagaaggaaaaagggcggggaaatcttaggaagagatagaaacatatttttggtggtgccgatacttacctttgcaggcttcaataaatgaacgcaaagcaaaaactgaatccacccgaacaggaagttctagatcacacattccggagataacacaatgcaatgcctttgaaaaattgctctggtctgagaaatcgatattggcgtactgccctgcaacccacgcagcctacaaacaggaaaaatgaggagaaataagctcgacaagttatagtatccacgtggtgaaagcaatatggatgatgcaacatcgtttaacacaagttgctttgtcgcagcagcgtctaagcaggcatatcatataccacaaagaatcttccttcaagaaactttacatggtagtgatgaacaagtatttcagttgcagcggcttcacaaagtagttatagagaaatgcaagcatttggaaggatggagaaaaatcttaaaacatcttcaagcacatgcataaatgataatgaataaaagtataatttgcataacagaaacggacaagaagggggcttaagcatcaaaaaagaagtcaccaaaaccttagctctaagatgaccagctgggctgctaaattcaggaaaaacatgttgcactaacatattctccagctcagatttgtagggttcagtttgcctaagtttatcacaaagtgtcccaacagcaagcagagcaccatccttaaggcgataaggcttgttttccagagatgcttcattatatctaaaacaaataaacaaagtaactatatcatgtgatgatgtcacaattatataatacccttttctattatttgtagataaagtttgaaggtaacctcttaaaaatgtccacaacgaactgtataaattttgggaagttttcttttccacgctttctgaccagctcagtcacaaagtccatagacgcagtcctgggactgtataaatcttcaattatatctgtagaacaggtaatgttgttataaaaatatatgttttcggattatccaaacaagactaggaagacattaacaacataccataacccttccttacatactcatgcgggtcttcatcccaaagcatttgatcattatcattgaaacacataagtgggaaaactatttcaaataggagagtgttaaggtggggctgcagtaagttgtacatgctactcttcgagatactgcaaaaaacacaaatagccataagaagtctagaacccaataaatgaaaacgaaaatctagatacacaaccattatcagttttcaaggaaacaatagaaactgcaactagaaaatctacccaaaacattctaccaatggctctgacaacaggctgtgagaaaaagtatgattacaccaacggttttataaaatcaaaagaaaatataactaacaaaactctccaataaagccaaaaatatcatatcatggggacatcacgtgcaatgatttttccagtttaattgatccagagaactcatattcagataaatttctaaaattgatcaaaagtaggccatatagaacatccgacctgttgcttagatattgaagaattaggttgatgactctatccggaagatatccacctatacgaatggcattcaacaatttcaggtggcactctaatatcttggctgcatagtttatctggaacatttgagcaaaggctttgttatctggattctggagtttcagatctccaaacctataacaagttttcaaaactgttatttaaggtagatgaacaaatgctaggttataagttaacggtaagattttcatgtccccgcataccgagtgtatagcctgtttaagatatgagcaatccacttcttggccttccaccatccccaggattttctaagctcagggtcttcaggctggccttctacgggaacaggacgttccaaaatgtttaggaacagacccatccaagcattaaaaaagtttggatcaaacaatggtctcggaagctctagctgtacggaacaaggataaaagagaattatatgaaaaaacttcaaggcaaaccaccgaaaacccataaactccttacaaaattcaaaatccacaaatttctttagttgaagccaggaagcaggcagtgaagaaccattaatgataatgaccacaagatttacaacttacataaatacatgaccagaatatcttgcaaataagcttgatatggtctgccacttcgagagaaggattttcaacatggacaagattgttaaatatgttcaacaggtggggaaaagtctcctcgactactcggtgaatgggtgccctatcttcatctgacttaaacctataaacagaacgtgggaaaagcagaaagagaaatttttaaaaaaatgattatatttttcatgatgtttaatgtaataactgataatccgaactcttcgcaatagacagaaaccccacagcatgtaaccccaacttacctaaatgcacatctcttttctactaatctgctactgataaatatgccatgctttgcaagttcaagagttgataccatggcagaaacataagcaggagatggcaacaaagatatgaactctctatgactatcaaaattgaccagagtagataaaatctacatatcactattaagtggcaaaaggtgtagaggaactataaatggccagggttgttttcagaggaagaactaataataataataatatgattggccaattgccaatcctatgcttataacatgaactatgaatgagaaggcaaaaacctgagctagaattcttacgcacatggtgatttcagacaaacagattcataacataaatttaagttgataaagcagactaactcgtattttgaagatagtatcctcaagacaaatagcgctccataaacttgtggtttttgcaagttttgcttcacccagtccaggagttcgggccattgctcaggatagtcagcgtaaattatggtcttcaggcactctcccatctgaactctgcatcatacacaccaataacgagcaagaataaggaccaaaaacagaggctagctttcctatctatacttcattgttaacatgtatgtgtaaatcaagcccatttcactctacataacacaaacatatcagtccgtagacaaattaaccaaaaaaagtagattggtcttaacgactgctgcaaggtgtacacaaactgctacctcaaaatcgggggcacttgagagacaaatacaagaatctggttcctgacaacattcttatcacttggcaagattatgttctggtcacctgcataacaaaacaaaaacaatgtaatccaagcaaacaggtaacataacaatatttgattaataaacaaactaaataaacaattaccagaatgaggttcccagtgcttagcaatgaaattcttgaaatggatactagcagattggcgtacagaaagatcagagccaccatcaacaattatttgcaatatccttatcaaatgctgtggagtgtgctgcaactgaaaaaaaaaaccgaaatttcaatcagattttaaaccttaatagcagataatacaaccacagtcaaatcaagtcaatctaatgaagaaaaaaaacatcgatactccgaatttggataagcttagttctatcacaattctaaaataataaagagagaaattgaactaagcagagaggaaggaataaaaaccagaaaaagaaaaatttggtgtatacctgattaaggctctgctcagcagctctgcgctcgtcaggattgggactgaaagcagccgcgccaacgattaaagcgaggctaggcagatccatcggggaattcacaatcggaaagtcacgaatttcaagtctcctcccggaggaaatcgacgagactcgagagagtcaaatcaggaggaagaagagacgacgaagacgaaagagagagagaggtataagagaagaaggtctagggttttaaatggttcgttggtgtggttaagtctctctctctctctctcaaacgcgcgtggtaataagtgaaaaataaaataaaaaccagcacgtgacacacacaatacaaaaaccgagactttgcctggagctagtagtccttcacgccttactagtttacacggtcgatggacgcttttgttttttttggtccgtaaataattgggtttattatgtagactattaaacaaatattataataacaggacaaaatttcaaaattattcaataaatgaattgattgaattttttcactattttttaatttcttatttgattctttaatgattatattcaaaatagtaatatcctaacttcatatttaaactccattatgatcatggataggaatgaatttgtgaaaagtacataaaataattaaattagaaatatcctaaagaaccaaatgatattaatcataacaaaacaatacttctatacatgcaaatactctaattggagtatgttgtattaaaattttaatatggtagggaacactatttataaaagatattggagaacaaaaactttttataataattagcttagaaaaaaaatgatgagtaatcttctgaatttagtgggccaatccgacctaatagacaactcattgatttcatcttacgtcaggtacagttcatcaaatgcgaattatttcttaaattttaaaataatagctacttctttggttggttgcaaatgggcttcaggagtagcgcgggataaaatgggcctgtagaacatttgatgggccacaattctcaaaagcttttcttcctctttttttcttttgttcactgctctcaaaagtcaaaagctttccttttggtctcaaaagctcattatcattagggtagaaaaaagagtacatataagtggtaagttgtagtactagtaacatattaaatattaattctgtgaaaagttctttgatcacagtctttttttaataatcattacttgataaattatctacgtggaaaacaatacatcttacccccatttcatttggaggatgtacaatgtgtcaatgtgagactagccgttggatgggtctactcacattcgttgaagaacattaggtactgttaaaacttacaacctttttctcacccaatgtgcatttgcatgtgacatgcctagtgttactctttatctttttacacacataagtttcagtgcagatcagatgtttctctttttacattttgtcaacaagtttcacttttagctatcgtttacaaaagaaaaagtttcaaatatacaagaaaaatattaatcggcagtaaaatctctaagtccatttacggtaaccagagaatggttgttacactatgatcatcaagattaagaccaaacagtcacaagagatcttaaccattgattcaattttggtcaacgactcgaactcccaacataaccaaaacagtcagtcgtaataaaaagacgccccggtaggcgtataacagaacaacaacaccaaaagaaaagggaaaaaaaaaacagaggaactaataaacggaccatgagctccacagagacatacgagccgttattgacacgactccactcggattctcagataactgaacggtcttcgccagagatagaggagtttctccgccgtcgtggatccacagtgacaccacggtggtggctaaagctggcagtgtgggagtcaaagcttctatggacactctctggagcctctatagtggtctctgttctgaattacatgctcagcttcgtcaccgtcatgttcaccggtcatctcggttctcttcagctcgccggcgcttccatcgccaccgtcggaatccaaggcctagcttacggtatcatggtacgaaggcacatttgagttcataaagtaaaaaacagagtgaagaacacgaaacaacgtcgtttaattctatatttattgtacacttcatatgttgatcggtttctccttatcgaacattcttgagttttaaaaagttttgttaatcaaattgactagttaggaatggcgagcgcggtccaaacagtgtgtggtcaagcgtacggagcgagacagtactcatcaatgggaataatctgccaacgagccatggtcttgcaccttgcagctgcagtcttcctcacgttcctctactggtactcgggtccaatccttaaaacaatgggccaatccgtagccatagcacacgagggtcagatctttgcacgtggaatgattccacaaatttacgcatttgccctcgcttgcccgatgcagaggtttcttcaggctcagaacatagtgaaccctttggcttacatgtccttaggagttttcttgctccacacgttactcacgtggctggttaccaacgtgctggatttcggcttgcttggggcggctctgattctcagtttctcatggtggctgctagtagctgtgaatggtatgtatatcttgatgagcccgaattgtaaggagacatggacagggttttcaacgagggcatttagagggatatggccttacttcaagctcacggtagcttcagcagttatgctatggtaaacataaagctgtttgatatgagcgttttgagtatatggtttaaagaaagctgataccaaatttgaaatgaaatattcttcagtttggagatatggtacaaccaagggctagtgattatctctggtttactctccaatccgacaatttctctagacgctatttcgatttggtattttttcacttacttatcaaaataccgatgaatctcaatggtttcttgactagttgagtcattttgcagcatgtattacttgaattgggatatgcagttcatgcttggtctaagtgcagcaatcaggtattaacaaaatgatccatttaaatcttcagtcgaaatgatccatttggaagcatcataccgtttttgtgtttttggtcagtgtgcgagtgagcaatgagctaggagcgggaaatccacgagtggctatgttatcagtagtggttgtcaacatcacgactgttctcatcagctcagttctctgtgtcatcgtgcttgtgttccgcgttggccttagcaaagccttcaccagcgatgcagaagttatagcagccgtctctgacctctttcctcttctcgccgtttccattttcttaaacggaatccagccaattctctctggtaaaatcacaaaagagaccctcttgtgaatgcttgattgatgctttggtctttgtggattgatttgttttgttgaattggtaaaaaggggttgctattgggagtgggtggcaagcagtggtggcttatgtgaatcttgttacgtactatgtcattggtcttcctattggctgtgtccttggcttcaaaaccagtcttggagttgctgtataatctctttctctctttctctctttctttgtatttatatgtattgtattatacataacacttgggagatttttctttacaggggatctggtgggggatgattgcaggagtcatacttcaaaccctaactttgattgttcttacacttaaaactaattggacttccgaggtaagacagtgacaaacctctctctctctgtagtccaaagttcttacctttgctctgcatctgttgtaggtagaaaatgcagctcagagagtaaagacttcggcaactgagaatcaagagatggctaacgcaggtgtttaagataacagcaacagtgactctgttttttttcccctcttttggtgaaaagagatataagatgaaataagtaaccttttgattcttatgaagttatttgaggattcgttaactacagagaaaaataatggacgacctacttagttctcttctgcaaaatcttatcctgcgactttagatgattacaaaaacaagacttttcgcaattttcataaccccacaagttcttccgtctgtaagctaccataacccaaagacccttcttgtggtttatcatacaacacagtttctcttgcatcatcatcatcgtcatctccttcatcctcatcgtcactagattcactacttatatcttctaccccctcttcatcatcatcagatccataaactctagcaataatggttgctgtttcatttctgataccagtaagttccttagcttcctctagctcatcttgagttgaagccaatgataaaagcacattcttagctttctgatcaggtggtaccccacagctctccatctctttataccaaccaagagcacttccgaaattcttgcacctcccagacgcatccatgatagttgttaagatggtttgattagctttgattccacttaacctcattttctcatatacctccatcatcttctcaacatcgttcgctttcgcatacccttttatcagtgtcccgtaggtgactatattcggttcaaaaccgtctacttttatcctcttgaagaatttctcagcaccctccatgtcagatgcattcacatatgctgataacatagttgtgtacgaccagaggtccgggaaaattctgcgagggaaacatgttaattgcttatcaattttcaaacaagcaaacaagatggaagtattatttacctgtcccgccgcatgctcttaaagacagtctttgcttgctccaccatcccagaaatagcaaatgcatccagcaaaatgttataagctttatgtgttggcctgaaagataaaaagacaaataactgtaaacacttcagctaaaacagcaaaagaatagacgtttggaagccaaaatacaaaatccaaaaaactaaccttacaccagcatcaagcatctcttcaaaaacagatagagcttcttcctctcttctggctcttccatatgctttgataagtaaagcataacttacaacgtcgggttgaatatcagatctttgcatctgaaaagttaaacattttagttaaaagggttagatcactactattacaggccaatacataccctaatggtaattctagtatatactaattacttaaaagaaaggaatcattcagatcacctggtcatagatcttagaaacttctttataactagtttcgaaagacataaggctattgtaagtgactgtagactggggaactcctttcccaaccattgaagaaaatacttttcgagctttctcatagttgccagccttcttgtacatgtatatcatcatgtgatacatcttttgatccggcttcaatggagatttcttctcatctaaaagagtctcaaaaacctcttcagcttctttaaatttgtccccctctacaaaagtcttaagtataatctgataagttatagcagaaggctctgggcctgaagactgcatccttcgaaatatcgcttcagcattgttgcatttgcctcctctcccataagattccatgagagcggtataagaaatcacgtttggagtcgagcccatcttactcaatacactcaaaaccctttcagctccgttgaagtttcctagtttcccataagctgtaatgagcatcaaaaagtctatttcactgaaattccaccagttctggtatctaagccattcaagaatctgcaaatcaaaagaaaggaaggaaccaaatatcagatacaacccgacaactttcctatcaaaactaggagcttgcaatagccaatcttctaacagtgctgagagtaatcacagtttctttcatgctgacgtaaattcttcaggtataaataacaaaaagctttccgcagcaccactattgaaatcctcaaaagtagattaagatgactcatctaatttctcaatcaagattcaagactaagttcatgaaattctttccagccaatctaacatggagatatatacttaaagggtccaattcttttcagattctcaattgtatctaaaagtatcaaaacagaaaagggagtcattcattctccacatacctcactgacaaggttccatttcttaagctgcttaaatctaaccaaagtacccaaaacaagatcccttggaagaccttggtcaccgtcagttttgtattgcctaagcaccggaacagcagaacccgtcgattcaatctctagcataagccctctccatctcttctgatccgtctcgtcagctgcatccttgaaaacctccattttcctcctcttttgcaggaatttccttggagccaacattcccatacaaacaactctgaatcggttttggattttaacaccaacattgataatattgttctgtagtttcctctggctgacacaaagcaaaacacatggacgaatttgtaaatgaaaaaccaaaacttttaatagcctaaacgaaaagaacataaaccctagcagtagctaagcctcagatgataaacccatttggacacagctgctaaaaagcttacacaatcaattgaattagacgaaacccaacacggatttttgtagaaattttgaaaggcggtcccttttccatagaattatcgaacccgtcaattgaaaacgaaagaaaactcaagaacaaaagcaaagtccaaaatgaaagctgttccaaaaaggttaagaagtaaaaagtagaaaggaaggagaaaaggaaacctgtgattacttgatggaactgaaacaaacggcttgaaaattacagcctgtgacatttaaagttcgcagcttcttctctgtcgcagtagccgagaggaagaagaagaaagctactcttctcttatcctttaaaagttaaaacttcaaagtggataattttttattttttcttaatactacttcaagtcttcaatagcattataaacccttttttaactcaaaatttaattcagtaattagaggcggggtttcatggaaaattgacaatgatgcccctctgagcacctgctatttacacggccatacgacatgtttaagagcaattgctgatttgcttcaatatttagctgatgtgaagaagaaagaagactcgtgtagtctcgaattgtgtaaggtaatgaactaatgattgcatcgatttgtaaagtcagaaagaaagatgatcttttgtctttgatttatattggtcctttaaggatatgataccaaagaaaggataggctttgaccatgctgtgtaaaagaaagcttcatttgaagtttgcatttggcactgatacttaaacatagttcttatatcagatggattacatactccacattgcacatttgacttcgactaaagatctgaatcagatttgaaggaaaaaagagtggtattgaataggcacaagagttccaactagtgaaatctcataaaatcaaatctaacaatgttcccatatggaggtgatataaaacacctgaggtttaaattacatacgggagatcagaagagggacagaagcaggagcttcctcttccatctcatgttcgagctctccatagcgctcaagcacacgcatcctgcagtcttcagctgccagcactccggttgaataagcaccgtgcactgatcccgggtagcttgagctagtggcttcccccgcaaagaatagattatccaatggcactctcagtctctcatagaggtcgtgaggtttgttcacaatgtcatagctatatgatcccaatgaattgatgtctgatccccaccttgataccaaataatttatctgccaacagaaaaccccattagagcttgtacattggcaaaacaatatagcaactcaggtgaaagaaaaggtagtttggagcagtaccggtgaagaggcatctggaagaattttctgtagttgcgaaaaggcaaaatttgcagctgcttcatcggactttttctcgatgtctctagcgagctgaccagccggcatgtaaacaaggacaggatggcttgtggctttatgcaggttcaagaaataactgcatccgtaggaagtttctgcaacgactcctaaaaactctacgtttggccaaaagacgttgtcaaaattcaatatgatcttgttctcgattccaacaccgagatcgttgatagcttcttgtttccactgtggaagctttggttcgaatgttatcattcctgactttaagactcctagaggaagagcaatgactgcagcatccgcaacaaacgtgtctcctttctctgtagtcaccttcacaccactgtagcgccttgaaatcttggtaattctgacaaaacaaaagtccaataaggttttagctgcagactcgttaaatggtggaaactccttcgacaaatgaatcgtacctgtgacttagtcgtatatcaagacctttcgagagagtgttgattacagggcgataccctctaaccataagaccatgtccaccgggcaacagttcttcctgtgaatgtttcaattaacaaatcactaaacggggacatacctcaaccactaaaccgaggacagacatagaagttaagttactaacctgatcccaacactttgccgagatggtttcagcatcagcagcaaaccatccttccatgcggcacaagtaccactgaagcacattatgggcaagtccctccaacctataagtgaaaatctaattaagcatgcaacaaatataaaagcggataagtaacaaatcaacggaatgagttgagacaatatgtttccatacctcaattcagggttcctcttaaatacaatagaaaaggcttgagctattgacatgtcttcgtcctgctcatccctgactttacagatctgcatttgtgaaacaactgtttagtaaatcaaagaggcgcaacatccataaaacataataaaagagaaagtggacaccaagtacacacctcttccagaatgtgctcaaaattttcgccaacttttgtcaccaactcttgagaaacttggttaccagccttgtcgaacagagcataactgcagaaaacataattgcgccatgagtttccaacaaagagagaagattacttaatatacacatttagaatatccacaacggttgtacacacctctcaagatcgtgatcatacaaaaccgaattgtcaccgctagtacgataaagaggtaatcctaatctaccaattactgcagccaaaggattctctttacagacaccatgcaacctgtcacaaaacgatattgcttagttggcatcgatgacaaaagatccaaacagcaatcagtgaaaaagataggttgaaggagccatgatattaccaagatgcaccgagatcaactggaaaaccaaatgagtaatcagtgtgaactcgtccaccaattctgtcacgagactccaatacaacaacctgaaaggaagcatcctgaagagtgcgagcggctgaaattccagccataccacctccaatcactatcactgaaggtgatctcttcttcttcatcttctcgtctgttgagacgcaaatagctgaaacaccaacgcaacatatgaaacagttcagggcacaacagaaaataacaaaattcggattcatgtaatataactgaataacttattcattatcagacaaagtattaagatttcataaaaaaaacaaaaatcataagaagtaaagatgatacctttacgcagctgacgattagttttgcctccggactccatgattcaacaatgaacggagtaattactctcaagattattaaaattagtactactattacacagcgataaaggatctaacgatttctgctcgaaaagaaagagagaaatcggcaattgaggagaaaaactaagaattgagatcagaagactcgtattagtgaagtagcttgcaatcgaaggattaaaacctagttttctaaaaaaattcatgcgattttctcttatctgtttcttccacagagatcaacgaagatcagattcgaatgcgtaatttgaagcaaaacaatgagaaacaaaatcaaagagcgatagaaagagagaggctcaggagtcgggtcgcagctttttctattaataatcgtgtttgttttcagagtgctgatttgtaagatgcttattggttgacttaattaatcacattctatacgtttttattattttagtaatttttttctgcttcgctttaatcggaaacctacacgctcgagtatgtgattaggataaactcgctcctcttgtaagacacgtgtcactttagaaggacataatcggtaatttgatttcaccgttaacttgaggaaactaaaaatcgagtaggtatgggactcgctagtcgttacgtacgaatcgtggtggagtaaaccacgttagcgttttccgttttttgtataacgtatgcgttttgagcagtaatatgggttaatgttcatattcatagacccaaaaaagcccatgataatgtcaaatgcaggcctagtctatcctttttattttgtttttctgatgaaccttgagaacaaatataaaagtattgacacatgtatgatctttaggttcccaacacttgattgatactataattcaactgtttaaaaataagttataagtatgagactaacttattagatctctataatacatttgacttagcttttatgcttgcttaggcgaccaaaaataaataacaatcaccaactgtaagaagaataatttcggaggaaaactatatgccaagtcagcctattttacccatatgaagactgtcggtggtcgccggtgccgacagttgactttgcggtcccgccggagatccaaatcccaacatgtccgctggttgttgttgcacggtctgcatctaatttaaaacatgacacgtcagatattaaataaatatatttgtctttcttcaaaacgatgccgtctgcaactgacctgatttcccgccggcggcatctggggaatcccgcccatgtacctagcgagctgctccgataagatttggttctgtgcttggagctgcaactgtaccgggttttgacatactaaaccgggatggttctgcggagcggaccggttcataaccgggaattgagacaattgcatctgactttgcatagccatctgattaatgtatggagatgattgtaccccgggaaacatcatcggacttgctgctgctgctgccgccgccgccattccacttcccatccacatcacttggagttgcatttgaagtgattttaagtaatcaattgcttcatccaatatcgaagctttatctgtctacacaaaaaaagaagaagacaaaaccatatttaaacacaccaatcaattacagcttaattaactcagtttttttgtgatgaaaaaacttactctgctgcagtgaggtatgagttcttgaagagctttcattctttcattgatccgatctctcctcctctgtaattaatagacaaagatcacatcagaattattattactgaatggttgatcaactagtcagaaatagtatatgtataccctttctgagagattatgaacttcagctgcacggcttcttcgagtagatcctgaccgttggctcgatttgttacccatggtttgatcatcggttgaggtcaaacctatatctgattgagacacagattcttgatcagcatccataacatgttttcttttacggtcaatggttacacttgttccactaacggtttctttgttgttccttccatagctgcaaccggaggagccacctgacgaagtgtcaagtctttcttcgacgttcttgcttctatcactcatagaaaccggaagtgtagtggcctgatgaatatttgttgactggttgctgccgcaatgactcggtccgactgttataaccgaggatctaaacttaggaggagccatggcttgagcctcatgcttaactgtctcttcgatcgttcgtggcttctcaggacctccgaggtgatcgatcgaagagaagaaatgagaggagaactcggattcgaaagggtcgatgacgtcatccggagggtattgtatccaggagacggtttcttgatcatctagagcagcgtagttaggcttttgtactgtttcttggttgtcaagaaaaatattgttgggttttcttagggtttcttgtttgtgggtttggacttggactgacggttctctacgagcttggctttgtaaaaccacttgaccatctctccacaatagctccactaattcatcttctggtctgtcccaacatatgaatgtttacaaacatattttaaacaaacaatacttaaatagctatgattaagatgtgaaattggtatataattatgaaatacttgaattggaaaattgatatatacctgattgatcttttattagtggacatgtgaaaattatcttcaaaattccaatcagcaaacacttgttccatgtcagatctgtaaagacacttaaataaagaatatattacttttttgtaagtgaataagaaatgatttgattcataattagtataatgattaacaggagatttgaggaaaaaggatgatgaaagcaatcaacttagaaaagattattcgaaatcccaacagtttaatgattagaaaataattaaaccaaacaaccctctccaacaatctaggaggaaatgatttaataaagcaactaattctatatatagtaaactcttactaaggggaagctataaaagtaattaccagatttagaagcctctgaatggatggaagatttagctatatcagtttttttttattgcttcacacgtaacaaaaatcgagcaaggagggacaaaagaagaacaaaagattctatctccaaaaccttctcggttttatctctcttctagatagggaattgttctgaaactgagggagtaaagttgaaacagaacagtaacacagagagagagagagagaaagaagaaagagaggctaaggttcttcttgccaggttcagacagaaagggacaagagctagaggagggaagcagagagattattacggtaagtaagcgagtgagcgagggggagataatgattcggtgggggcaatagtactgaaactgatcaggatgaccgacacgtggcgaattgtcagacaactagttaaagagttagtgagacccaccaactcggttggattttgtctgtgaagttgagagagatctattgctcgatttctagaggtgggtttctgatctgtaccttatctgcaacactctttgagtcttgaccaatgattaagggtgtttttgtcaaatcataacacccctcttatgcttctctttcagcgaatagtatctctaataatggtaaacaaaaaacaaattgaagttctctattttctacgatgcttcgatgagtttatatcatcatctactatatgaatatatgaaccgttttataatcatctgaattcaatttcatgtcagagtctcattaaaacccgagcggaaataatcttgagaagtcatcattttttcccccggcaaatttccacatcgcatttatttcacgtgttgactagttaaagctaccatcgtaagtttttgtgttattatcattctctaaacaactgcaagtttatacatataacttttagttgattgtgaatttggaatttattaattatacacaaaattttggatattaataacagttttgaacctaaatatgcaatcacaaattcacaatgtcgtaataaaccgtggaccgttgtgacttgtttgtcatggaccacagacaaacaatggtccaccaaaattatgatcacattaatttccgatccttatcacaataatttaacagtagatcagtttctaacccttatcacatcaatcttatcgtttaatgtgcataacccctaccgatctaatgataaacaaacatattattagtatgataaattcatgaatatattacattgcaacttacaagtagacagacagacatatatagtgggtgcatttgtgaagaaagcatccaccgaaaggagacatttccctttaaaagtctttggccctcatttgctttttccacgaaagagacgaggtcgtaatagcgtccattcaaggctatagaaggccatgagccaagtaactcagtttttgtttccagccatagaaatagtaatttagtgcaaaatatggaatttaaatatgagtagtttagtgaaaattgctgaataataacactttttcttccgtatgcaagttttttttttttttgataaattattttgtatgcaagttgctatttgctagttggatgaattaagttgatagatagattcgttcgtcgtggacgatacatgtaaaacgttgttatcccaatcaagcaaagaggaacacggttacacagatgccagccataaatcataaaaccccaaaacccttcgattgctattttatttttcttataatttttgtttgcatttgactcaaatgatgtcgttgtatttgaatttataactcatgtcgacatataagtcgtcgcctagttggataattaattccatcatcttctaaaccgatatatgaattaattctatgcatatacattagatttcgacgaaggaacgaatctatcaatcatcattgattaaggaaccatatacatacattaaatatttatgaatatgcatattcataggatgaagataacatcacattaaatagaatgacattagcaaattgaatttatcagaaaaggcccaaaagttttaagtcatgtcatataacagatattgtactgtgttgtggagatgcgttattgggcctaagatacggcccagtttagtccgaaaaatacaaatttatcagagaaaagggccgaacaaaacgtcaaaaccctaactctataagagaccgttctgaaacattcaggcggcggtggcggcgatggaagtagacggatggtggtaggaatgaaaggctagaagcggcggagaagtatgtggataagaaataacaaaaactgaggggatcatgaagttcttcgttatattatagttttcaatctgaatttcaattccgccgctcgcctttttcctctccgccttttccgtctctccgatctgctcccgccgccgaccttgtgatgattatagctctgaaggtccatacaaggatattcaaatctcacttcttgtagaatagaaatttcgaaagttattattgaatagaagaacttttattagtcaagattgcaaaatatttttatattctttgtgcactcctgaaatacacattcacgaatttatagatccatttgttagcttaattaaactctaaagttcaatgtctttttttctttggtgagtttgtctgggaagtaaaaaaaaaagttttgatcagacactcaaattttgagtatcattctttaacattcagaatatcaattttgagtatcatttacaaagaccagacactaaaatgttaagtccagctaagtatcattcttcaacgttaattaaagttttatcacatcccttgaataatttgagtctctacagaaagtttttgaagagcatattattattagcagcagtgtaacttgggacggcccacaggacaagctcaagatacttccaattttgaaagcaaaagtggaaccaaaacactttatatgcttagaatttggtctattagaaataattttttcttgttgaattattgaataaaagaacttttattaatcaaaaagtaattcatctttaacaagtaaaaattaagaatgactgcattttactgaaggaaaggacatacgaatgctaagacgaccttaaaatctcccaaaagtaaaagtaacaaaaaaaaaactagaccacatcaacggaaacagtgggttgatcagcttctacgtctttggatttcttgaagaacaatctagcccatctcttcttaaactgtaaaatttccatcacaaccgcaaacgctgcaatgcaacagattatggtagtataggcgattttccagatgcttccgggttgtaaaatagacaagcctttgtagatattgtatatgcttagtacaatcactatgtatcccatagtatgatgataccagttccagtattttctgtatttatgatccttgttcggtcttgctttgagcgaaagtatctgcaaaaaccctaaagcaaacagaagtaatcctatcacggtatgcagtgtagtcctcatcccggtatgtctcgccatgtagattgctgttcctaatcctccgatcaaaccggaaaaataacccgtggtttgacaaacaacgtgtatatagaaccatgtgggatctaatacctcgtaattcttcatatatcttgcagccataactccgatgggcatgagaatcccccagctcaatgcattcactattgcatggatttgttttaccaacaacatgtttctgttaactgattttgtggttgtgacttgtccggaaagcaaatccaaagaagccatggatttgagattatcaccactcattgcgtgcattccaagtctatctccttccttcaacggaccgtcttgccataagtgattaacgacggttgtgttaggaggcaagactaaagttgcaaatatcatcatctctccattagaatactcagcggatacttgtgttacacgaaggctaagaggagactcttgaagcataggagagtagctattaatggaggaagtataagcacgcatgacaccagaagttgagtttcgataagccacgagtgcttgagctcccaccatgcctttgcttgtcgggtttatagcccacgatatccaactagaagactcaagattggagtgatggtatgcaatttcaagaactccggtttcttgagcataattaaagtgtagataagagtttaacaccaaaagatccgtgcaagagcgaaagctttttccgttgttgaagctgtaagattcacatctagatctagcatgaagtccttgttctgttgctgctgtcgtaaaagatggaatcaacatgaacagacaacacaaaacgactaacgtggctctcgaagacaaggacatgataataattatgattgtggcttttctcggagaacactagggtttacgattttggaagaagagatttatgatttctggtgctagaagctgagtagtttcgcatatttatagcgagttatattcacttcctaagacttaggactgtatttccataatttgatattgtttacttttttttgacccttaagtatatcaacaacaaaaaaaaaaatgtgtacatatatctatattaatccaaaaaataatcttttcacatctttactatatctaatacgatctctttcaaatttggaaaaaccttttctttatgactttattgctttttaaaaaaaacttttaagttttgttagtagcaaaattttaaggaaattatcaattacattattcggaatgctagctatttgtatttcttttctaaaacatgtgattaaaatatgtataaaagaaaccgacactctaaatttttaaatttaaatttccataagataatcattaaaaataaaataaaaaatacaacattaatctcttcaaatcaaattacttattcaagttaatctatgaaaatatttatagtttctaaaaattatctaggttacgtgaatgtattatggattatttgaagtgcattaagcgtaggaaagcgatgatgcataatagtgtcgcaatgtataatacataggttagttgatgtaaaatctaatcattttactatttgtttgtttacttggaatagtgtcgcaatggaaaagtataaaccttatcttcccggtcaacttctaacgttatacgttttcgggtgacaaaaaaagccttaaggttttccgggatgttgattagttagatggttataattcagattaaggtttagattttttaaaaaacgttaatttggttggtcatggtcaaacagcttaagagaaaacgtaaggacttgtcccttaccgtcatttatacaaaactcttcttattttaaaattgttctcaaattgaatagtatggttataaccggtcaactttaacgactctgcctttagtaattagttaataatacacactaaggtgttatttattgggtccattttcattatgcgttctttgaatcttatagtaatgtattgtgacgatgtttattttattctagcatgcgtcatttaaaggtgatcgaaagttgtattggttaaagactttttttcaaagatctcattcttggtttggcggtcaaactactatagttttctctcttttattttgtgcaaatatttttctcatatttcttcatcaatactcaatagattaaagcctagataccaccacttaagtgtttgtgtcttagtatccaaatcaaattctgtttttgttaagcagtttaattgatgatgatgaattgtagttgttatattttttttcttttccaatcactttactacgagtgaattttgtttgtcttttagagattaaatgttgacaaagaaagatcaaaacgtttatcgcaaaatgatcacgtttgcttacaatcgcgccaaacagaaaaattcaccaaccacattttgtatctatgtaatctcattgaccgtagcatttatgcctcgataattcaaagttacataatattctcaaaaatataatttcatgaacttgaatattatgaaaaaatttaaaatctacatttcaaatagaagaccataaaagttcaaatatgcattagagagatcttttttcttttatagtttctctgccactactaaattttcaattgatctaagatataaaactatatcgtaattgacttaagtattaactttttaaacatttatgttgttagtgtaattcaacctaattttcatttaaaaagtacttggcagctaactataactgtttatgttcttcttgttctcttaatccctttaaaatatgatgaagaaatcaagttttaggacagaagaaacggtaaaagaaacgaagtagatatgaaaccgcgtgaagaagaagatgactttagtcaacaaatatcagctatttttttatttctctctttttcagtaatctgacttcaccaagatctctactctgttctttcctcttcttcttcttcttcttcttcttccctctctctaagctttcttaattctcctctattccttcagaaatcaaaatcttaacagtcgaaactaattaaatctttccgaagtaaagacaacttctgcttctgattctgtcacttttagttaacttttctttcccggcgactcaaagcttaattgtcgccggcgattttttgttctcaagcattgatcctaatgttttccaagtacagtttcattctttgtcttattttcttcttcgtcacagcattttccggcgactccagagctcttgctggaaacaatgagcagaagaacatctctggcttttctgggattgactttccaaatccaatgcgtttcggttctgcttcttcttccacaagcaacgattgcggcttctcttcccctgagaaagaacccaccaaggaacggaccggagaaaacaagacggtgaagtttcacttaaagcgccgggagactacgactacagagaaggcaacaacaaattcagttcttgagcttcaaatccgagatctcacaagaattcagacgcttcacaaaagagttttggagaagaacaaccaaaacactgtttcgcagaagcagaagaagaatgataaagaagttgttaccactactccggtggcttcttccgtggaggagcaggctggtcaattggtggcaacacttgagtctggtatgactctcggttctggcgagtacttcatggacgtgttggttggttcgccaccaaaacacttctccttgattcttgatacagggagtgacttaaactggattcaatgcttgccttgctacgactgtttccagcaaaacggtgcgttttatgaccctaaagcctctgcttcttacaagaacataacttgcaatgaccaaagatgcaacctagtctcatcacctgaccctccaatgccctgcaaatcagataaccaatcatgcccttactactactggtatggggatagctccaacactaccggagattttgcagtagagactttcacggttaacctcacgacaaatggagggagctcggagttgtataatgttgaaaatatgatgttcggttgcggtcattggaaccgaggtctcttccatggtgctgcaggcttgcttggtttaggaagaggcccgctttcgttttcctctcagcttcagtctctttatggtcattccttctcttattgccttgtcgacagaaacagcgataccaacgttagtagcaaactgattttcggagaagacaaggatttgttaagtcacccgaatctgaacttcacttcttttgtcgctgggaaagaaaacctcgtcgacacattttactacgtacaaatcaaatccattctagtcgcgggagaagttctaaacatacctgaagaaacatggaatatctcatcagatggagctggagggacgatcattgattcaggtacaaccttaagttacttcgcagaacctgcatatgaattcatcaagaacaagattgctgagaaagctaaagggaagtatccggtctatagagattttccaatcctagatccttgcttcaacgtctctggcattcataacgttcagctgccagagcttgggattgcttttgcagatggcgctgtttggaacttcccgacagagaattctttcatatggttgaatgaggatttggtttgcttggcaatgctaggaactcccaaatcagcattttcaatcattggaaactaccagcagcagaattttcatatactctatgatacaaagaggtctaggctcgggtatgcacctacaaagtgtgcagatatataatctttcttgtcgatttttaagtccatcaaagcaactgaacacacaataagaacagattcatttttttccctttagattttttcattctttaggatattccttcaaacatgtaatgtatttgctgtagaacaaagatcataccaaactaatgtacttattcaaattcatttctgaatacaaagtgatttaattttgcttgctacatgcattttctcaaactctatagtctaccatcaatgacaagtaaatttgtagtcactggaattgtcaaagtttgattagtaatccctgaattgtttgtgagtttaggactcactttggtaaggttttaaggcaaaggagttgtcaaatcatcgtctttgttgatccaatttgaaagaaatgcagaaaatctagagaaattggaaactaaagaagcttgagtctattgcagaacacaaactatacaaaagaaatcggattatgtacctgagcatggtcggagaagagagttgcagaaaagaggtgtctctgttttgcaaaaataactcgtttagttctgatttttacaaaaaaccctcattttacatcttctaacaataattaataattaattttagttaaagagatattgattacttaataattcttttaagccaagagtaattaattaattaatttatggcagtaattgttgtatattctagtgtgccgtaccacttgtagcaattaaatttagtagatagtatattgtgttgtccaggaaatatataaatataaaaaataatttttatttttgtctctcagaccagacccaacccatctcctacaaccatctgtctcggtggtgttctttgatcctctctctcttacaaacctaaaatctaggcattcgatctcttggggaggatcgagaagaaaagagcggattcacgatgaagatcttagcgactcttttcgaatcaaccaaggataaatgctatgctcctagcttcatcgccgtcaatctctgtttggcttttatcgatgccgctcttgctttcatcgcattccttcaggttctgattcttggttcttctgatttcctgaaagaaaaagaaaaaatcagtcttgatttgtgaatgctagattgtgtgtgaccgttaaggcctgttcggacaggtgaagcattgtgcttattgattaaacgagatgtgagattattgattcttgatgttgaatttaatgaattggttgatttcagtctttagagttgtgtgtctgttgttcatgtggttgaccattaagtttaaaggtcaactctatgaataactcacggagctgaagtgtgtttgtgtagaatgagagatttggattcagggaatctgaatatgatatgaattattagcattagaaagtagaatctttttttcttttttaagtgctatgtgtgtagattaagatgttcttttcaaaggttcctatgtagttttagacggtgaagtaataaaaaaaaagtcttattctcttctttttttgtggggtttggcttataagatttatcttggctgcctacttctttcagttatctcgatttcacaggcggaataaacaagttggatggactcggcaaaaagtatttcttctcatcccaaccaatttaggctctatgttattgttatatggttacagttattgttacttttcatggcgtgtatctgacacatccatcatgaaaattgcaggtacttcatcttatgattgcttcttcaaacactggtaaatcctcagtcatttgttgttcaggaacaattataattgggggaagttttagccagtgagtaaggtctctattcgtatatattggcaggttctgttatttatttcgtggctgcggttatagcgacttgcacaaggtggcatcattggtccaacgcattaggttttctactcatgggtaaatatttcattcctttgtgaaggtttgtgtatgtttttcattgatttgtcttatagttaattccctgatgaatcaaattgtacttgcagcctttcccaaaattctgtttctggcaacttttctcctgcttctctctttctggtatgtatattctcaatactctgatcatattgtgttgtccctgattattttatcttaataatgatctgagataagacaatgatgcttcttcatgttatagggtagatgtttgccatcagggaaatggagaggaggatgatgatgatgatgaagaaaatagcatccaacaagtgttgcttgaaaaaagcaagagcaagccaggttcttcgaatgcaagtgatcgtagaaagtgttgctctttccatggtattcatgttggaacccggcagaagtttgttgttgcggtatgggatactttcagttttgtgcattaacctctagccaagtcatttctatgatctttataaaaatgtttatcttttttgctaggcaattattcttgtgttcatcttaatgatatcatttgcaatccttatctggatcgcttccggaaagaatcctatgaattcttcattattggctgaggtatgtggtattcctctgcacattgatatttcctctttcactaagttcttaagctcgagaaatagaagacttttgtctatattttttctggttttatgataaactcacttccttatataggtgtatgtcgatatttttgctgcaataatcctaatcactggaggaggaatctgcttctatggtaagtgatttcttaagttcttttctggtttcagctattcatatttttcttctagcaattcgtgagatgttttggtcagtggtttactggcttattgctatgattgaacagcgtatattcacaaactcttttatgttctttaggcctgcgtctgctctttaatctaagaaaggtgcggtctgaacaagtttcatcagagatgcgaaaggtaactaatgattctttggctcaacaagcttttctttctttgcacatgtcagtcgaatccttaccctgaaagtacattttaaccatttataggtatcgggtctagcaggagtctcagttgtttgcttcactgttagctctttaatcgctcttctcacacacattccagtaagtcattatcactcaaaaaagtatgtctgtaaaccgaaacctaacattcgtcgatacatttaaccaaaaccaatctttgatctcagctcttttatcattggaacccaagcaaattacacggcatcaaagcattggttcttctgatcatatactatttcataggtgaagatttttttctttcgttttgttgttttgaagaccttcaaatgcagggttactgataagaacgctttttaaaggttccaccgtcccattggctttcgttttatgggttttgcgggagttaccccctcaaaacattgtgagtaggcaagaagacaccagaaggattacttatgtcaactatgaaactgttccaaggcaacctcaaggtcctcaacaagactgggcctccgccacagtgtcgaaaaatcaggtatacaattctcttgatgaacatctaaattaggaagtcatgtctgacacatacaaggagttttatagtaagctgtaaatgcatgcatcagataaactaggggtgggaatataaaccgaagcaaaccacaatatttatagctaactaactctatttagataagaaaaactcaaaccgtatgctcacttttaagataaacgcaatgttgagagcattcgagaaaggtttgaacgaattgcggtctgaacatgaatacatagttgaaacactacgaaaaatcctcaaatgagaaagaagttttcattctattagtgacttctgaggttatttcagagtttcctttttatcgaccatagattgtttagggaggtcacttaacagtttttggttcggaaacgacggcgcaggtgtctaaagcaagtcctatatgaaccaaacaatcatcataatcattgacctgaagcaaacatccgccaatcttcttttgtagttaccgggaaaaagcctcgtgggattgcagaatggttcttaggcccaatgtggtgtgttgtggtggagtgaatgaaagtggaaacaagctcgttttcttctctctgagtcgccttggaatacaaaaatttgtttataagatagaaatggaggtttgaatctgagaaagctgtctgtaaatattaacttttgattgcaatttatagtttagcatcatgtgttggggggacttgtggatggatataaaatgtgttccaaggaagatataattttgtcttcctttctaaacagcgtcgtttaagctgctttgttatcatttacatatacgacgacgcatcattctggttttaaagatggcatattacgtttgagattaaacgccaccgttttcgaaagatagcacgggcattatacgatgtcgtattgcttcctctttcgaaaatttgttagcgcgattttgttaaacttttagcgccattttttttcacattaaaaatttgagaccccgaaacggtatcgtttgttggatgttatcctaaaattgacggatctgatatgaaaaaaaaaatccttaaaaaaaccgtttgagaactttttggatatttgtggtcttctcttttcgtctttcttctccactgtcaccttcctcgctaagcaaaagaatttagagagagcttcgtactatgcccagagaaaaaagcaaaaagcgagagccaaaaagataagaaagatcaaaagatgaaaaagcttagacgtaaaaaagcagaaatatatgtatatagaattaacaagtctctcgaagaaaaccctttagccatctttatcaatctcttttcttttgcgttctctataaagttggtataaaaggagatcaattaacaaatatgttaatcgattactttgatttcagtgagatttttgatttcacgaataaattattgggtttttgtggaggaggagagggtggtagtagtaattatagtttcgattcacggtggatatggaagctagttcgagtggaacggcggagttgccgcggtctctttctcggagagctccgtcgcgtgcgactactatgatgattgatagaccaaacgaagatgctagtgctatggatagcgagcttgttccttcctctctcgcttctattgccccgattcttcgcgttgctaatgaaattgagaaggacaatcctcgagtggcttatctatgtgagtctgaatttgtttccaatagtcatgtttgctttagccagtttctatttaaggacgttgtatagatgggttcttaacatagacatagttctgtaatgagtatggttctgtttttgatgacatcaggccggtttcatgcgtttgagaaagctcataggatggatgctacatccagtggacgaggtgttcgtcagtttaagacctatctgttacatagacttgagaaggtacatactttcttggtgaaatggtttctctaagtgggcagagatttccactttgcttgatcattttgagctgatgtgtctaaatttgttctaggaagaagaggaaaccaagcctcagctggcgaaaaacgatcctagagaaattcaggcatattaccagaacttctatgagaaatatattaaagaaggagaaacatcaagaaaaccgtgaggccactttcctaactcatgccaaagcttcaataagctaagtgtagtgatattgagccgtactcttatgtttttatttgctacagggaggaaatggcaaggctttaccaaattgcatcggtattgtacgatgtactgaagactgtagtaccttcacctaaagtggattacgaggttcggtttgtatgcgtagtaaattcctgtaatggtaatttgattaaatttctctgtgaagcctcacttttcatatgtcttctgttattatagacccgtagatatgccgaagaagttgaaaggaaaagggatagatatgagcactacaacattcttcctttatatgctgtagggactaaaccagcaattgtggaacttcctgaggtgcgtttgaacacagggtgactgctacgaatagtatgctagagaaatatttacactcttttgtttttcttgtcatgttatgtgctgtgacaaaaataggtcaaggctgcattcagtgctgtccgtaatgtgcgcaatcttccacgacgaagaattcatttgccatctaatacccctaatgaaatgcgtaaggctagaaccaaacttaatgacatacttgaatggcttgcttctgagttcgggtttcaggtaacgtgctacttagctgtctttatgtacttttatcttgtgacccttctaaattgcgtaaatttcttaagagaacataccactagctctatagtgtctgttctgtagactggtatatagagaacataccactagctctatagtgtctgtcaaacttatatataagagataaacatctcaactttgagtaatcacatgaattaagtcgactttgaatgtcacatggtttagtttttttcagcatatcttcagatagtttggcaatatatactaagatgtcttgcaattccttttatgtatgcatattcattgtcgtttcacttcatatgatgattaaagagagggaacgtggcaaatcagagggagcacataatactgcttcttgctaatgctgacattagaaagagaaatgatgaagaatatgatgaggtgagcattgtcgtagataatgccttgtgtttttctcttacacttcttcctgttttagtaatgttgtaagtttcttgcagttgaaacctagcaccgtcactgagttgatggacaaaacttttaaaagttattactcatggtgtaaatatttgcactctacgtctaatctcaagtatgttatattcttgatctagattatgtgataagttccaatgtttatttttgcattatgttctgtctttggggtcacagatctgatgttggatgcttcaactttattcttaaaaggtttccagatgattgtgataaacagcagctgcagcttatctatatttccctgtaccttttaatatggggtgaagcctcgaatgttagatttatgcccgaatgtatctgctatattttccataatgtaagttttctcatctgtagaatcagatatgcatatttttcataactttcttccggttctggatggtttaaaattcttttcctgtctgttttttttgttcttaagatggcaaatgacgtctatggaattctgtttagcaatgttgaagctgttagtggtgagacatatgaaacagaagaagttattgatgaagaatcatttctgagaactgttataactccaatctatcaggtcatacgcaacgtaagtatatcaaagtcaatcatgttgtatatatttataagtaactgtacactatcttttgaatgaaaatgataccttgaaggaagccaaaaggaacaagggaggtacagcaagccattcgcaatggagaaattacgatgatttgaatgaatacttttggtgacgttctttactatattatttgacacatgcctgcttgatctagtctctgactgctgacatctttatttatttgaaggtctaagaaatgcttcaagataggatggcctcttgaccttaaagcagactttttcctaaactctgacgagataaccccacaggacgaggtatatttcatttgcttctgagtagctgtaatcttggttaaaaatttagtagggtatgtgatacaaaattcaactaatatgatgctaatgagtctacatataacttccacaatatatgctatcaaggtgttctttaagttgtagatagctcatatatgataaaacagcattatgaacgttttgatctctctgtaagccttcccttttttgtgatactacagaaacctgatcttgtatctctaatgtattgcagaggctgaatcaagtcacttatgggaaaagcaagcctaaaaccaactttgttgaagtccgcacattctggaacctcttcagagattttgatcgaatgtggatatttcttgtcatggcttttcaggtaaatttttagtgttttaaaagagttgtgttagtctgaaaactaaataagttatattatcatacttatccttatcttttgtaggctatggtaatagttggatggcatggttctgggtcactaggtgacatatttgacaaggatgtattcaaaacggtgttaactatttttattacttcggcgtatctgactcttttacaaggttgtgatgtcctttgatatttcttgtttttagtgacacgttttttttattttgatgttctaatggtgttccttgtcctctttttccctcatgattctttacatagctgcactggatattatcctaaatttcaatgcctggaagaatttcaagttttcccagatattgcggtaccttttgaaattcgcagtagcatttatgtgggcggtactgcttccaattgcttactcgaagtctgttcaacgcccaactggagttgtaaagttcttcagtacttggactggggattggaaggatcagtccttttatacgtacgctgtttcattttatgtgttaccaaacatattggcagctctgttattcctcgttccaccattccggagagccatggagtgttcagacatgcgacctatcaaagttataatgtggtgggctcaggcaagtattaaactattcttctggttcttgagtatactggtcttcacttttctttttcttttttgccatctttgtttccttaagcttttccatcttgtagccaaaactatacgttggaagaggtatgcatgaggacatgttctctctcttcaagtgagtgatgacgccatttcccgtcaccattaataacttcttaaatatttcttttaactcttatactagcctcttctcatatagcacaacttataatggtcaggtataccaccttctggatcatgctactgatcagcaagcttgctttcaactattatgtggaggtctggtttctgcctttatatttcacttatagttactccgaagtaggttactcaatgtgtatatatgtttttaatgtatatcttggaaacagatactaccccttattacgccaacaaagatgatcatgaatctgcacattggtcactaccagtggcatgaattttttccccatggtaaattttcaagttaccatcctttcttgtttgcaataacatttgatgacacttgcctttactaatttttgattttctatagcaactaacaatattggagtggttattgctatatgggctccaattgtactggttagtaaaaattaaagagctcccaagaaaaaaacaatttctgttatatatggcttacatatttgcgtgtattatattttgagtaggtttacttgatggatactcaaatatggtacgccattttttccactctgtttggaggcatacatggggccttcagtcatctgggagaagtaagtgattttgtactctcagaaataccacaagaattaacaaacactattgtttactctgcaacctagtagatgatattaccctttatgttacttcttgagtcttgacatgttttggctttcatagatacggactcttgggatgttgcgatctagatttgagtcaataccaattgccttcagccgcaccctcatgccatccgaagatgcaaaaagaaaacatgcggtactgtgctttttatagtttattgtccttccatatctcaaaaggtggatcacaccttcattccctgttctgtcatttattgattcccactgggaaatgtaggatgactatgtggaccagaaaaacatcactaatttctcccaggtgtggaacgagttcatttactctatgagaagcgaggataagatcagtgacaggttagattcttttcttttagaaagcaatcttgtcatcattgtcctgttctgtttagcaagcatatatgtcatgtaacgtttcctttatatgctgtaactcagagatagggatttgctgcttgtaccatcttcgtcgggtgatgtgtctgtcatccagtggccacctttcttgcttgctagtaaggtaatgaataattggtgtttttggaggacttccttccattttagtagaaaataaagattcattgatcaaaatgctcgagttctcaagacttttgttaagatgcttaatttccaccaagggccaaaagttctgtcactggataatcatccccttaaaccagaatatgctgaatgaacatatgtgattgtttcaataagcatggttcctaatgatttttttcaacaatgtagattcctattgctgtggacatggcaaaagatttcaagggaaaagaggatgctgaactatttagaaagattaagagtgatagctacatgtattatgctgttattgagagttatgagacattgaagaaaataatttacgctcttctggaagatgaagcagatagaaggtataccagattcatgctcctcttccaatggtggaaatacttcgttctctataatattatgcatcttgagccttgtttcattgattcatttaatttttctcttttgaataagggtcatgaatcaggtatttttagaagtggacatgagcatgcagcaacagagattcatatatgaattccgcatgagtggattaccgctccttagtgataagctggagaagtttctaagtatattggtaatatcaaaatttgtagtccactcattaattacatgaggccttacacaggaactaatgcttgaaacctctttgtgtgaatagttaagtgactatgaagaccagggtacatacaagtctcagttaattaatgtcttccaggatgttatcgaaattatcactcaagatctcttggttaatgggcatgagtaagtataacaagtcccttcagcagataggagatatgccatctattcctaaaaacatatgtcatcagaagtagtgtatgacgtcctctcaattattcttgttgtagaattcttgaaagggctcgtgttcattctcctgacatcaaaaatgagaaaaaggaacagaggtttgagaaaattaatatccacctagtacgggatagatgttggcgggaaaaggtaattcttcatacgaagactttttttgtttaactcatcttgcatgatgtattgatatctgactcttctttgtaggttattcggcttcatttgctcttatcggtcaaagaatctgcaataaatgttcctcaaaacttggaagcccgccgacgtatcacattctttgctaattctctgtttatgaatatgcctagtgctccaagaatacgagatatgctatctttcaggtgaagtaccaatctttttgtctctatttaaaggctgtagagtctgtagactagattcttttttactggtttccccttgactacaaactggaaattagtcacctaatgcagtcaatgtgatttgtttacaaagatttattttagctgtttatagtcaacctttatgtatctgaattataacgtttggtttttgttcatcttcagtgttttaactccttactacaaagaagatgtgctgtattcagaggaagaccttaacaaggaaaatgaagatgggatctcaattctgttttatctacaaaagatttatcctggtacgttcttgattctagtcaggaccagctattcttttttttttataattacattcaagtttactgagtggatcttacgtgaactagatgagtggaccaattatttggatcgcttaaaggatcctaagcttcctgagaaagacaagtcagagttccttcgagagtgggtatcttacagaggtcagacgttagccagaacaggtacaaatgattacaacggaaatcataattgttcatagttattgtcttgtctataggaatattcatttgtgtctctctgattacttctgccagttaggggtatgatgtactatagacaggctctggagcttcaatgctaccaggaagttgcaggggaacaaggttttttattttctgagccagttgccaataacttgaatgcttttaccgaagcttttggaaccaaaatatgatatcttaatttactatatgctacttcttgcagccgagtttagtgtctttcgggccatggcgtccaacgatgaaaatcagaaggctttcctggaacgtgccagagctcttgcagatctgaagttcacttatgttgtttcttgtcaggtctacggaaatcagaaaaagtccggtgatatccacaaccgcagctgctacacgaatattctgcagctcatgctaaagtatgtcaaagtaggattgattttgatgaagtatcatgatatatttgcctaatcttgtcaatcgttttagatatccatcattgcgggttgcttatgtagatgagagggaggagacagcagatgcaaaatctccgaaggtcttttactctgtacttctaaaaggaggtgacaagtttgatgaggtacaaggatttccgagcaatcttataattttgcttctccgtttttctatcagttactcttttgtatatgatgtttccattatgctgattggatttctagacatggtgttcttctttaacgtgaatggtcttccattattaggaaatttaccgcatcaagcttcctggtcctccagctgagattggtgaaggaaagcctgaaaatcaaaatcatgctatcatatttacacgtggtgaagcactacaaactatagatatgaatcaagtatgtattcttcttcattctcattagtcagaaccatatattgaatttcgcgtcctcatggttagtactctttgcaggacaattactttgaagaagctttcaaactaagaaatgtattggaggaattcaataaggagcgtgttggtagacgcaagccaacaatattgggtctccgagaacatatatttactggaaggtaaacccaccttgcaagatatcattttataaacattttaaatgataaaagtattataagttgcaactacgtattggtgtattcttacttttctccctctcttggtatagtgtttcgtcattagcttggttcatgtccaatcaggagagtagttttgtgacaattggccaaagaattttggcaaaccctctgaggtatttttcttcacgactgaaacttttccactctaaatcaagaatgtgtggtctgcagatccatgattgtgtttggttcttagaccttttgcattctaagcttttcagaatcacttgtggagttaagctttatgtcaacatttctttcttgatttacttatttaacttcatttcttctctatgggtgcagggtccgttttcattatggtcatcctgacatatttgacagaatctttcacataacaaggggcggtgtgagcaaggcttcgaaagtaataaatttgagtgaggatattttcggaggtaatggcatgttaattctctaaatgtcaacaattcagcgttagagaattgatagttcgttccaagcagctgttgatttgtttgtcaatgtatataggcttcaattcaactctccgtggaggatatgttacacatcacgagtatatccaagttggaaagggacgggacgtggggttgaacccaatctctatttttgaagcaaaagtagcaaatggaaacggggagcaaacgctaagccgtgatgtttaccgtttggggcatcggtttgacttttacaggatgctctcattctattttacgaccattggattctattttagtagcatggtatgctcaaaactttatatctcaagtttgcttttattttagttgatcttatgtatacacatggttaaagattatgacttgtgcttttttcagctcaccgttcttactgtatatgcattcctgtatggacggatgtacatggttatgagcggattggagaaagagattttgagactcgcaagcccgaatcagcttgaggctcttgagcaggctctggctacacagtcaatatttcagcttggtttcttgatggtgttaccgatggtaatggagattggcttggaacacggttttcgctctgctattgtcgattttttcataatgcagctgcagctagcctcggtattctttacattccagcttgggacaaagtcacattattacgggagaacaattttacatggtggttccaaatatagaccgacgggccgtgggtttgttgttttccatgccaagtttgcggagaactacaggttgtattcgagaagtcactttgtgaagggactagagctgcttttattgctagttgtttatcaaatctatgggcattcataccggagttcaaacctttatctgtatatcacagtctcgatgtggtttatggttggttcttggttgtttgcaccatttatattcaatccttcggggtttgagtggcaaaagacagttgacgattggactgattggaaacgatggcttggagatcggggtggtataggcatcccggttgaaaaaagctgggaatcgtggtggaacgtagagcaagaacacctcaaacatacaagtattagagggaggattctggaaatcacacttgctctccgctttttcatttatcagtacggaattgtttaccagctcaatatctctcagcgcagcaagagctttttggtataaaaaaatgttccttcacttttcatgcatcaaagagctttttatgatcctttagtctcagtctcttttttacttcctctttgtaggtttatggactctcttgggtggtcttgctcacatcattacttgttctaaaggtttcacaatccttcatcctttatacacacatacatatagtcataaacaatgcttatataagcttaattacttactttgagtgtaaactgtgtcagatggtatctatgggcagacgaagatttggaacagattttcagctaatgttcaggattcttaaagcacttctcttcctcggctttttgtcagtcatgacaatattatttgtggtgttcaaactcacactcaccgatctctctgcttcagttcttgcttttcttccaaccgggtgggcgattcttctggtaaatagccatcaaaacccccttcagaatcatagtatcggaatttgcatcatgttcttagaaaaaactaatggaaatttctctcagattgggcaagtactgaggtcaccgatcaaagctttaggggtttgggactcggtgaaagagctaggaagagcgtatgagaatatcatgggacttgtaatctttgcaccaatcgctgttctgtcttggtttcccattgtctccgagtttcaagctcgtctgcttttcaatcaagcttttagcagaggccttcaaatctctatgattctcgctggtcggaaagacaaagcaacttcttcgcacaagtaaaaccataaatactcagtgttgtttccgggtttcttctgtcttaagcaacaaacctgcttctttagaacggtgtcgttttagcgtagttcaatagatgtctataaggttatagggatattttagtttggttggacttggacacctcacactctcatcacactcatgtgttgtagttatcacaatgattttgacatatggtctttaataatatagctcaattgatttcttttggtttctgattaaaattattatttgcgggaaaactcgatgaagaaaaatattgacttgatactaaaattcttgaatgcacatcatggaaagaaactccatgattcttttctacttgtttttttttggatgattataatattaatacaacttctagtcattgctagatacaccaattacatgtccgaggcattatatgatgaaacttcaatttcattattctttggcattttcttgcatgtgacaaatattgtattgtatcaaagagatacaaacaaaataataatgtggtgttccttagagtttatcttcattcttttactggagtcttaagtatagaaaatcaaacttaaatccaaaaaatatctttgatcataatataaaaatgatcaaataagtttcaatcttgaagtcaaacacaagaaagtcatgctacttcagcatataagaagaagataaggaggacctaaatttccaaaggctgcatctgagaattacctcttttgtaatttcgttaatcctttatccactttttcttctctatttttatttatttcttaccttatagtatataaaaaataattgtaatattgttgtatttaatcatgatccagctataaatgacacagttgtcaaagttcaccatctttgctttcccttcactgctctctctctttctctctctttgttgattttgttttcctcaaattgcaaatcaaagctttctttccagctttagaacacactctcaccaacaatctcacccaactttttttccttcttttaactcctcactaattcctaatcccacaaaccctaaactctatctctttaatcccttccttacatacattattcagtagttgagtaaagtttcaatctttcttctgattccttgttggaattacctaaattttctgggtttattttggtgggctcgtcgagagatacttcaattgcaattcatcgttaagcatatctatgctaattgcgttctcttctttatttcactttctctttggtttgcttcaatatcaaagcaaagagggaccttttcgctttgcgttcttctcttctaatcgaaaagacaagagcttagtcaccacattctaaggtaatttcatggaactaaaaaaaactgcttttttgtttttcaaggattctactttcggtagcagtttatgattcttctgtgtaatgtatatcttgcttcaatcgtaagtgattcttttccaatagtttaagagctgggtttcctcaggttttttgttttagtgacaaatgttggaaagttaatgcacgtaacttgtttgttgaaatgccgcaattaattgctgaatttgcgcgtgcctttttgaatcctgtttctctatgtgtcagcatttttggtcgaagtggtttttcaaacttctgagtcggcagctttacttaccagttttagagattctaccatttgtccaacaatccctgttttgcttgtaagatttgtgaaagtcagagatgtcttagtcttcttgttaataattgatacgtttcttgtttactaggtgggaattgtgaagttgtgagcaaaaggaaccaaaaatgtcatctgagagttctctgagtgctgacatgtcgaagaaggtctcatttttaggtttgaagggtatgaaactgtgggtactgatttgtttagtagttggcacatttgtagttttggttttctgtatattatctctatggattgcattccgccggaaatcccggagatcatctcacaagctgttacccttcagtcaaataccacgcgtggcgaaagatatcagggttgatgatagagttgggtttcaaaatcataatgaaaatttatctatcacaaatgctgataaatctagtgacagaaactctgggaagatgatgtcttacttgggaagaacgaagtctagtgataatgatagtataagtcaatgtagctctgtgcatcatcatgagagagcttgtagttctcactctggtgaagatggaagctttggagctgcttggagacaaaattccctatcacagggcgggctagtaacagcatctcctttggttggtttgccagaaatatctcatcttggttggggacactggtttactcttagggatcttcagctagccaccaaccgttttgctgctgaaaatgtaatcggtgagggtggttatggagtagtttataagggtagactcatcaacggtaatgatgttgctgtaaagaagcttcttaacaatctgtaagtttttctttttttgggtttatcaaatgttggtttgtgcttgcttcctttttacttgtttagtaaatcctaacacaattttgtctctaggggacaggctgagaaggaattccgggttgaagttgaggctattggtcatgtacggcacaagaatcttgtaaggcttctaggatattgcatagagggtgttaataggtgagtctgacttgtctcttatcagtctgaatgtactactaatttagtctcatgagtaatctcctattgtactaccgaatagaaacttgtcccatgtatcaatttctgttttgatgtaatgcaggatgcttgtttatgagtatgtgaatagtggtaacttagaacaatggctacatggagccatgggaaaacaaagcactctcacttgggaggctcgcatgaaaatccttgttggtactgcgcaggcgtaagttgtttaaaatgtgactgttgttggaccttttacttgaaatttcaaaaacaactctttaaggggatattgacatgctctgtactacaattttacaggcttgcttatttacatgaagcaatagaaccaaaagtagtccacagagacataaaagcaagcaatatcctgattgacgatgacttcaatgcaaagctttctgattttgggttggccaagctcttagactcgggtgagagtcacatcacgaccagagtcatgggaacctttgggtaagtctaaaatttgtaccctctttggtgatgatgggtttttgtatacatattattaacggtcatgtgtatatgcatcagatatgtcgcacccgaatatgctaatacaggtctattgaatgagaagagtgacatctatagctttggtgtcctgctgctagagactataactggaagagatccagttgactatgaacgtccagctaatgaggtagcctaaaatatgtctgctttgtcaatgtatccaggagttatgaaaatgttaacttggtgttaaaacatgtgttcttgttggcaggtgaatctggtcgaatggctaaagatgatggttggaacaagaagagctgaagaagttgttgactcaaggattgagcctccacccgctacacgtgctctgaaacgtgcacttcttgttgccctgagatgtgtggatcctgaagcacagaaacggcctaaaatgagccaggttgtgcggatgcttgaatccgatgaacacccttttcgtgaggtaaatatatacttaattcaccaaatttggacgaattctctggatatattgaacactttatcatactataacaagtgatggtccaattctacaggaattgttgtgtgttgtacatatggatatgcaaactaattttttttttccccgcaggagcggaggaacagaaagagtagaacagcgagtatggagattgttgaaaccactgaggaatcagctgacacaagcaaagggcctggtcactcagagaacactacaaaacctgagaagactcatgtataggaaacatgtcgctagacccagtgaaaattcagctaagtaacttcacaccatcaaatgctctaccaatcgatggcaaatgagttttctcgtgcttcttctggagaaacaaaacaaattgggtaaaagaagattcagatcaaaagagctgtaccagttatttctaacatccgccaggtagcgtttggtctctcttgatatttgtaaaattattggttcttctatagtcttctatctgagtcttggcttttaggatgtgaaacattagccatagcagatttgttgttgtactaagatttgaattcatttgtcatccctctattgattgagatatgtatatataatcaagtcgtgtgacataagaactgtcccatccaaaattagagaaataagaaaaaatatcgaattcaaaagaactatagtcttcaatatgtgtgatctgtatacacaaatgaaaaacaaacagatcgttgacagaagaaaaaaacgtcccagcttcaaattcaacatctctcgtatgaccccacattagagaaaacagaccaatattttacacacacaaagttcataatcttatacaagaaaaagcgcaaaaataaatttcagtcccatcaatcatacacactttgaagcatacgtgatgtgggcaatggtattgacatgtaagacatatgggacgagagctactaccattgccaacaacttccaccttattaccgcagtaatcgaatatgtgaccaggcttcatataaccagaatctccaaataaacatttatggtggattgtggtgcaactttctttgtttatgtagaaccattccgttggatctaatcctttctcgcatacttcgcaccagtacttgtcatccacgccactttctccataagaaagagtgagagaatgctcatcgaatttgtagtgtatctcattaggaattgtggcgcattcgtaacataaaacgaattcgcacaaactacagtgtagatgataattataaactctcttcttgcaaccctggcagagagcttcgttttcttcgctataggatggggagatgaatacatgatgttctgcatgacttttatgggtgaaatactcaggaactaaaacgcagttgagatctagctgaaactgctcgtaacctacgcattcttcttctctgcatctgtacatgagaccactcgacttccggaaacaaactgaacacgctaagttaccgcaatcgtgatcgtatagaggatacgggtctatgaaaagagggtggtgatgcaatgcatgctctagtttccgtggaagattggcacatacttcatggagaaagaagtcacattccatacagttgtagaaatcttgagagctgataggacgcatgcatgcttgacattgctttgctgagtcacgtacacggtcgtatttctcaagctttagaatatgaagatggtgacaaaaatgttgtatcaaaccatcacctacttttttgaatggcgcaatagcttcagtttcatcgggttcttcaggtgcccattcgagttctcccccgttccatatttttctatgtgttgcacattttgaatggactacataagtgcaaccctcatgtgtgcaagaatattgaccatacttgatgtcaacatgcttgtagcaaacccggcataacgaaactttggttggtaggtgaggagtgtgcgaaagtcgatgagggtgacgtgtgatctttatgacgcgtggtaaatcaacacaactcttgtgaaccatgtaatcacattggtgacaagcataacttgggtctaacaagttgatcaacccacaagcatcacaaggaaatgagactggtcgacggaacaaggcgagtgaatggtgatggcttcttggattttgaattgtaagaggcggaaaatttctagcacaacggaaatccaaaaagaagttacatatggaacaacggtagaaccattcgctgagaacattcccacacaaagtgcatttatcgaatatgatatttgatttggacccaatagtttggaggtattcaggcatgttcaatccagaacgacatagaaaggtacagaagtcaccgtagttgacgtccactacgatcttggtttcatagcttacaaaggtgaaagtgagagggtgttgaggatgataagggtgaatcatcttacttggaatctgaagacatctcctgtggaactctatgtcgcatatggtgcagtagtaatggaagttgtcagtaaatccacgtaactcccaagaaacatcgtttttcccgcaagagaagcagttgtgcttaaccttgtaattgtctcgacgagagacgttgtgcgggtgagctggatcagaaacaatgcatctcggcccttcttcatcacccatatccttaatattttggttttgaatctttttagggtcgtgtgtcgaaatattttgttttatcttctctatccattattgtggatctagcattaatgtatgtatgtgaaaaaagattaaacaaaaaatatatgaacaattatagattgacccaacgcaaagattcatttcttatgcacccttttgcccaacttgtaacaaaattcatcataaaattaaggtctccaggctgtccacgttacaagcaatatatattatacttatcaaatttagattatagaaacctacgtagacatagaaagccagctcatgctgccaaaagtcaaaaagtcgtgaggggagaaataactcctaatatatctttccaaattaacaacatatatatatatatatactcttctcttttttcgatgattgagaagcgtttcgtctaaacatctactcttggctttaggatatatgatcaaacattagcgagaggagatttgttgttgtactatgaattgaatttacttgtcatcatcctctctcttgattgagacatgtatatttataatcaagctgtgacatatctcaagtaataacagtcaaattggagaaaaatattcacttctcaatatttgttcattttcagatgtaatacaaacaacattattcgaaaataaattattcttcaacatgcgtgaaatgataatacaaacgaatcgttgacaaaagaaaaacatatcagcttcaaatttaaactctggatatatctcataacagaattagattttatgacagtttacagaacaaatatcaacttcagtcccatccggcatatagactttaaagtatacaggatgtgggcaatatttgtgacatgtatgacatatgggacgagagctactaccatggcacacaactttcacctcatcactagagtgctcgaatgtatgaccagacttcatataaacattatctccgagtatacatttacggtggattgtagtgcactgcttggtgtttgtgtagaaccattccattgggtctaattcttcctcacatacttcgcaccagtacgtgccatccacgcctttttctccgtaacaaagagagagaggattatcatcatatttgtggtataactcatttggaattgtggcgcatgtgtagcatatagcaaattcgcatgaaacgcattgtagaagatattgacaatgtctccatctgcaaccttggcattcacgcttgtccttaccgaaggtggatatgaataaacgatgttctgcatgactttcatgggtgaaacactcaggaactaaaatgcagttaacatctacctgaaattgtttgccaccttccgaacatccgtcttttttgcatctgtacttcaaaccacttgaatatcgaaaacaaactgaacaacctaagttcatatgcatgcgatcgtatattggatacgggtccatgtaaagagggtggttgtgcgacgcatgatccagtttccgaggaagattggcacatacctcgtggataaaaaattcacattcgatacaactgtagaaatcatgagggttgacaggacgcatacacgcctgacattgcttttttgagtctcttgtaccctcgtatttctccagctttagaaaatgatgttgatgccaacaatgttctattaaactaccacttattttcttgtatggagcaatatcttcggcttgctcagattcttcgtcttcccattcgagttcctccccgtcccatatttttccgtgtgttgcacattttgaatggactacataaaagcactcctcatggttgcaagaatattgaccatacttgatgtcaacattcttgtagcaaacccggcaggacgaaaccttggctggaaggaaaagagtgtgagagaatcgatgagggtgacgtgtgatctttatgacgcggggtaaatcaatacaactttggtgaaccacataattgcattggtaacatgcataactaggctccaacacgttaatcaacccacaagcattacaaggaaatgaaagtggtcgagggaacaaggcgagtgaatggggatggcttttaggattttggattgtaagaggtggaaattctaaggcacattggaaatccaaggaaaagttacatatcgtacaacgatagaaccatccgctggagatcattaccacaccaagtgcatttatcgaatatgatactggattttggcttaatatttttggggtattcagaattttctatatcaaaacgataccgaaatctatagtattcaccatagttggtgtcggctatgattccggtttcatagtttataacggtgaaaacgagagggtgttgaggatgataagggtgaattatcttacttgggtactcaagacaattcttatggaactccagatcgcatatggtgcagtagtaatacaaaggacgctcacgtatctcccaaggaacgtcacttttcccgcacccaaagcagtcgtgcttaaccttctgctcggatctatgggagaagttgtgaggttgagccggatcagacacaacgcatctcggcattacttctttatcactgctttggccttgacccatttattttctgctttagtttgtttttgtgtttttatcttttgatggatgtgtcatgtgtgtctacagatttgtcttctcattctatatgacaacgataaaacaaaatattaatcaacaagcagcctcataatatcataataaagaatgccgaacacatgatgaattgactcaacccaaagatacatattttattcatcggtttccacaacttttaacaacatctatcattgaatttatttccaagatctgcctccaggctgtccacgttccaagaaataaattcttgattacatttatattatagaaccataattagaaatagaaatgcagctaatcgcctaatcatgctcccagaggccagagccatagtggtgagggaaaacatatggacttagctttttttttttattagtataatcttttaccatttactaaatgttaattaactgataaaggtttgttagctgttactccagctacattttaaccctgattttgttttaccctagctttttacaagatgattattattagttgcaccgcaaatcattatgatctcatgttttgttttactcgagagtatatcaaacaattacatgttctaaattactagtattacattttcattttccaaaatgaaaattactagtggcaatgacaataaaattactagtactacattttccacattatagtttgttatcatcatcatcaacgtgagtcagccgagttgtaatgagaccaatactctttcacaagctttccgaacaaagagttctcatccttcatcaacttcattggctcatcatactccacaatccgtcctaaaatgcaaccaaaacccatcaaaaacagattcagaggagaaaaagatcaaaatgatgcaacaacactcaccgtcgctgatggagagaaccattgtacaatccataacggtagggatacggtgagcaactgtaatgacagtgcaatctgcaaattctcgcctgattgttttctgaagtatcaaatctgttgcattatctatcgatgccgtggcttcgtccaggactaatactctgcttcttctcaaaactgctctgcctaaacagaacaactgtctctgtcccatgctccaatttgatccatcctccacaactataaacaaaaatataacacaactttgagccgcaaaacatctgacttactagaaatctctctcttataagaaactaagatttgttacctaatgaatctaagccgttctctttttcttgaaccacttcttttagttgacacttgccaagaacctgcattttttaaaatagctttttgtttagtctcaactcctttataagattcatagttttctcaaatgggttttaagatttagacgtacctcccaaatctcagcatctgaatgctgacacaaaggatccagattaaatctcactgttccattgaagagagttggatcttgaggtataatcccaaaccttgatctcagatcatgaactccaattttggagatgtcaacaccgtcaacgacaatctttcctccaacaggctcaacaagtctgaacagagcactgatcagagttgtcttcccactaccggttcggccaacaattccaatcttgtgtcctccttcaaatgtgcagctgattccttttagaaccagtggggattctcttctgtatcttatctgtatatatgaacattaataaattaagaaacactcataatatggattagagagtgaaagtgtattaatcaaacttacctgcaaatccgagatttcgactcgacctgtgaccggccaattaaccggtggtcgagtctcttctattacttcaggagcctcaggtgttaaatgtgtgtactgattaagtctctcaaccgaaatgatccagttagctaagtaacattggttctgaacagagtaaacaagtcccatattcaaagataaaccataagatagcgccataccgatgaaccctgacacaagaaacaaacatcattaataaccaaaacagtgaatcacatctcaaggaacttgtattcttgataatgactcaccagagctaaatgttcctgtgggaagcaaaatcatgcagaaagcagtggaggcgagaacaatggcgctaacggtttcaagccgctggatcagccattcgttcgctgcaaagctatgaaagaaaggactggcgtttgtatcaatgagtgtgagacttttcttgaaaaacctctcttcttcatcaaatgctcttattgttattgctcctgctactgattctgctaaatgattcgccacataagatcttgtcgtgccattgatccgcatcaactctttagctgtttggaagtagtacttctgtaaaacaatcaaaaactattgttggtttctttttcaagaaaacagaaaatctattaagaggaattcaagaaaaagaatctgacctgtaaacgaaaagctagataaaccatgggaacagatacaaacaagacttgccaagtaacaatagctaacactccaagactacaacctgtgtttaccgaagacgcaaccacaaagatcagaccaaaaggaacgtcaaggtctacaatgctcaagtcagatgagacctgcaaatccaaagtaattacagttaaagaagttgaataccagaatgtaaacataaatattcatcaagttcattagcatttaccctgctaagaatccgtccaagaggtgtggagtcataaaatgacataggtgctctaaaaagagagttaagaagctgagaaaacaatgaagctgatgacttcatgcacataatcacgacacagacagatctaaccatcaagcagagaactgagcacaatccaatcagtaagtagaccaagatcaacttcaaagtgctaacttgagggttatctacgtttgcagccatccaagagttctgaagaatctgtccaactgcaaatgtgacctgagctaagctcgcgatgaagaagaatatgtaacctttgttctgattcatgtactgtatgtacggtctcaatcccgtgtctcccttctctcgctcttcctgtttgatcaaacgactcggtttcaagaccttggattgagatgaaatgactctgttgatttccttcaccggtttggtggggttttctaccgcaaccactctttctgaaccagcggtttctctgtgagcgttcactagatcttgaaagtctctgcttctagctaggagttcttggtatgtatcagcttcagtgatttctccatctgacatcaactagagaaacaagtacaataagcaaccaagccaaaaacagaaaaccaaaagaatcaattctgatttcaagatcaaattaccaaaacagaatcaaaagcaggcaagaaatccacttgatgtgtaaccaacaacacagcttttcccgcgagagcatccataacatattcctgatttcatgcacattagcttcaacattttcaagagaatgacagtgtgaagtatctgctttagtaagtacttacttggaacagacttgaagcagtgtgtgcatcaacagcactaaatggatcatcaaggagataaatgtctgcatcttggtatagcgcacgagcgagttgaatcctctgtttctgtcctccacttagatttacacctctttcaccaatctcagtctggtctccatcaggtaagagctcaagatctttgtctaggctagatttttgaattgtctcacggtaacggtgttcatccatcacacctccaaagaggatgttatctcttattgtccccgtttggatccatgctgtttgagaaacataggctatggtaccataaaaatcgatctgttgaatgattcaaatcaagatgattagaaacataattttcgagtatctaaagttgttcaaatctaaagctaatgataagacttactgttcctgagacacatggagtttcaccgagaatggcagctaaaagtgttgacttgccagagccaacctcaccacaaacagccactttctcaccaaacttaacctcaagactcacatttctcaagtttggttttgttgaacctttctcctcccaagaaaagctagcagatttaataataatcgcgttctgattgccttcggatctctgctttctccgcctctccccaccttgaagctcaggagcttctagaaatgttgcaatacgactgaaggcaactttagcctgaattgtcactccaataacatcagggatcattcttactggatcttggaccagacgcagggttgccacaaaagtgaaaacgttacttgctctcaatggaatgtctaggaaataacaagtggcaaaagttgcagcagagacaaacaccggtgatgaccagaacagaaccgcattataagcctttctcatctgaaccgccttcaaagatttcaactcaatgttcctaagcttttcaataaccttcttgaaatgtgattcccacgcatagagcttcaagaccttcatgttgacaagagactcattgcaggccttcagcctctcgtcctgagaggtcatgagttcgctttgaaacttgttctgaagttttgcgataggagcgttgcataaaacagtaagtattatcacagctagagctgaaaacgtagcaactcccacagaatgaaagagaatcccaagcgcgattagtagctgaaagcttgttgtccaaagctggtgaaaccaatacggaaactccccaattctgtaagcatcaacagtagcgtagttcataatctcgctgccagaatgaatcagtcttgaagagttattcaatctcagctgcttcttgtttatagctgcagttagaagagacctcacgcgtaaaccgacaattctacatctgaaataccattgtctctgtgacaaagactctatcatctttgagaagaacagcaacacagccaacacaagcccttcatatctaaagcttgcattgccttcagcaaccaaaatgaaagcattcagaagcaaaggaccagctgaaacagcaacaatcttcataaaagcaaagaaaccagaggtcaaaagctctctccagacacaaagaacagtaactttcaagatcgaaggttgacaagaactccctaatcttctcttctgctcaatgagattttcctcaaacaaggaataacacgtctctgcacgctcttcctttcgaagctcgggtatatcttcttcctccaagtctttcacatttcctctctttatcaaagaattcaaccaccagaatgataacgtactgaacaatcctgctttagcaaactggctaacccggttatcaaaatcggctttttcgctaaacccatttgaatcaccagcattaagaggctcgtataaactactctcaccagattcatcaaatctatagcctttataagcacttaagagtaacaaaactgacccaggaagtaacaaaacatcaagaattgtcctaactgctaattcatctccaaacacagcattgttcacagataaacaacttgagaccaaaccataaaagaaggagaagatagataacaatctcaacgaagacttgcggattcttgttcctctaacgcaaatgattaagttaatgaataaccatgtaaacccttgaatcagaatgaccagccagaggattaagggcttactgtgattctctcgtaaaacccaaatccctaaaaccaaatctagagatccgatgattccgttgaatagagcagacactagtcgcagacaaaagaattgatgaatccttttgggaggttccttgtgaaacaagcaaatacagagggttaggaatgagagtgtgataccgaaacatatctgtagaaatcgaacagtgcagtttgatgatgtgtggtgattcccgcagaaggaagtccaataattttctatcattttttttctttctgatttctgagaaaaaaaaaacaaattttcagggaatatttttgtactgacttatcctattttctcgtctaatttttctgggcatgcaaaacaagaaggaagatgggggaaaaatatctaagagcgggaaacgaaaggtcgaatcgagagagaagaagaagaagaaaaagaagaatttggttagtctctgaaaatgaaaaatacgtaagaaaatcgaagaagtactctcaaacttctctgcttttttatggttaaaaatttattgatttggatactgtagaacgggactcaaaacaaaattatgtatattggggaaatattattttatttggattttcttaacagaattattttattagttgatttgatgttttctataatttttggaggatttatctctttaccctaataatagttccattattctatagatttcagttactttcacttatcactctgacactcgtctagtctcgcaatcaaaacaaaaagaaaagacaaataaacagtgtcttctactctcaaagagcacaagtctcttacaagttacaacaacacatgatgagtcaatgacaaataaataataatgtattcgtatcacattttatcaaaaaaaaaattgattgttatatctttttttttaaccaatagattaatattttagtagaagcgtgaatgtgtgattatctagtggttgtccatgtacttaaaacacttttacgtcaaaaacaaaattagaagacttttacgttcaactagctagttatgagatgcaaaaaatatagagatgactcattttcctttgttccgtcttttagccgccggtcaaattttcacagtaaatgttataacacatgagaaaataaattataaaattaccaaaaatgtacatataaataaatgatttgcatatctgtccgacaaaaataataataaataaatgatttgcattagttactaattaaatgctttattttgcatttgaatatatatatatatatatatatatatatatgtaccttgagtattgtagaattttatgagaggtagttcatactccttttttgtaataatatatatattgtaataatatatatattgtagaatatatatatatatatatatatgttaagtaattagctttgttcacaagataattcatattttatgagaggtagttcatactcctttttttttctcctcaaggtagtagaacttttagtagttttcacaataatgtcattctacacttttatacataaatgaaaactagtaaaaattctacaatactccttattaatacactaaaaaaatgatctttcttgttaatatattaaaaaaatagagtcaaaatagattttttattcacaattatattttgcgttggaaatataaaacaacattttttgtgaaacaaatataaaatgtgaaaattacattctttgtgaaacttagggagtataatatccatcaactcaaaattgagttaacttttatttaactaaaactgtttaaatgatagtttgtatagttatacaaaaaaatgaaaatgtgggtggtttagtagtcagtttttaaaaaatggtgtggttatagaccgttaatcttattgtgaataaattagagattggcgagatgttttttctttaacatgatttggcgatatgttcttgtttgcatctcaattcgcatttatttataaaatgaaggcataaagtacgaaagcaacaatacactatgtaataggatatacttttataaattcagattcgcgttatatgtttgttttgggacctcaatcgcataatatgtaagcatggtataataattcactgacaatgtgagagtgactcccacagaagtcggatccaaattgaaatcgaactataaaacttctttacaaaatctattttttccaccatatttaacgaatctactttctgtcgttttttcccaaccttagcttttcgttggtgacttctttttatgatgtcttcgcagggacttcgttggtgactactgactagtaactaaatatgattaaatttagtgaaaaaaaacagtactttttttgtcatgataaatcataaatgtatctatggcgccgcatgcagaggccaggtcgaacagattttgattttagtttgtttttgggtttagttttgaatattaagaccaatgtaaaagttatataacaaaggttggcaacaaaaaaaagttatataacaaagtctaaaatttctttgttaattttttttaaaaaaaatgttttacacagttgttgctgcgtttggttacgtttttttatatgtggcctaatggcattacaatactattttaagagactagctagatatcaaattgtggatttggtggggggaaaaaaccatagaaatgagatcaccgacttgcttgtatgtttccagattatcgtttgtttaatattttaaaattagcactccactaaaacaaaaaaattaccaatggaaactataaatattccatgtataaatgatataacttaattggccagttcattagaactttatattttattcaaacctgagatcatagagtggacgcaacatacttagaaagaaaaaagaaagaaaaaagaaaaaaaaatcgtggctaatcacgtgaacaaataaaaaacacatgtaagccaccattaattcctcatcactcctttggatttgcatggaaagaagtaataaattattgaatcacctgctcaacctaaaataaccaagagaagagagtcatgaattcgtaaaactaattaataaaattttggtcatctagccaattttaagaaaatactctagatgacacttttcctgttatttatccaccgtttttacgctctttcatgtcaattacaaagaaaatatgtttcgtccatgttccttttaaattttgagtacactgagttataaatttataataccgttgtatagattctatgaataatatgtgtcgtgtatatttagtttcgtcatggctcacgtcgttcgttttggcttttcaaaaaatttatatcttcactcttgttgtatctcatgtaaactccacataattttttttttctttttttaatcttttaagcacagtagcttttgtttgactgaaattttttgacgtatgtgtacaagaatctgaattctgaagagaggatagatcttaggagcgtaggacaaatgtcaaatattcaatgatatcatttgtattttttgtaactttgcatgtgcacgcataacgtattgttgatcatttgatctaaaggtcttaaggtcagatgaaatttaaaaccggaatcttataaaaacgttgaaatctccgaataatatgagaggaaatatttagtaacagactaacagtgttagatagttctgcaataatggttttgaaaacatcaacaaatcctatataccacctttgaagttgtatttcgattcacttttttttttttttttttttttgaagttgtatttcgattcacttaagtacttaaaattgttaccccaaaaaagagagttgtatttcgatttatttattattttcagttacaaataaattgaaacgatttgcagcaatttgcactattatcacaagaatggaaacaaaaaagcagcggacgagatggttttgagcttttcccaagaaagtgtactttgctttcgactacgcaaaatgacaaatttctggttaccactacttgaagaaattaaaagaaagtaaaatttctttggctgtttcttttacagcgtcatttcctacgtcacttttgactctattattatttatccttccttttcaggacaacttgttttttctttttctttccttgtgtgcttttgccttttgattttagtttgagtaattttgctctagacttaaagccgcttgttcaaaggtccattagtcttataggcccaaataaacaggtttaagacccattccactgaatcttctgagaagcgggttaaaccgatctaaaccgagaaatattgaaatgttcatcgtcttttctttctctcatacgcgaaagacctgcgaattttgtgatcgaatccaattgtcaatttctcagggtttcgaaaaccctaatctctctatggaagctaacaaaaaagcgaaacctagttatggcgatgtgattagcaatttaccaaatgatcttctctgccgaatcttatcttacctttcaacaaaagaggcagctttaacatcgatactctcaaagcgctggtcgaatctacttctatcgatacctattctcgatttcgacgattccgtgttactgaaaccccaaaagggtcaacgaaaaaatgtttttttcaaggctttcgtcgataggttactctctcaacgagtcgagacttcatcacatgttcaaagagtctctctcaagtgtcgtcaaggaggtgttgaaccagattgtgtaatcaagtggatactaacaacagtaagggatcttggtgtcttggatctttctctatgcattgattttggaatctttcatttgccatttaatgtctttaggagcaagactttggtcaaacttagaattggaacaatgatccgtctttctcagtttccttcagatgttgtttctccgacgcttaattctcttgttcttgatttggttgagtttcgtgatggtgataaggttgagtttagacagattctgttagcttttccttcacttcaaagcctgcgggttcatgaatctaacaagtggaagttttggaatggttctgcttcaagtcgaacgcttaagagtcttgtatatagaagtgatgatgattcctctgctcctaaaccttgtgtttcgtttgatactccgagtcttgtttacttggactattctgatatggttgcggataagtatgaaaatctgaaatttgacagccttgttgaagctaggcttgatcttcatttgaccgcttttcaaatcatgcgcaaaccaaataatattggtattgtttctggtgatgtaacaaccttgttcaaggggatcagaaatgtcaagatcctctgcttatctccggatgctttagaggtcagtcttcttgagatgtgtagctttgttctttgtgggttagtaaacaatacaaaagagttgattttggtttgtgtcattgtgtgtttcaggcgctctattaccgtggtgaaaagataccaatgttcaacaatttgattactttatctctgggaagcgataaacctcatggttcaccattcatcttctggaaattgcttccatctctgctcaacaactctcttaaactagaaactctcatcatcaaggtatgatacaaaagaagttatatgtatactaggtctgaatctgcaatgatattttctccaatgtttttgcagggtctagtgcattatgttgctgaaggatgggaaggtttgagtcctatgactcctatgagccgtctctgcttttcatgggatactgtgtctgattctctgtcatcatctgcgatgaaggttttagagatcagtgggtataaaggaacttggcaagagctgaatcaaatgaagcgtttcttggggaatctatcgcgtcttgaagtggttagggtttaccataaggcaatggatgataaggaaagaattaacgtcatgtttgatctttttcttcttcccaaagtttcatctgaatgcgatatccaagtcatgaaggaaactgcttgaattgtccaagtttggttgtttttagtcgtctgtatatgaatgaatattgttcgacaaatcttagtactcggcaacacatttcttaactcatagtctgtattgatcatgagattggtagtgaactaatgtcttctaagcccgagtttgtaatctgccagtttgaaccaccagcgagacttatggccactccgctggtggttcaaatcatagtggcatatgtggctcggactcaaacctcggtgtcttttttatctattgttgcaaattgtattcttgagtgttcatccactcgtcattagtattttgtttttccacgttgatttctcgctctcgtctacaatggcgaagaagccctaaatttcaattcttcgtttccctccagcaagagagatttctgaattcggttgttctaatttctcaatcgctgagcgatatcgtcggattcgcttgaagattacaagtaaacttctataatccttgtttgtgatctcgtcgaattctaatgcaacattgaaatctcgaatctcgatacaagtaatgtgtggaacctaactactattgaaatatggaatccttttgttctttgttcaggctctaagaatggtggattctaaaagaatggattctggttctaaagatatgatcaacgatttgccagacgcacttctttgccacgttttgtcatacctcactacaaaagaagctgcttcaacatctcttctctcgagacgatggcgttatctacttgcttttgttccaaaccttgaatttgatgactctgcctatctgcatcgcgataaaagggtaaagaatcctttacatgagaaaggtttagtgggtttcgtgcttacggttgatgacaaaaggaagaagctttctacaagctttccggatttcgtggataggatccttgatttacaaggcaattctcctctagacaaattctctctaaagatggtagatgatcatgatcctgttgatccagattgtgtcgctccttggatacacaaggtattggtacgtggtgtatcggatctccatctagtcatcgatatgaatgaatggacgtcgcttcccgcaaagatcttcttgactgagacactggttaagttgactctaaagattagagatggtcctcccattgatgtgaaacatgttcatcttccaaagcttaagactctccatctcgagtcagttatgtttgatgaggaggatattgggtttagcaagcttctttctggttgtcccgagcttgaagaacttgttctccatcatatatggtcgtgtgtatggacatcttgctctgtttctgttgcgactctcaagagactgaccttttgttgcaacaacatgaagttttgcggtatgcacgaggaaaatccaaataatgtgtcctttgatactccaaatcttgtttacttggaatatgctgaagtcatagcgaacaattatccaaaagtgaattttgattcgcttgttgaagccaagatcgatatttggatgacaaatgatcagctagatgaggtgagaattagagacatatatgagaaaaacgttatggtcggcaatgcaacagatcttatagttggaatccgcaatgttcgggtcctctgcttatccgctgacactctcgaggtttgtattccattctcatctttcttctaatctttcttattctaaggatttgagtcaatgatttcatctgagtgatgatgatctagtttataatatgataatggttttggtttcaggtactcacgtattgttgcaagcaaataccgatattcaacaacctgactcatgtaactatccagagtaccccaaaagttggatggaaatcattactaaagctgcttaagaattc

SEQ ID NO: 1370 - DNA, 114080 bp, Arabidopsis thaliana
cgaattttgtgatcgaatccaattgtcaatttctcagggtttcgaaaaccctaatctctctatggaagctaacaaaaaagcgaaacctagttatggcgatgtgattagcaatttaccaaatgatcttctctgccgaatcttatcttacctttcaacaaaagaggcagctttaacatcgatactctcaaagcgctggtcgaatctacttctatcgatacctattctcgatttcgacgattccgtgttactgaaaccccaaaagggtcaacgaaaaaatgtttttttcaaggctttcgtcgataggttactctctcaacgagtcgagacttcatcacatgttcaaagagtctctctcaagtgtcgtcaaggaggtgttgaaccagattgtgtaatcaagtggatactaacaacagtaagggatcttggtgtcttggatctttctctatgcattgattttggaatctttcatttgccatttaatgtctttaggagcaagactttggtcaaacttagaattggaacaatgatccgtctttctcagtttccttcagatgttgtttctccgacgcttaattctcttgttcttgatttggttgagtttcgtgatggtgataaggttgagtttagacagattctgttagcttttccttcacttcaaagcctgcgggttcatgaatctaacaagtggaagttttggaatggttctgcttcaagtcgaacgcttaagagtcttgtatatagaagtgatgatgattcctctgctcctaaaccttgtgtttcgtttgatactccgagtcttgtttacttggactattctgatatggttgcggataagtatgaaaatctgaaatttgacagccttgttgaagctaggcttgatcttcatttgaccgcttttcaaatcatgcgcaaaccaaataatattggtattgtttctggtgatgtaacaaccttgttcaaggggatcagaaatgtcaagatcctctgcttatctccggatgctttagaggtcagtcttcttgagatgtgtagctttgttctttgtgggttagtaaacaatacaaaagagttgattttggtttgtgtcattgtgtgtttcaggcgctctattaccgtggtgaaaagataccaatgttcaacaatttgattactttatctctgggaagcgataaacctcatggttcaccattcatcttctggaaattgcttccatctctgctcaacaactctcttaaactagaaactctcatcatcaaggtatgatacaaaagaagttatatgtatactaggtctgaatctgcaatgatattttctccaatgtttttgcagggtctagtgcattatgttgctgaaggatgggaaggtttgagtcctatgactcctatgagccgtctctgcttttcatgggatactgtgtctgattctctgtcatcatctgcgatgaaggttttagagatcagtgggtataaaggaacttggcaagagctgaatcaaatgaagcgtttcttggggaatctatcgcgtcttgaagtggttagggtttaccataaggcaatggatgataaggaaagaattaacgtcatgtttgatctttttcttcttcccaaagtttcatctgaatgcgatatccaagtcatgaaggaaactgcttgaattgtccaagtttggttgtttttagtcgtctgtatatgaatgaatattgttcgacaaatcttagtactcggcaacacatttcttaactcatagtctgtattgatcatgagattggtagtgaactaatgtcttctaagcccgagtttgtaatctgccagtttgaaccaccagcgagacttatggccactccgctggtggttcaaatcatagtggcatatgtggctcggactcaaacctcggtgtcttttttatctattgttgcaaattgtattcttgagtgttcatccactcgtcattagtattttgtttttccacgttgatttctcgctctcgtctacaatggcgaagaagccctaaatttcaattcttcgtttccctccagcaagagagatttctgaattcggttgttctaatttctcaatcgctgagcgatatcgtcggattcgcttgaagattacaagtaaacttctataatccttgtttgtgatctcgtcgaattctaatgcaacattgaaatctcgaatctcgatacaagtaatgtgtggaacctaactactattgaaatatggaatccttttgttctttgttcaggctctaagaatggtggattctaaaagaatggattctggttctaaagatatgatcaacgatttgccagacgcacttctttgccacgttttgtcatacctcactacaaaagaagctgcttcaacatctcttctctcgagacgatggcgttatctacttgcttttgttccaaaccttgaatttgatgactctgcctatctgcatcgcgataaaagggtaaagaatcctttacatgagaaaggtttagtgggtttcgtgcttacggttgatgacaaaaggaagaagctttctacaagctttccggatttcgtggataggatccttgatttacaaggcaattctcctctagacaaattctctctaaagatggtagatgatcatgatcctgttgatccagattgtgtcgctccttggatacacaaggtattggtacgtggtgtatcggatctccatctagtcatcgatatgaatgaatggacgtcgcttcccgcaaagatcttcttgactgagacactggttaagttgactctaaagattagagatggtcctcccattgatgtgaaacatgttcatcttccaaagcttaagactctccatctcgagtcagttatgtttgatgaggaggatattgggtttagcaagcttctttctggttgtcccgagcttgaagaacttgttctccatcatatatggtcgtgtgtatggacatcttgctctgtttctgttgcgactctcaagagactgaccttttgttgcaacaacatgaagttttgcggtatgcacgaggaaaatccaaataatgtgtcctttgatactccaaatcttgtttacttggaatatgctgaagtcatagcgaacaattatccaaaagtgaattttgattcgcttgttgaagccaagatcgatatttggatgacaaatgatcagctagatgaggtgagaattagagacatatatgagaaaaacgttatggtcggcaatgcaacagatcttatagttggaatccgcaatgttcgggtcctctgcttatccgctgacactctcgaggtttgtattccattctcatctttcttctaatctttcttattctaaggatttgagtcaatgatttcatctgagtgatgatgatctagtttataatatgataatggttttggtttcaggtactcacgtattgttgcaagcaaataccgatattcaacaacctgactcatgtaactatccagagtaccccaaaagttggatggaaatcattactaaagctgcttaagaattctccaaagcttcaaactctcgtcttccaagtatgaaattaaacaaaccttttaaagcatatcatgtttgaaacaaaccctttaaacacacaagattaatgcaacttaacgttgaaatctttcctctttatgtttcagggactccttcacagagatacaaaggaggagggcgttgctatcatcaaaatagagaagcaaatagagaaggtcaagcattttttggaaacaatgccacatcttgaacaattggttttacactatgattcatctattgacggagatatgaagcaacttctgatgcttagtagcttagcttcaccaaagtgcaaggtccaacttatccctttagtaacctgagagtatcatcatttactgttcccacttcgttcggacgatatgagaggtcctcttctttaggagaacatttatggtttctgactttttggttacatcaaaccatatatgaatatgtcatacttctttcatttagcatcagagttttaagaacgtgtttgtattcttttccagttttgcccgacaatgttaactttcgtgttttgtgtgtttcagctttttgttttgtattcttgtgttaactatttctagttgacagagagaaacaaatctaaaacatgggtcttaccttgccatagaagttacctccactcgttttattcgacgagaaactatgatctgatcacaattttttgatggataatggatcactttctaattgagcatatggaagattaaactgtagaaaatttacactaaaatatattttaatcttggtgaagtatctgactgatcaacggttgagtcaatctcttgtttgcttgctttcttacacaatgtgctttaactttaagagttttaccagactcttgtagttgagctgattcctaacaccaaaatcaatgtaaattctgaaaaaccgtttccttacttattcttaagggacttcattacaaaaaatgttttgaagaggatgcagacaggtgtgtgtgtgtgtgtatgcaaaccttgggaagggactcctatttgtctatcatcaagtccggtgaagattctaaaggtattgaagtttggagaagtctgtagttacaaagatgacatggataggcagacggaggtgattaaatacttcttggagaccatgccaaatctttaagtgatattatactacgctagctactccatttgatgatgatctgagtatagtatcaaccgaacttcagatgcttgaaaaagtagcctcacccaaatgaaggattcaagttatctctgataacatcagcttctcatgagacttcatgttttgtttgtttcaatttgtttttgtcgttttatctgttcttgggttgaatagggaaaagaaaagtaaacatgagacctaacttgccgcataagttattcaaaaataaattaaccagttattttcttctacgagaactctatgtttagaactcgattaattattgatggataatatacttatcgagcattaatgttacaaagattactcaaaggcagtgttaaagacaaactattaatatctaacacaagttaaataaaaatccacaattttgtgccattcgtgcaaatttgttattaatgaaattttaaaaacaaaaatattgactagaacaaaaaaaattaaacattaaacttataatcacacgccgagtaaatctgacaaatattaaagccgttcgccctaaaatcaaaatttctagattgcaaagccctaaattttcaatttctgatatcggttgttcgaatctctcaatcgttgagcgattacgtgggagtcgatatagtaagatctggaatctttgtttttttgcttaggctctaagtatcgatctttcacggtgcaatcatggattctgtttctaaagatatgatcaacgttttgccggacgcacttctttgtcacatcttgtcattcctcactacaaaagaagctgcttcaacctcacttctctcgagaagatggcgttatctacttgcttttgttccaaaccttgaatttgatgactctgtctatctgcatcgcgataaaagggtaaagaatactttacatgagaaaggttttgttggtttcgtgcttttggttaacaataaaaggaagaaactttcgacaagctttcctgatttcgtagataggatccttgctttgcaaggcaattctcctctagacaaattctctctaaagatggttgatggccatgatcctgttgatccagatagtgtcgttccttggatacacaaggtgttggtacgtggtgtatcggatctccatctggtcgtagacatgaatgaatggacatctgatcctcttccttcaaggatcttcttgagcgagacattggttaagctaactatcaaaattagagatggccctttcattgatgtgaaacatgttcatcttccaaagcttaagactctatacctccagtcagttatgtttgatgagaacgatattgggtttagaaagctcctttctggttgtcccgtgctcgaagaacttgttctcgatggtatggggtcgtgtgtatggacatctttcactgtttctgtcgcgactctcaagagactgacgttttgttgccagaaaatgagtagttttggctatatgcacgatgatgaaaatccaaataatgtgtcttttgatactccaaatcttgtctacttggaatatgctcaagtcatagctaacaattatccaaaagtgaattttgatttgcttgttgaagccaagatcgatatttggatgacagtggatcagatacgagaggtgagacttagaaaaaatgaggtaaactgtatggtcggcaatgcaacagattttatagttggactccgcaatgttcgggttctctacttatctcccgaaactctcgaggtttgtattccactctcatctttcttctaatctttctcattctatgctattttgtataaggatttgagtcaatgattgcatctgagtgatgatgatatctagttgatcatgagatggttttggtttcaggtactcacatattgttgcaaacaaataccgatattcgaaaacttgagtcatttaactatcaagagtgacccaaatgttggatggaaaccattaacaaagctgcttaagaattctccaaaactcgaaactctcgtcttccaagtatgaactaaaaccctttaaagcatacaaacacaaagattaatgcaacttaacgttgaaacctttcccttttatgtttcagggactccttcacagagataacaaggaggacgtcgctatatcatcaagttcagtgaaagtgttaaaaatattccttagtggtgacaaattaaaaaagcaaatagagaaggtcaagcactttttgaaaacaatgcctcgtcttgaacaactggttttctactatgatgtgaaagtgttatcgcaacttcacatgcttagtaggttagcttcaccaaagtgcaagatccaccttatccctagtcgcgaaagcgtatgatcgaccgttcccacttcggtactcatgacgaaatgaggtcctcttctttgattatggtttatggctatatgtggtcatatatatcaaaaccgtatatggatgtctctacaatacaaaacaagttctttggagcaccttcatccattattgacaagtggatgaagagtatcttcacaatagtatattattatttctataataaataaataattaaatttttttttttaaaaaaattaagccattaacaaaatgagaagtgggtgaaaagtttcttgtaaaagaaatagttgcacgggaaaaacaaaactaaatttgagattgagacctaccttgtcattgccatgtaagttacttcaaaaaaaacaatcaccattcgttttcttcgacgagaaactatggtctgatcacaatatttgatggataatgatcactttcttattgaacatatggacgattgtaaagtagaaaatttacaccaaaataacttaatcttggtgaagtatctgactgatcaacagtttatatgtcaaatctctagacagcttgtttccttacacaaatgtgctttaatgttgagagttttactactattgttgtatcggagctaattcataaacaccacaattaccgtttagatatctgcaatattataacatgagttatttgacctcttaaattaattttttgaatgattagaaaaatatcttatcgaatcatttcaaccccaaatcaaaacaaaaccttattctctttactcgctttaacccaaacacaaatcaaccatactcgtagtagtaatttaagcataactaagaagctgcttttgtccctaatcttgctttcgatgactcggtttatctgaatcctagggaagagaaaaagattcttattactcctagagatctcatggaaatgatggatgaaagagagaataagatttctacaagttttatggattttgtggatagagtattggcattgcaaggcaattctcctgagtaaacatagaaggcgatggatacataaaagtttcaagctttttgtgaatagattaatggctttgcaaggaaatgctccgttaaacagattctctctcaagtgtaaagttcgctgtgattcagcttgcgttgatggttggattatcaatgtattggatcgtggtgttttagatcttgatctaaacatctcttcggaaagtgattataagctgccttcagaggtcttcttgaacaagacattggttaggctgaaactaggaggtaaagatgagttcatcattgatgtggaagaagtttttcttccgaagcttaagactttgtatcttcatggtttcgtttgtttcgaagatagtggtgttgcgtgtgccaagctaatttctggttgtcctgtgcttgaggagttagttatgattaatttgatgtggggacttatggacgtttgctctgtgtctaacccgactctcaagagagtaacaatctgttctgagattattgattataatcctcagagtgtatcatttgatactccaaatcttgtttacttagaatttactgatgttgttgcaatcaagtatccaaaagtgaatttggattcgcttgttgacgccaggctcggtcttcgactgacaccttgtcagaccacgaaggcaagaagatcagtaaaaagtgtgggacaaggaatgatgggaaatgcagcagattttcttatgggaattagcaatgttaagatcctttacttatcattcgacacacttgaggtttgcacatcagtaccatctttatcaacatatttttattgctctgaaagtaaaccaaggcaaacaacctcgacctcagattcctttgtttcagtttggtaatttgcaagaatcaaaccagtcactgaggcctattttcgaaccatgtttagttccatcatgtatattgaattaatgattgcaattgagtgatgatctagttgatttgacttttgttgcaggtacttaatttctgctgcaaaacaataccgcttttcaacaacctgacttacttaactatcgagactaacgaggatgtaggatgggaatcattgtcgaatatactcgagaattgtccaaatctagaaactatcattttcaaagtaccagcacatatcattttccttcatcagctgctacattatttccaaacacatgtaaattctgaaaagctatttccttgattatacttcagggacttcattacagagatacaaatcaatgttgggacgagagataccgcttcaaagacacaaacaaatgttttgaagaggatgcagacatgtgtatgtgcaagccttgggaagcgactcctatctgtctatcatcaagttcggtgaagattctagaggtattgaagtttggagaagtcactagttacaaagatgacatggataggcagacggaggtgattaaattcttcttggagacaatgccgaatctcgaacaagtgatattatactacgatactccatttgatgatgatctgagtatattatcaactgaacttcagatgcttgaaaaagtagcctcacctaaatgcaagattcaagttatctctgataacatcagctactcatctactgtgcactcttcctcatcaacaagtggactcgtcttcctcaacaacacctttccggtttaaagattgttctttttcccatcgcagagaagattagcaaagctttagtttttagttttagcttaaaacaacaatgacaatatatagtttggtttctgttctgttatttggtgtcttatgcccttccagtaggttcgtagattacatctgttttatcatatgcgtccaagtagagatgttgtggtgggtaaaaaggctcagcccgacctgaatccaaaataaacccgcccaccaaaaacccaactttagaaaactcatatgggtttttgatttagtgggtaaagcccgaaaaaaactgattgttctgagactactcatgggtacccaacttggtttttatcattttttttaagtttatgtttaactgttaatacactattatatgtatgttgtatatatattttgcttataaatatattttaaattatatttattttatgtattacatatatatttgatgggaaaaaggttgaattgcgtttttggcgggaaaatgttaaattgcgtttttggcgggaaacatgtcaaatccttttcttggccggaaatgttgaatgtcgtttttggcgggaaaatgttaaattgcgttttttgcgagaaaatgtgaaatcatttttggcggaaaatgttgaatcgagtttttggcgggaaattgttgaattgcgttttggcgggaaaatgttgaatgtcgtttttggcgcgaaaatgttgaatttcgttgtggcgggaaaatgttgattgtcgtttttggcggaaaaatgttgaatgtcttttttggcggtaaactgttaaatcgcggtttaggggaaaaaatgtgaaatcttttttgacaagaaaatgttgattcacttgaaaaagtacttaaaaaaactcgtgggtacccataacccaatgaagtaaacccatatgagttttatttatttgggtacccagcccaatttaaacctgtgttttttttccagaaaaagtagatctatgagcttaaaattttatgtgggttttgagtacccagtgagttttaacccatcattaacatctctacgtccaagttataaacttttatggtatctcaagtccttttgaatctctcataaaccctttttgccaattggtaacacatgtgatgtgtattggctacaaaggtttgcatagttagcgaaaaggtctaaattccatccaagcaaaactcaaacggcgtcgtttctagctagataccgagagacccttctcaccgcattgctgattgctttaccttactgtgacactgtcgcaacgattgacgaaaccataattgtcagtttcaacttccttcccacaaaaaacctctgactttggttgttcggaagttatcaatactcaatcatcgagtgatttcgagggtcccaagtaagattccccatttcttgtcctgagtattattctgttgcagtttctgctttgatttttctccagcaattttgcttttgtgtatagtatcaagcaaacttcagatgcttgaaaaagttgcttcacccaaatgcaagatccaagttatctccgataacaccagcttctcatcttctatgcattcttcctcatcaacaagtggactcatctccttgaaaaacacttgtccgatttaaagatcatcttgtttcatcccaaagaagtttaagcaaggctttggttgttagttttaagcctaaacaacagtacagtggcatgtgacatgtgagtgtagtttggtctctgtttgttattttgtgcattgtgctctttcagctgctcagtatgtaatggtattgaatctctcatctactccttctttaccaatttgaaaccgttgaatgtgtcttgtcttcaagtttttgtaaaggttggtagtgtcttttgttagtcgtgaatgaatttttagaaaagagagtaatcatagcatagcccatacagacaaatagataaacccaggcccatagtttgcaacagattatataagcccatttaaaaaagaccaaggaaggaacaaatctattagagaaaatggtgtttactaataacagcatcgggactcacccatcccgccattactagtacatcagtctcggctacgattgcatgaaccctaatttactgttccgcttccctctctagcattcactatcggaaaggctcttctttcatttccgtcttctgattttgtgattttgtgttttcctttccttcctctgtttctcaaaattttaattgtgtttagcgtatgtgaatttgaattactgacttcaagctcaaataatagtttaggtcttaatgagttcgaaaaggatggactctggttcgaaagatattatcagcaatctaccagacgctcttctttgtcacgtcctgtctttccttcccacaacagaagctgcttcgacatcagttctcgctaaaaggtggaggtttctcttggcgtttgtaccaaatcttgatttagacaacatgatctatgaccgtcctaaaatgggtagacgaaaaaggctagagctgcgtaaaagctttaagctttttgtggatagagttatggctttgcaagggaatgctccgttaaaaaagttctctcttaggtgcaaaattggttctgatccatctcgtgtcaatggttgggtactcaaagttttggaccgtggtgttgaagaacttgatctgtacattgcttcggaatacgaatatccgctgcctccaaaggtcttgatgaccaagacattggttagcctgaaagtgtcaggaacagatgagttcaccattgatgttggtgagttttttcttccaaagcttaagactttgcatttgagtgctatttcgttcggtgatgagggtggtcctccatttgccaagctgatttctgcttgtcacgcccttgaggagctagttatgattaaaatgatgtgggattactgggaattttgctctgtgtccagcccatccctcaagagagtatcaattgattgtgagaacattgatgagaatccaaagagtgtatcctttgatactccaaatcttgtctatttagaatttactgatactgttgcggtcaagtatccaaaagtgaattttgattcgcttgttgaagctagcataggccttcgaatgacacctgatcaggtctttgacgcaagagatttagtaaataggcatcatggttataaaagatgtaagggcgcaaatgcagcagattttatgatgggagtatgcaatgttaaaaccatgtacttatcgtccgaggctcttgaggtttgctcatgactctcgtctatatcttcatatttttattgctctgaaagtaaaataagacaaataagctagaactcagttgtttcaatttggtaagttttaagaattatacatgtgactgaggcctagtttcagcaggtatatttgagtatataattgtatatatgaataatgatctttttttctatctttcaggtccttactttttgctgtaaaaaagcaataccagtcttcaacaacctaattcatttaacagttgagactgacgaaagagtggactgggaatcattgccgattctactcaagaattgtccaaatctagaaaccctcatcttcgaagtaccatcgcatatccttttcttgcatgatctgacacatttcttttctaacacttagattctgagaaaccatttcctttgttatacttcagggactccattacggagatttaaatcaatgttttgacaaggattacagcttcaaagacacaaacgaatgttatggcgatcaaggtgacacgtgtcagtgcaaaccttggtatggcactccggtttggctatcatcaagcccagtgaagatactaaaggtattgaagtttggacaaatctctagttataaagatgacatggagaggcagacggatcttatcgagcactttttggagtcaatgccaaaccttgaacaggtgatattattctatgacactacatatgatgatgatctgaaaatagtatcaacccaacttcagatgcttgaaaaagtagcctcacccaaatgcaagatccaagtaatctctgataacatcagctactcatttactgtgtactcttcctcatcgacaaaagggctcaacttcttcaaagacacattcccggtttgaagatcattatcaaagaattggtagttagtttcagtcttgtctctgctttttgagcttctccatgtttattttctggttattcgtgttggtgatgttatgagtaaaccatgggatttgtcttgcctagaagaatgtttttgtaaagtttgctaaaactctaagcaagcttcttttgtttttgttgttctaagacctctagttttatgctgtgtcagcttctcaatatgcattctgccttttttgttcacattgtttacacatttttttgcttcagtgttaaagttcttccacggctccacgcaactcttgagttgtgctttgcgagtgtaaacaaaacaaaaaagaattggagataaaaataagtaaataacaaaacaaaagatttatgataatagcataaaattaggagtgtaaatttcaggattgaccttacataatttacttaaagaagcaaattaaggagtaatttttggtaaacaattcactcacaaccaatacgacgtcgtttattggatccagcattggaattcacccatcccgccacattgctatcccactgacggcaaagattgacaaaaaaaaacctaattttcattttcagctctcttcacactacaaacctcttaatctggtgattttgatgggtccaagtaagtttccttatttcttcttctgaatcttgttctcacgcagtgtttgcctttaattctactccatcagttagctttctttgtttctcgttggcaatgttagaagtgtgtaaaaagacaaaaccacctgggaactgttttgttttctagtttgagaatgtcgtgtttggactgtattgagttccgttttaaaccctgttgtgttctacttgtttaggttgaaagtgttgaccttttgttagaaaaagatggattttgtctcaagagatagaatcagcagtctaccaaatcctgtagtatcccacatcttgtctttccttcccacaaaagaagcagcttctacttcggtcctctccaaaaaatggcgttatttgtttgcgtatgtaacaaatcttgactttgatgactcggactatcaggatggtaaaccaaaaagcgatgttgaacttagtagaagttttatggaatttgtggacagagtcttggctttgcaagggaatggttccgtaaataaattctctctagagtgtagtaattatgatgttgatcttgctcgtgtcactggttggatattgaatgtgttaggacgcggtgtatcagagcttgatttaagcatcttggagtatcccttaccttcggagatctttgtgagtaagacactggttaggctgaaattaggaccggcaaatgatcttactctcacccttgataggaaagatgtttttcttccaaagctcaagactctctatattgattgtgttgatgttcaagagcgtggttttgggtttgtaaagcttctttctggctgtcccgtgctcgaggagttagttctgatgaatatcgggtgggaaaattggaagttttgctctgtgtctgtcaaaaccctgaagaggctgacgtttttctgtgaggagacttatgagaatccaaagagcgtgtcatttgatactccaaaccttgtttacctagagtattctgacgctattgcgagcaagtatccgaaagtgaactttaattcgctcgttgaagctcatatcggtcttcgactgacagaagatcagagtggagatgcagacttttcagaagaagactatttctcagaaggtgatgagaaaaaacagatggtcggtaatgcaacggattttcttaagggaataagcactgttcagatcctttacctatctgcccaagctattgaggtttgtctatcaattcctttagttggtggtcataagaaagtgatgatatagttggtttgatttttgtttcaggtacttactttctgctgtgagccaataccggttttcaacaacctgattcagttaacaatcgagaataactcagaaataagatgggattcactgccaggtctactcaagaactgtccaaatctagaaacccttgttttaaaggtataaaacaaaaccactaaagcatctttgtttatcagtgacataaaaacaaatacaacttaactatgaaaccttttctttatgctacttcttcagcgtcttctccacaagtataacaaggcatgtgggaacgtgtgctgttgtaagcgtccgaagcagccttcttgcctttcatcttctccggtgaaggttcttaagatatttctgtttgatgacaacgatgaagaagacgggtcggaaatgaggcagatcaagtatttcttggagaaaatgccccgtctagaagagttggtagtatactacaatacagcatatgaccctgctgtgttagaattatccaagaagcttcagaagattcctaagatagcttcaccaaagtgcaagatccaggtaatctctgagaatcttagtttgtcatctaccgtgccttctttcttgacaacgagatggtcttctcttcctcctgaagaagcatatccatgggttgactctcctcctccccaaataatagatcccatgttagagtatggttctcctccagaagatgatgattcctggttgtactaggctttgatctaaactcaaagcaattcaaatatttcctctgtttctgtcgttgtagtttacttttgtactctggcttttgtcctttttgtaactgagagaatgttgaactttatggtgtgtttatttccccttattctgtggtgtttaaactgttgttcccacgcatacacgtggtttgaataatctttctatagtgtaaacgcaaaatatctttactggtccttcaagaatcgtatgacttggccgatatatgagataaataattgaataacaatgtagaccaataatgaatgacggataaacttacttgcttcttcatgtttccaagacatttttaataccaaattgcttctatcacttttcgtccagaagttgctttgcataaaaaattataattctccttttcaagtctatgaaccctcaccgtttgtttgaagctgtagggtgattttaatgggctctgcttttacactcaacacaagtaagttttataattctgctttagaccttgtgttcctataagatctgataattgttttgtggttcttgttttttctttcctcgagaaccgaagcttatgattccgattgtgtgaaggattagaccttgatgataccggtttggagtttagagaaccctgtattttgtatcttgacttcagcttctgaaatcttcttgttggatgtgttgtttagatttatagaggctgatctgtctcaaagaaaccatggatgattgttccaaagatataatcaattgtttaccagacaatcttctttgccaaatcttgtccaacttgtccacgaaagaagctgctttgacatcacttctctcaaaaagatggcggtatttgtttgctcttgtaccaaatcttgattttgatgtccttccctctctgcatcccgaggttgcgatgcaggaccaggatcagacgagttttatagattttgtggatagagtattgaaattgcgagggaaagatcatattaacaagttctctctgaaatgtggagatggtattgaggatgaagatgtcttcccttggatattaaataccttgagacatggtgtatcagatctttctctacatgtctctccctctttggtttattggttgccttcaaaggtttttgcaagtaagacactggttaggctgaaaataggacctaaagatggtcctagagttaaactgagaaatgtctgtctaccaaagcttaagactctaaatcttgattcagttgtgtttgaagagggtaagattggttttgcaaagcttctttctggttgtcccgtgctcgaggaattatctttgcttaatcttgcgtgggatcgttgggattcttgctctgtgtcttccaaaatcctcaagagactaacgctatattgtgcacacagtagcagaaatccaaagagtgtatcatttgatactccaaatgttgtctactttgaatattctgataatattgcaaacaagtatccgaaagtgaattttgattcgctggttgaagctagtatcggtattcggatgacgaaggttcagaaagcaaatgcgagatatgtgtcagatgttgatgaggaaacagagatggttggcaatgcaacggatcttcttatgggaatatgcaatgtgaagaccctttacttatcttatgacactcttgaggtatgtaaatctatcattactagagggttttagttacttatatgtggaaatgagtgatattcttttgttttgtttcagacacttaatctttgctgtcaagtgataccggtattcaacaatttgactcatctaactattgagagtcatccggaactaggatgggaatcattgccaaatcttctcaagagttgtccaaatcttggaactcttgtcttccaagtgagcaaatcaaacccttggaaatgaatctgttgattagttttacatcaaagtttgagatgtttattttgtgttttagggactccttcacaaagcaacagatagatgtggggatgtgtgcatgtgccaaggtttggagaatagtcattcttgcttatcatcaagtccggtgaagtgtctaaagatattgaaatttggagaaaccaatgatgatgacgatatggagatagagatggagcagatcaagaattttttggagaaaatgcctaatcttgaacaactcataatatactacgaatcatcaatcgataatgatttagttagagtatcaagccaacttcaggaggttcctacagtagcttcactcaagtgcaagattcaagtaatctctgataaccttagcttgtcatccactttgcccatttccttgtcgatggaaaatggatttcacctgtagaagaaccttactggtttcgtggaattagtaatgcggtcatgcctcgattaccacttggaagctatatatggatgtgctcatggctacaagtatttgtagttactaaaattatcttaaaaactcaaatcaagattctcttgtttctgttgtttgtactttgttactaattgaaaaactctttatgctttggaagctatatttggatgtgtctcctggctacaagtatctttatgcttttgttgtgagaaagttgagtttatatttggttttctatcttttgtactgttttttctttttgctaagaatcttttgtactgttaaatgatgagtagagaagaaactaattaagaattgttatcttactgttcttaatcgagtggagaagaaactaaacaaacttcatgttgctctctcaagctgattcacttcattggattcttgtgatgatgcattctgtacatggtgtgaatggatgacttctctctttcgtctcacaaagtaagttaatcatgaaccagattggtgagaaaccaaaaatgttggcttagtatacttgggccaaaacaagagaaacaggaggaaatggtggtccattgaggccatttggctttacaaaaatgttaaataaagtcaaatcaatacaaaacaatgttcacatcttttctctttacgtatacacatctttccctcgctctgtatctagatatgtacatttttctttcattatgtgtctattgttgggatcatgggtttgtgtgatagactggtgggggataagaacccacaggccacaacagtaggaaatgggggaagccccatcaaaagagcttctagtagtttttgactttggaactttccaataaactagattcagtacacctaaaagtgaaatcttcttttgtcctcaccttttcacacaacaagaatcaataatatcaatatgttgctcttaagtaacggagttgtgtgctattttagtttttttggtatccaaaagttttggttatttgagtatgtaaattgtgtttggtttcaatatgaacacagaacttccccaatactttttaaatcctataattcagtcatattttgctcatttctatctcttattataaaccacaagtagtcccaacatcaacctggagaaactcaaaagatctttcgcatcattcattattatatcttggaatttaattttttctatcccttgaagaaaatgcggacgttcatactaggaggctaggagcggaaatcaattcctcaaccctataggctatatatagtttatatacaacaaactgaaacatgtggttgatgattttttagcagaggtttaataaaattcaatattattttgttgttttatatacactatagcctggttaatgaaggctattaaaattttctttattagctggttaagcagccattttaatattgaacgtaggatgacaatgaacagtagtctctaaagtttaaaaaatcattattggtttcaattaatcaaaatgttaggtttgagtcgtttgacaaacattgtcttatatttatatatttagatgtagtgtgaacacacaatggaaaaaacaaataattgtggttcaaacattgtcggcactcgagagttaagacatcatgagttaactatatatagtaaacttaaataaacaagttttagatcaatatgatgatgagatttcagatttgtaaatttttgtttccgtatgaatatactctttcacatggatctagacaatcataaaacatacgttcacacatatattgcttaaagtggtaaacaaatcaatgtgaatgaattattatgttgcaacattgtttagaattcttagtgtcaaccagttgacttgctaagtaacatgattaaccagatggatagcaatcatatacattatacaatgccgtcgacttaaaatattttaaggctctctcgctcgttaaaaaagacagagagaaagagaattgttgttgtacttttagtttctcactaaaaaaaaagtatggccgaatcatggctacatgatttgaaactgaccgagaaaaatgagtgctattgtgccaaatataattattttggcaaatcttgcgtttattttcattcaaatttggaaactctttaaatttcgtgttaattgaatatcgaggggaatcgtatatcaaattcacatgtctaagactattcacacttaaatgcacttggtccacgtgtcctgcttctacgcatacacgtggcagaggatctcttatggtgtgaacgcgattattcctatgtgtctctaagattaaacaagtaatggaaattttgagcattcgtaatcctttttccctaacgtattcgtaatctaatcggctatgaatcaatccatattcaccagaatccataatataatcaattattcagcaataattacggttggtccacacaaatatagacccactcaccttcacctacaacttccagttgcagtcaatactctgcatctccctctttctctctcgctatatatagtttacacacacgccactacccaaatacaaagcactgacttcttccattaacaagcttttcttcgtttatcatcaccatcaccatcatcatcatcatcatcatcgtcatcatcatcatcatcatcatgacgtatgagaacaatagtgtaccaagaattgtaatcaagaaagttctagcaaagcttgagaaggaaggtgaaggagctgtcgttagaaatggcatcacaaagtgagttctcttcttcttctttctcaaaagcaaaatccaatgccttcaccttcaagtttcatatatttttttttctttttgggttgattcaggattgaccagaagttattggacccgttcgtgttgctagttgaattttcctgtaagtttcttccttcccccgaatctgtcaattaaaagtgtggttcttttattatgttagcatgtcataatcatttgctctgtttgttgatcagtttcactctcagctggattcccagatcatcctcacagaggtcaatttcacatataccttcttacacacgaagttgctctgttctgaaatgtctataatgtaattgatcaactgtgtgcaggttttgaaagtgttacatacatgctacagggaggtatcattcacaaagatcctaaaggtcataaaggtacaattcaagccggagatgttcaggtgaaaacaaaaacagaacacaaacaaagaacactcgaatactctctgagttttcttgtttcactcaattttgactttgattgacagtggatgacagcaggaagaggaatcattcattccgaatttccggaagaagaagtaaacaatggtttacagctttggatcaatctcccttccactgaaaaaatgtataagatcaatctttagtatcatctcttctcagaaagagttccagtcttgaatctctctgttccttgattttgacaggactgaaccaaaatataaggaactatcgagtttagacattcctcgagcagaagaaaacggagttgaggtcaaagtcatagccggagattcaatgggaatcaaatctccagtctacacaagaacaccaacaatgttccttgactttaccctcaagccaggatctcaaacccaccaaaccgttccagaatcatggaccgctttcgcttacattatagaaggcgatgaaggtgttttcggttccttgaactcttccgcaatatcggcccaccatgttgttgtgtttgggccaggggatttagttagcgtgtggaacaagtcaacttcgaggtcattgaggtttttgttgattgcaggggaacctatcggcgagcctgtggttcagtgtggtccctttgtgatgaattcacaggcggagatcgatatggcttttgatgactatcagaatgctaagaacgggtttgaaatggccaagtgttagaggttacagtgaaaagagtttgtaaacaaaaaccattctgattattttggattttgttgtctttattccacattcaagatgagatcaatgttaggggctataatatcaaccatctctttcataaagtcgattagactcgagatcgtattacagctttgactacaaatggatcaggaaagcttgagacaaatgaaaacatgttcacaatttcaacttctatgtcactaatccaccatatgggcattaaaacagagtgacacaaccatactaaaacatgttaaatactcacaagcttgcttaatataactccttatcaccaagaaactgtaatcacatcataattctttaaggagataatgactcataaacctttttcaatacaacagaagaacgaaagcaaacaaaagataagtaacattcaccatcaaaaggacaaatagatatgcaccaaagtaagaataaaaggctgaaacaagagaaacttggttttcagttttagacctaagaagcctgaaatataaagattcttctaaaaaataagagcaatccattaaatcgatgaggaagagggtaaagtaactgacaaggtgaggttatcggagattacttggaccttgcactttgctgaagctactccaggaatttcctgaagttgcttggatactttaacaaggttatcgtcaactgatgtatcgtagtatatattgagctgttcaagatgcggcattaactccaagaagtgcttggtttgctctaattctgtcttgtcattaatttccccaaacttcaatatctctagaaccttcaccggacttgatgataggcaagtatgaatattctccggaggtttgcacgggcacatgtctccacatctatccgtagctttgtggaggagtccctgaaacaacaaatgaaacgttatgtatagttgtttctcacgactgaaaaatgtgtcacatgatgtcttaaaagggtttgatttgtacttggaagacgagggtttttagatttggacaattcttgagcagattcggcaatgaatcccatccaacttttgtgttactttcaatggttaaacgagtcaggttgttgaatatcggtattgctttgcagcggaatgtaagtacctgaaacaaaaccaaatcaattattggaacatcatcactcatttgcaatcattgacacaaacccttaagcaataagccacctaacagaaccattgtttgtcgtcttctttaattttctaagtagctaaaaatactaaaagagtgtgagaagagatgggattaatatacagacctcaacagtgctcgcatataagtaaagaacctgaacattgcgtattcccataagtagatcagttgcatcaccgaccatagcatattctataagtgggaaggggaagccaaaagggacttgtattggattttctgactcttcatatcccactcgaagaccgagcctagcttcaacaagcgaatcgaaattcactttttcatactttaatgcaacagtatcggtatattcaaagtagacaagagccggattatcaaatgtgacactcggtggtgggttgttccaaccctcctcggtaaaaaacgttagtctcttgagggttgggatagacgcagagcaagactcccaaaaattccacaccacatcaatcataactaattcctcaagcacatgacaaccagaaagaagcttagccaaacaaattatctggtaatctaactcaaccgaatcaagatagagagtcttgagctttggaagggaaacatctcccacgtcaatgacgagacttccaaaggcgagaccatttctagcctctattctcagcctaaccagtgacttgctcacaaatacttttgaaggaaacagataagtcgtatctgatgcaatgcttaaatcaagttccgatacactaagctccaacgtattcaatatccaacgcgtgacaccaacaccgtcaacaccatttccacactttaaagagaatttgtttacatgggaatttcccctcaaagccagtactctatccacgaaatccataaaactcgtatgaatctcagtctcttcttggttacccatatcaggttgcatacgtaccggatcatcaaaatcaagattgggtacgaaagcaaagaaataccgccattttctcgagagaagcgatgttatagcagcttctttagttgaaaggaacgacaatatgtggtaaataagagcttctggtagactgttgattatatctttgggaccaatattcaactttttcgaattcatagtgacagatctcaacagttacttacaacctaaaaattcacatgatgatcgtgtaagtgatttgatccaatgatataagaagcttaaagtgatcacaactaaaggatcaaaaaaattattaaaaaaaaatctaagaatcaaacagaaatacacaaaagcaaattcctgtagacaaaaaaacaaaaaaaaaactttcgacatcagaggagcataagatcgaaagaagaaatagaagaaactcacttgggagcataaaaatcagacgaatattgagaactcgattgcgagagggaagtgaaagagaacattagggttttggcttgtgccctagagtgagatgcaaatgtggcgggacgagtgatttataagtgatcgaacattagggtttcgttttataaaacctctttagttaatttcggttttatacaagaacccaaaatttaccaaaaaaaatatctaaatcgatcgaatttatacagaaaagagttcgatttcctccttaatttttatatttagtacttgcacgcaaatatatagcatatcttaacaagttgctcaccgtggagcaaattaacaacttggaaggccttgagagaacatgaagtgtatacaacacaaagaaaagcgaaaattgcatattgagaagcagaaagaggaagacacatattacataacagagaccaaagtaaataattttgaaccaagaactaaaacaaaagctatgttattgaaaaacttggaacccttgagaaaacatcaagtatatgcaacacaaaaaggtaaaaaaatgcatattgaaaagccgaaggagtaagacaaagtgaagaagagaggccaaactaaatgctttaatttcatgctaaaaactagaacaaaagctttgctaatcttctcttagataaaatgaggctgatctcccatgtaggggatcaccatcccatgtaggggatcaccaaagaaaggataagttggtgctggtgtgatgaagttatcacagatgataccaccatagaaaggataagttggtgcgttatcacagattagttggacactacacttggatgaagatactctaggaactagccagtcaagttgacttttcacaccttcactaattcgtgtattgtagtgcaatatcatttgttcaagattcggcattgtctccaggaaatacttgactaactccagctgcttttcctcgtcaccaaagtaagaagcaacttcgccaaacttgagtatcttcagaaccttcaccggacttgatgataggcaactacgaatgtcctttgaagacttgcatagacacccgtcagtgtcctgacatttacttgtagatctgtgatggagtccctaaatcatagatgaaacaactttaaactctaaatttatttgaaaatttgtgttagcatgtgcactagtaaaaggatatgttttggtactttgaagacaagggtttctagatttggacagttcttgagtagagccggcaatgattcccatcctacatctttgtcagtctcaacagttaagtggatcagctttttgaataccggtattggtgcacaacagaaagtaagcacctgaaaacataaaccaaacactaattcaaattattcggttgtttgtcttgtttttaatttctaagtagcgaaaacaaacctcaagagcgttagaaaacaattgaaggatccgaacattgcttatccccataaaaagattggttgcatttacgaccaaatctccatagcttgcatgtgcacgctgatgatgtctcattcgaagaccgatactagcttcaacaagtgagtcgaaattcactacttcatacttgtccgcaacgagatcaaagtattcaaagtagacaagatttggcgtgtcaaatgaaatactacccggacttctatcccagtctgaacaatgtaccgttagtctcttgagggttttggaagacatagagcggttccaataaccatcccaccatagatcactcatagttaaatcctcaaggacttgacatccagaaatgagcttgagaaggcaagtatcaccgtctcgaaaccaaatactactaagatcgagagtcttaagctttggaagaaaaacatcttccaaatcaatgatggtacaattttcagttcgtattctcagcttaacaagtgacttgctcacaaagacacttgaaggcatagaacgatttgaaacaaaattaccgcctaaatcaagatccgatactccacgttctatcacatttgatatccatctaaagatgcattctcgatcaataccatttcgacagttgagtgagaacctaactagagtggaattaccctgcaaacccaatactctatccacgaaatccatgaactttctatgaacctcattcatgtaaaccaatggactttgcatccataccgaatcatcgaaatcaagaattggtgcaaaagcaaagagataacgccatttttcggagagaagtgatgttaaagcagcttcttttgtgggaacgaaggacagtaagtggcaaataagagcttctggtagatcgctgattatatctttgcaacatatatcatccatctttgttgaattcatagtgacagatctcaaacagttacgaacctgataaaataacatgatatcgagtaaactattagattaaagagtttcagatgcttgactagtacaaaattacgtacaaatcaaacagaaacaaaaccaacaaaagtaaaaatttctagacaaacattaaatttggacaataaggaatcacaaaataatcatcagaaaaaagcgggaagctcacttgggaattagaacagagggcatcaaaattaaaaagattgattgcgagaggggcagtggaatagtaaattagggtttctgcaatcctggtccaaaaattcagttttgtttttcgaacttatagtgtgcaatgatgaggacgaatcagagaagttttcgagggttttcacatgtgattatcatgtcacttgctcggtgtatcctaagttgttactgtttatcctctctttaaaaaaatatttatagaaaaaacaaactttttttggattttttgtataatagattttgttttcttaacattgacaaaaaaaacattgaaaaaagattttgttttctcgtttacgaatatcaatcatcaccccaaatcgattacttaattaccaattatattaattttgatggacgttaaccaattaaattaaattagattagattagatttacgtatcaaaagaaataaaaaaaaaatatttgaaccaggtttgattgttgttttgagtaagattttggttttagtttttttcaaaaatctattcatggttttgtaaaagttagtttccctaaaaaatagagaatttagtttttgagagatttaacccatgttaaagaagaaccaaaacccctcgtatactggtttcttttcaacgtgtgttcttactttcattttcagagttctatttctgatttttcaaaaaatatctgtatctttttgttagcgtgtggaataagtcaacctcaaagccattgaggtttctgttgattgcaggggaaccgatcggtaaacgaacttgtggatcagtatggtccgtttgtgatgaatccgcaggtggagattgatatgactattgaggacattcacaatgttaaggacgggtttgcaaatggccaagtgttgttcttttatttctggataataataacaattgctctgtttcagtcaattattattattattttttggtaaaactgtttcagtaaattagttcgacttattttatttttgcagtggcttgtataacaaacaaccaagcaaaagataattaatcgagcatccccaataaagatgaaaaatcatcaaacaacacaagtcacaaaaactaagaacaaaggggtaattgaagaggagaatcttgtggtttagctaaggacatcagggattacttggatctcgcaatttggtgaagcttctctagcaaagttcttaagttggcttgacacttcttcaatcagatcaccaccaattggtgtattgtagtatactgtcagttgttcaagatgcggcattgtctctaggaagatcttgatcatctctatctgattgactataccatattcaccaaatctcaatatctttaaaaccttcactggacttgatgataagcaactgggaacctcccctgaatatttgcataggcaaccgtcaacatccccgcattttattgtatacatgtgcaggagtccctgaatcatatatgaaacaacatcaaaatctagtttgttttcaaaatatcgtgttaagaaatgcgaggatatgtgttggtacttcgaagacaagggtttctagaattggacagttcttgagtagagctggcaatgattcccatcctacgctttggttagtcttaatagttaactgaatcaggttgttgaataccggtattgattcacagcagaaagtaagaacctgaaacaaaaaccaaaacaagtaccatatcatcatccatatccaatcactatctaaaaaataatcattaatcaattacgtacactaacataccgcaagactgttggcagataagcaaaggatctgaacattgcatattcccattagaaagtctgttgcattgccgaccaaagcatcatagcttgcatttgcatcctgatcacttgtcattgcaagaccaatagtggcatcaacaagcgaactgaaattcacttttggatactttgccgcaacataatcggagtatttcaagtagacaagatttggtgtatcaaacaaaacactatgcggatttttatcatacgactctgtacaccatagcgttagtctcttgagggttttggaagacacagagcggttccaaacattggagtagacattattcagaactaattcctcaaggacatgacaaccagaagtaagtttttcgaagcaatcttcaccttttcccaacataattgtatgaagatagagagactttagctttgggagaaaaacatcgtccacatcaatgccacgaacatttccagattctattctcagcctaaccagtgacttgctcacaaagacctttgaaggcagacgaaccccattcacattaacttgcaagtcaagatccaataccccacgctctaacacattgagtatccaagatgtgacatagtctggaataacaccatgtccacactttagagagaactagtttatagtagatttccctagcaaatccagtactctacctacaaaatccataaaactactaaaagtcacagtgcttttctctggtactaactggtggacgtagacataccgagtcatcgaaaacaaggtttggtctgaaagcaaagagatagcgccatctctttgagagaactgaggtcaaagcagaatcttctatgggaaggaatgacaatatgtggcaaatcagagcttctggtagattgctgattttatcttttggaccaatatccatctttttgataaatgagagtactatattgtggcaagactacttccaaacgacgtcgtacaaaatgctattcaaacaatatactagtccataatttcctttttgataaattggcaacattcaaaaattagatttatgataatttggtaacatgcgctacaaacaaccgattatggaaactagaatcgtataaactaattcaatttcctaaaattggatatatttccgttttggtgaccaaaaaaaaaaaaaaagaagatatatttccgtttttgtttgtggtttttgcttgtcataattaagaccgaccatacctcgaccctttgcattaatataaagggcttgataataaatctgtatgcatgccaatatcacattatctccattaaaagcagcactaaacgttctctctcttttttttgttattagttttgaactgcagcgaacagagaccgaagatatatatatatatacaataaacagagttttatcaaaatcagagatcatagatatgttatcgagaaaggtcattaaaaagatatatgcagattttgagaatgaaggttatggtactgtcgttaggcaaggcatcaccaagtaagttttcttctttttttctttctcaattttctcaggaaaaatccaatgacttcaccttcaagtttcatataatttttcttgtggggttacttcaggagtgaccatgagttattggacccgttcgtctcgctagttgaattttccggtaaaatatttccggaatgtgtaaattaaatattttgattttgataattacttgggataatctaagcagcaaattattgttttttcagtttcacctcctggtggattcaaagatcatcctcacagaggtcgtatcacctattcattctttcttcatgtccacaatgatttctctgttttgtaatgcttctgatgtagttaaatcaactgtgtacaggttttgaaagtgttacatacatgttccaggtgagaaacaagtcttcatccatgattcgagtcaataatcagcttttggtttttgcttactcgggttgatttaacttgtatagggaggcatcattcaccaagactgtaatggtaataaaggtacaatccatgaaggagatgttcaggtaaaacccaaaaagacattttagagctaaagacaattgaatcctcttaagctttcttgtttcattcttttgattctggttctattgcagtggatgacagcaggaagaggaatcattcattcggaaatgcctgaagaacaagtcaacaaggggttacagctttggatcaacctcccttctagtgccaaaatgtataagaagattcttcacaaagattcatctttcttaattcacagattttttaaatgtttatataatacgttttctttgattttcgacaggatcgagcctaaaaatatagaaatctcgagttcagagatacctagcgcagatgactatggagtagaggtcaaagtcattgctggagagtcaatgggagtcaaatctcctttctacacaaaaacaccaatcatgttcctagactttacgctcgatccaaaagctcaaacccaccaggccgttccagagtcatggaccgcctttgcctacattgtagaaggcgatgaaggcgtttttagctcctcggactcttccacagtacaagcacataatgttgtggtgtttgggacaggggatgaagttagcgtgtggaacacgtcaaactctaggccgttgaggttcttgttgattgcaggggaaccgataggcgagcctgtggttcagcatgggccatttgtgatgaactcacaggatgagattgaaatgacaattggggactatcgtaatggcatgaatggcttcgaaatggccaagcattggaggtcagagtgaagagtttgaagcaataaccagagagacagttatatttagggtttcttatttatttcacatggttttttaatcttacattctatatcatatcattgtcacgtaataaaaaaaaatgctacgttttagaaaattgattaactatagttcaagcttatcactttcagatttaaagggtaaatatttttcacaaaagaaaaatcacactcatggcttaaagatagtaaaaagaggcatgagtgaatcctaaacaacttgaggaaccagaaaagttctttcgaaatacaataaaatccattacgtcgatgacttggaaacatggttaattaagtagaggacaagctgaggttatcagagattacttgaatcttgcacttggttttaaaccttctctagaaaccatctgagaccggctaaatacagagaagatgagcttgagttagaaattcaacaaaaaggctttaaaaaaaagaagacactagatgagaagaagatagtagagaaacttacttgtgggataaaagcagattgtatctccaaaccatacaactttttaatatcaaggaacaaccggagtcagagatttatagcaaaaggaaatgaaagttgaaaattagggtttctgccaattctagccctaaaaatttggcgggttcgttgagtgttccataagctggattttcttttcaagttttgtcaagttctccgagtttgttgatgatgatattctctgtgataaagaaggatttgtttcgtttaatatcaaggaacaacctgagtcagagatttatagcataagggaaatgaaagttgaaaattaggcttgtggcaattgtaaccctaataatttggcgggttcgttgagttccaaaagccggatttttcttttcaagtgtggtcaagttctcagattttgttgatgatgatattctctgtgataaaggatgagttgtttcaagagtcgaatcaagttgtggcagtttcgtctgcgtgaagctaactttgacaacgatagatgtgactgacatcattataaatggaaagctttttttgatatgttaagaatccaaaaacattattaatgaacaagcttgataccaaaagatgtattccgattgaagcttctctttttcgtcgtaggaaaccaaaaagacaaatcaaagcttatacagaaacagaagaactgaaaatactaaacgttacgttaacattgttgagctaaccgacacaagcataaatataaaacataaagcctcagatactattacaaacttaagaggcagccgagacacactcatggccttgacatggaaaaaagaggcataagtgaaccctaaagaacttgagaaacctgaaatgttcttccaacatacgaagtccatttcgccgatgaaaagggaacatgctttaaatagaggacaagacaagattgtcagagattacttgaattctgcactcggttaaaccttctctaggaaccatctgaaattggcttaatacttcctccacatcttcgtcaattgatgtttcgtagtgaattatgagttgttcaagattaggcattgtctcaaggaagtactcgacttgatccatcattttgtccatgtcctcatcttcatcgatatctccaaacttcattatctttaagaccttcacaggacttaatgatagacaagtgggaatgttctcctcctcccaaggtttgcacaggcactcgtcactgctttgacatttcatatcatatctgtggagaagtccctgaaacataaaggaaacacatttcaatatcggcttctctctgtttgaataatgtatcagcaaagaatatagttagtacttcaaagacaagggtttctaggtttggactgttcttgagtagagccgtcaatgattcccatcccacaagacgatcagtcttaacggttagctgaatcaggttgttgaaaaccggcagtggctcacagcagaaacagagtacctgaaacagagtatcaccttttaaatccgaaggaaaaaaagaagaagatgagtacgaagttggagactactgacctcaagagtgttgtaagataagtaaagggacctaacattacaaattccaatgaaaaaaacagttgcattaccaaccaacccctcatgctggattggatcatccgctgaaaatttggccttatggatctgatcatgtgtcatttgaagatcaagacgagcttcaacaagcgaatcaaaattcgctttaagatacctgtcagcaatgacatcagaatattccaagtacaagagattaggagtacaaacgacacactcttgtgattctcaaagaacatttgattaaaacgaaacgttagtctcttgaggcttgtgctagatacagaacaagactcccaaaattcctgaaccatagtattgcacccatcaatcgctgtagacataggccaatcccaacatgaagagatgtctagtgcaagttctgatacacgacgtttcaacacattggttatccaaccaatgacaggagcaggtccaacgtcatctttacacttgatggagaatctgttcaaaggaacattcttacacaaagccaatttaccatccacacgctttatgaaacgttggagcatcttaaccctttcttgttttgtcactccataatgcatacgcttagagtcatcaaaatcgagattcatctttttcaaatgcaaatcaccacttatagcctgaacagagcaaatgagcttaagtaagaaaatacaacaaagggattccaaaaatacaacattaccaatttcaaagccggtttcaaggtctaagcctttcacacaatctttaagtttccatttagattcttaacagaaagagaaatattgataactaagaatcaaaacatcaacacacataggcaaatgttcttcttttcgaaagtttttaaactagagacactacttgagaagaggagaagcttacttggggtgtgaagcagagatcattatacaactgttgagttttcaatgtactttcaaagaaaccggattcagaggttttatagccaaagtgaagtgaaagttgtagattagggttttggtaactgtagcccttgtaatttggcgggaggggttagttccaatgttggattttctttttgtgtgttgtcaagtcctgagattttggagatctctgtgataaccaaggaggaatttttcacaagagtctaatcaagtaatatcagtttcatatcgtctgtcttctctatccaattttttgaattttaaccttttaatataatttgagacgaaattgcgtctgtatgacgtcaaccaaattaccatattgttcatgctaaagacagacaacttctcatctaaactctttgattattttcatgccttatctcgaattcatacaactaaagcagtctttgatatctgttggaataaagaaaagttgtatgaggagattaagaagtgaaccaaatcaggatcgtcacatttcactcaacgtctataaaactctctcaagacgaaccacttcgcttctacttcaacaggcctactcatctcctttcatgttttcatcgtagcttcttcaattcggattgccaaaattgggtcgttatttatctgtgattgtgcatagaattttattttgtatagatccacccttacgaaatgagactcgggctacccaaaacatgatcaagtcacacttagagatctagattttacctattacacaaaaaccactcaaataacgaagttttttattatacattatacattacagagtgtagatgatcagtttggaatctgaatcaaaaacaggaaggatagctttaaaagagtcttctctcaggagagaaggataaaacatacacaaacagaacaatcctttctagttttcagaggttctttgacactgatcaactgatcagagcaaacctgtcttagttattactaatttaatgtgtgaagaaaactatggccgttttgtaagttccacatcatctcaaagaaaccatgaactcgtcttgattttacattaagagcaagaattttgagtctggaaaacaaaaagagtaaggtcttaactaggtgtaccgttgccttggcttctgtacacaacttctagacattctttggctcgatgaactttagattgaaggtaaaagctccctgctttcgcattattctcaaacagtttgtcatatttctgcattcatatataaagccagtccttttagttattcgattcagagttccaaaagtaaatcattcattcgtcattggtaaaagagaaatgttgacctgtaatatctcttcccaagaggtcttctcggttacaccaagaatctgcctagcctcttgctcagtgatggctttccctgcttgacgtactccattttgcattgcttcctgcgcaacaccagatttagacgcatctgcaaaagaattttctcctaggtaagacaggtctccttcgtaacaaatacctgaccaccctttgtcttaggtatcgagtaaaagagagcagcaatatgattcagaaacatatcaaccgttctaacagttgtaaacacacacaaacaggagctgccagaatcaacaattaccaagaaatgtaattgccttatcattggattcataaagcaatcacttgatgtgaaaagggtgaatataaaacaaaaagtgttggaaacttactagcaagtgcttgacgataggcttgaaagacagcacgaccaatgatcccagaacccatcacaatcaaatttgcaagtagtctcccagcctgtaaaaagaaaagaaatgagaatgttatagaataaatgcaacatgacaagtagagatgaagaagggatttgtaaacaaagaaacatgtccaaattcaagccagctcaaaatcatcgatctatcgccaatacattaaaacttcaacattgagacatctttgcctagaaagaacaaatgagaaccgaaaaaatttgtttgtttttttcaattggaaaatgttctattcactgcgaatacgaatatggatgaatttcaatcaatcaatcaatcatacaacgagaaaattttcgttagtaataaacaccaaaattttccgaaattatctcaaaatgaaacaaccagttgaataatccgtacccaattcataaaacccatctgcctctctaatttatacaattgaacaacataaatctaatagatgatctcaaatcatgctaacatcaattgatttaccaaatgataaaagagtcatcactcaagagattaaagcggcaagaaacaattaaaaatttggaaaaaacgaagagaggaggaggaaacccaccatggcagccgattaattgatggtttaaatctcgataagatgctaatctcttgattcgttttcgaggttggtagagaaataaaaaggacttgaaggaagaagggaatagaagaagaatctagggttctctcacttgtgttgttttgttgtgttcgtgtaataaaagtttgggagaaacacggaacaccgatgaccaaacacgaaacaggggattgatgcccaaggtcgttttctttaataatacccaatagaaactcaacacgtattatttatgggcttgggctgctaaataaatcaggcccatcttctactccgaggatcaatattgaccgttgaaaaattaaagagttcacattcaatagtctgagtttatttatgaaaattggtatatttagtgtttccttacttgtacttttttttttcaatttaagcttttctattctttgaagaaatgtgtaatcataaacataaaggtttggttatattcttgtgtttagaattgtgtaatatagttgatccaattatataaagcttttactttaataagaagtatgagtttaaaactaaaaaaatataaaaactttttactatttcttcacactaaattactctagaaaatttttgaacctctttgaaaaatcactttagatctccagattttcttttaaaaatccaccaaaattttttttttttttttttttcgtttatatcaagccaaccatctaataaatctcccaaaaccttatttttaccaaatataacggaaagtcagatttaacaacaaacaatcttaattagtaatgtagatagtagatacaattgattagaaaagtgcatgtataattttgttttaaaaacttatagttcaatgaacaaatataatggtatattcacttcaatccaagtaattaattcactaaaccaactgtgatgtaaataaagtggggaaaagggatgaaggagagattaaaatccctgaatttactgcgtgttaaatgcgctgtctttattactattttcttaattaatcgtttccttcccaaattttggctgctttgaatcgtctctagctccgagaacccaggttatacacacaaactaaactatacgaaaacaaaaacaaagaacaagtgtgaagccaaacgcagaattttgggaaaccatcgcacaagcttccatagatttctctcttgttccttcccgtttcttcctctcccccatatttctctccagctccgcctcactgttccgcgatccaatttccttttccagcaggtttgattgattttgttcttcctttgtgagatcggattcatgtttgtggctatatatatatatatatatatattttttttttccttttagatctttgtttccattttgataatttcagctgactttggcattatatcttctgctttggattgtttgtttgatcaattgcaaatcgtttcgatagacgaaatctcgaatcacgcaatcaattttaaacatgttaagaagctgcattttgaaggctgttcttgaatccaaaatgtgtttggcacccagaatttgttttgactttattgatgatttgtcggtggttgttcatttgggagattttgttgcgctatggatcttttatattgcatagataatgttttttaggtttaatctgaaaaaaaaaatgtatcaaggtctcgctgatttatgtgtgagtcgaggatttgatcctttgcaagatttttgtcttacgctagtgccatgtatgtttatgtgaaggttacttcatttggttcatgttgtatcaaattttctttatgggaggttttgttgctatggatctttctatagcctatataatgtttattaggttgaatctgaacataaaatggatcacagtcacgtcattatgctgatttatttgtgattgctgcttgattcgatgatttttaaacttttacatgatttttacggtggtggatgtctgtttatattatggttgatcaatttggttcatactgtattaaacttcatttacttactagttttacattggaatgtgagatttgactgtgatttattgtgggttcttcttcttcatttttttttaattctattcagtttcaaactacaagattttgttttgatatggctctttattttcaattttttttgtgattgctggtttgtttgaattatttgaaacaattgacactgaaagctctttgcattctgaacaggctataagtgtagttagcacttcttctataaaaagcagtgtctcacatttggatatgaagaaagcatttggtcaaactgtcagagacctgtaaggattggactacatataattaaatgaattatctttccaatccatgtgtggattatctatttttattgacgaatccgaacattatcttttcatccatttgttgcagcaagagaggggtcaacaagaaagtgcttaaagtacctggaatagaacagaaggtaaagaatgctgtttgcttctctctatttttgtttctattgaaacttttctgatgtcttgattaagatgctgtttttagttcgccatgattcattcaatcaattttctaatgaagttttgtgaaggttgaattatagataagcttctatttggttgacacactccttttatttgatggaattataggagattttcgatatattctttcactttgtttgcctctcatttttgcacttctgtttcttgttcaggttctagatgctaccagcaatgagtcctggggtccgcatggatcacttcttgcggacattgcacatgcttcgagaaattagtaattacaaatacctttatcatgttctcctttttcataatatgatcttatgaatgaattttttgtttttctcatgcagccatgaataccagattactatgggagtgttatggaaacgtcttagtgactctggaaaaaattggcggcatgtctataaggtaaaaaaaatgaaggactagcttgttttcgatatgcttatagtgttgtggtagtaaatataactaattcctactggattatctcttctcgactctccaggcattgacagtcttggagtacatggtaggccatggatcagaacgtgtcatagaagaggttaaagaacatgcatatcaaattacggtaatgaccacatagtagtaatttatattggatgtctccaaaacaagattatttgttggtatctcagctattgattttcctactgatggagttttatctcttttccatgtattagacattatctggttttcagtatattgattccagcggtaaagatcaaggtagcaatgtcaggaagaaggcgcagagccttgtggctttggttaatgacaaagaaagaataacggaggtcagagagaaggctgctgctaacagagataagtatgtctgcttcttgtttccccaatgggttatctcatgcacatttgtttgattaaaactgctgcctagccaggatttataattgctatctattctaccaagtcaagtcatgaataggcaattttcatcattacgagcatctgtattttaagtaagcttttcctccatgagagcacatatttcccataacctgacattttttttgtacaacaggtatcataactcaatgcataggccgtcaggaggatatggggacaaatatgattacgaaggccgctatggagacagagatgaagggcgaagtagttatgggaaagagagagaatatggttacagggatgatgatagaaatagtcgtgatggcgatcgttattctagagactctgaagaccgatatggaagagatggtaacacggatgacgaataccgtggaaggagcagaagtgttgataattacaatggatcaagaggtaggagctcggacagggaacggcctattgaggatgatggccaatcctcatcgcggtatgttgattaaatttataatctccctctttaaattggaccgacaaatcaaagatattttaaggtgacaaatcaacaatattcggatgtgtaatagcttagatgtcctcgatgtaaaaaaagactcgtcttgcgtcctgagcatcataccaaaaatttgatgaaacatttctctttgttctgtagggatagtggtgcgccagctgatgatcattctcaagatgggaggtaatttccagagacgtgtactgattttggaagggtcccttttttattatttgtattaagtattatggaaaaaatgtcaatacttatctcttacttttgagatttgatagaggggggctagagagaaagttctctgaacaaaatattggtgctgctccacctagttatgaagaagctgtgagtgaatcacggagccctgtatacagtgaaaggtgacaattctcttcactgcaaattgagaagtacttttttcttagcagttttgaattcaaatgatgaatcatttaaaatttcttcattgaagggatggtggagagaccccacaagttgctcctccaggagctgctgcttctcctcttgctgaaaacatcagcgtggacaacaaagctgctgattttgttaatgaatcatctcctcagcaagttgaggcttttgatgaatttgatccacgaggttcagtttcaggtacagagcttcccatgcttgcaattgtctagttacgactcctaagcagcataagaatttgctttccttgataattcagtaaatgttaaaaacaccttattttaaggtataggattgtgttctgatctgagtgttgccattgtatatcatgtctttttcagcagcatgtgcacctacagctggtgcttcggttcctgcacctatcccaccaacagtggtttctacgcctgccccgcctgcctcaattaatgcagaaatggatttgcttggctctctttcagatgtattttcaccaaatcccttggctattgtaacatctgattccacttctgttgaaaccaatggacaagcaaacactggtttagctccatcgttttctacttctcagtcatctactcaggtattctcatttaccaattatgtttaaagtttttttaatgggtatgttactgggttcatctgaaaactcaaccggatggtttatttatcttttgccctttgtgcagccttttgatgatccatttggtgactctcctttcaaagccatcacttctgctgacactgagacaagccaacatcagagttttggagttccttttcagccaacaccaccaacttcaaatcctaacaatgaacataactttggttttggggaagcattttcagctgttaccgattctgaacctggcgttcaaaatatgcaagctccaccgaacttatccgtctttcctcaagagcagtttgatacatcgcagagcgaaatcgatattcttgccggcattctcccaccatctggaccgccagtttctctgtctccacaaccagattccactatgccaacatcccaatttcatcccaatggtaactcctatgaaagctatcatcatcaagccgcgcctacagatctaaacatgcaaggacaaacaccgtttggtcaagcttcacaacaatttaacatggtttcacattcacaaaatcatcatgaaggtatgcaattcaacaatgggggcttcacgcaacagccaggctatgcaggtccagcaacctctcaacctccacaatatactcctggtgtatcttcacacccaccaagtgagagttttcctcaccaaccaggttctgccacctcagcaagctcgcaaactccttacgctactacacccaatgtatcagctgggcagtttgatggtgggagtttcatgacacagcaaccttatggtgtgacacaacaagttcatgttgtcccttcccatataccacagcgaactcaatctggacctgttgcagcgtttgggaataataacaatatcgttggagatatgcaccaacctggttctaccccctcatcaagctcgcaaactccttaccctactacgcccaatgcaccaagtggtcagtttgatggtggaaattttatgacacaacaaccttatggtgtgataccgcaagttcatggcgtcccttcccatataccacagcgaactcaatctggacctgttgcagcgcacgggaatagtaacaatgttgttggggatatgttttcaccagctggactaagttccttggagacatcagcatcgcaaccatctctcacacctttaacaggagcaattgaaattgttccccaaaatcagaagaagtttgagccaaaatcaacaatttgggctgatacattaagtagagggctagttaacttcaacatttctggacgtaagcgagatctttttatatacagtctctcaagtcataaagctctaacaaagtttctaacgtttgtttcttactgtgcagcgaaaacaaatccattggcggatataggagttgacttcgaggcaatcaacaggaaagagaaacggctagagaaaccaactatcacacaacaacaagtaacatcaactatcaacatggggaaagccatgggatctggtactggcttaggtcgcgctggtgcaggtgctatgagacctccaacaaattcaatggtaggctcaagcatgcccacgggcatgaatgttggtggctatggaggcatgaaccaacaccaacccataggcatgaaccaaaaccatcccatgggcatgaaccaaaacctttccatgggaatgaaccagaactatcccatgggaatgaaccaaaactatccaatgggaatgggcatgaacatgaacatgggcgggtatggacaagggtatccgatgcaaccacaacaaggaatgggcatggctcctcctggtgcaccacaaggcatgaccggtgcctataatccaatgatgggtcaaggcggttacaaccctcagcagcagcaaccatatggtggaggttaccggtaagattcgagccaatcacggttacccattttacttatcatggtaaaaagagaaaacatcaaagaacagaacacaatcagtttgacctggatttgtaaattttatggtcggttcaggtaagttggggtttggtcagtcatattattggattaatacctcagcttcatcagttattttgctttttctttacaaaaataattctcgaccaaattgagttttgttaggaattttgtaacgggtaaagagagagacagagaggcacaaccttcactcggggtttgctatatacatatgtattttgatattatacgtctttttgtaatacattgtccacttcacgtaacaaataacaataaaagaattatgtcaatgtatataggttttggtaacgtgaagtatataaatcacggaaaagtcaaaagaaaactgcaaaatatctgaaaagaaacgaataaacggtggaatgatgactttatttttttggtaacaaaaactaaattgtaaaaaacataccacgtaatgcacgtattaccgattgaagtgaatagtcctcggaagaattttcattccgtataccaatgtctgaaaaagaagaaaaactaaacaagtactaaactgatgcaactcacacaagtcataattgtgtgaattttcacttaggttcactaaaccagagtttataccaaacaaaaccgtactaaactgatgtaactcacacaagtcacaattggtcgtcaatgagtcaagagttttttcatgagcattaaataaaagaatcaaaagaatatccatatatccatcattttaattcattacaattcattttttttcagatagaaaaaaggataacgaaaatttcacaaaagcataacgaaaaataccaaccacaccaacctttcccatgatctaaaaagaaagaaaaaaaaaaatcagtattgccatgacgacaaaaaaaggaacaaaaacaaaaaaataaaaacaataaagaaagctgaaagtttctgaagtctctctgcaacatttaatagatgcgacagtaaacataagaacaccaaacaaaaacgtgatcagcgacggcaacgaagacggcgaagaatacggcggacacgaggattcccaacgatcagattctttgacattccacggcggcttagatatcagcttctccgatccgctctctctgtttgtgtaaatcatggtgatcgcggctgcttcctctttttccctcggtacttcgccattcttcgagatctctcttcattttgtttcatatgtattgttcattgactaatctgaagttagtgcatggctgacagagacgaattaaaattaacttctttttttcattaatggcgaaagcatttgggagattctttttggttgacttgttttgatatttaatcgaattggtttgtttagctcgatcgaaatttgttttttggttcgtgggttatctctgtcgtcgaattgttttcttcaatctttatgctttttggcgtttagcctgaaattagtttcatttttctctgctttgaatctaaacgagacctcagacaattatttctgtgtcaagttttgttttttttttaattattttttgtttttttaggaattaaatgctaatgtcattgttagagatctttaaatctgatattagtaattctaaaggtctctccttttgcttcttcttccctgaaaatttcaatttttgttttttttttgtttttctgttaaaatttgggagcagtgaacaatcttggtatgtatttatcaggtccatctcattgccatcaatcttacacggatgagttctcttcctccataccttacaaaagaaccagcaatgcaagaaatcgtgtgtttgatggatgtggctctgctaatctctctgttttaaggtatttgtcaataatgaagaaacgtgtgtccattgttttgattttggagtgaatttgattgaagtgtaaatcttatcatctttgtgattgtcatgtaatgtgttttcctctattcagttccagatgcaagattcctttttttggatcagcatttcatgtatcatccggtggacatgatctcggcctcacgaaagtttcggttgctgctgattattctgattcggttcctgattcatctttctatggatatcatcctctagaagatttgaagccgtccaaaagagtccaggagacaaagctctctgcttctgaagttgcaaggactaccgtcgaggtttatagccgggaaacaacacaaaccatgacttcatatggactagaacagtgtggagttttgctatttttgagtatgcgtgaacacggtattcattttttacttgtaggcgaacagcagtgctgtgctggtgtttcctggagctattcactgtgaaccacacgatcataattcatggtccgaatttaagtatgtcattgatgattatggaggttagtcttatattatcgctcaatatattttatatctatcaattactttctttctcaccagcttctttttttttttttccaatttagatatcttttttgaaattcctgatgatgagaacatcttagaagatcctggagctagtaatccagtggtaagcgtgtcattttgatcaagtggaatgtcatgtatatgtccatagttgataacatttcttagcttggtataagcaccatgtccaacacctattaatcgaagtttcatcttatacttgtagaaagccttttttggaatggatgtcccgcgatacgaaaacacacggcaccatgaggaatataacatttcagacattggtaatcttgaccaaattatttttgatgaccattatttcgaggtaggttggagctgttgttgtagtctcttagttttcttgcaaagcatgccaagtctcttgtcttattaatgctctgattactttgaaatatgagtagattatggattctgaagctagagatattccgatagattggggaatgcctgacacctccaacggtgttcatcctatttactttgccaaacacctgtcgaaggttatatcctatgcaatagcatgatgagaaatctaataaaaatgacatgctttaaacaatgttctcacttgtttctgtctataaacttggaattttgcaacggttaccgaaccctctagtctctttagtactgcgtacaagcattatatttgatacatactggtcttgcattgcattgactatgtagttgatttgggatctcttgtcatgcaggccatcagcatggactatgacaggaaaatggactatccatctaatggtgtatccatacttggatgccttaggcccgctttccttgacgaggaatcttatataagaagattatttctttcggaagatagagatgactatagctgggaggttcaaggtcctttcatattttctagtcctcaaaatgctgtttttgattttgtaccacctcttttacatagaacttagaggaatctctgtactatacacgtacacatttctgtttgacatcctggattcacctccctttggatatttatcttcaggtgatgataatccaatcactagttccagacgtgacgagaatgatatgagttcaagtctatatagattagagattgtgggaatagagcttctctccctctatggagcagaggtatgtttttgccacctgtcaggtcatttggatgttgaaaaaattgcttgaaacgatggctaacatatgttgagctgttttgcgaacattgactttcatacaaactctctgtgtgtcatttttgtctcccacagtctcaccgtgagttgatctagattctttgactattttcagtcttctataagtttgcaagattttcaagatgctgaaccagacatcctagtgcactctacttctgcaatcatcgagcgcttcaacaacagggggattaactccagcattgcacttaaagctctctgcaaaaagaagggtcttcatgcagaggtattgtatccatgtctctgaatataatctggaagtacagttctggtttacatacctaccacattttgtaacccagttttgctactttgtggtaatctcatgcaggaagctaacctgatcagtgttgatagtcttggtatggatgtgagagttttcgcaggtgcacaagtccaaactcaccgtttccctttcaaaaccagggtgagagaaatctcaaactaaaacatcaaacaaatatacacctttttcaacaagaaaacaaaatcataaggactctgatatgataatgcttctctcatcattgtttatgacaggctacaacagaaatggcagcagagaagaagatccaccagctactgttccctcgttcacgcagaaggaagttgaagtgtcatgacgagagtttgaaggatgcatttcgttaaaaaaaccgttgctgatcaaagtcactaaactagaaaatgaggaaacagagaagaagctgttttgccactggatctgtctagtacttatacgagttctttggcctggcgattgtgtacataacgatgagctttaaagtgactgttctagaactgtgtggagattcagcctcttacgttttagtagtaagtaaactaaattaaacccaagaataaagagaagttgatacaattgaagtaacttctataatagtccaatgttgttcttacaatgtaaatcttcgtttatctttacaatcaagatcaaataaagccctttttctcactctttacagtcaccaacggtgtccttacttttctccactcaaaagatcctttatttttgctggatgcaataatataatatcacacagtcgatggaattgacaaaaacctatgtggttaggttcccggctcatcatcctcacctaacaacttcctctgcatagccgcctcgtcgcccacttcttcaaatctgtgttcctcttgatctttctccttcctgagaagcatccaacatgggaaaaatggagaagaataataagttcattgatggattgtttattgtacttgaaaaatgattagaaaagactgtacatggagtatatgatcagtccagtagctgtagtagcaaatgccaagaagtagagccaatcaacctggtattaacatcattagctgatttctacagatagaaaatgtaagggtttcctgatgtttgatattcaaagtgagcagaccttctcgtggtaaccaaaagtgcggatcaaaacagcccacatatctgatgtgagcaacgagaggttgaacattgttgcaccattggtctgagagaagatcatatttcaaaagatgttacagtttcgtagacattggcatgaaaaacaaaagagggaaaagggttttgatcatatgacttctgtattatctcataccttgagtaagaccgggactaatgggtagaagagaaacattgtgagtgtgaatctaaggaacggaaaaacctgaaaccgcgaaaaatgtaataaatagacaagaatgtgtcgtctttggtttgcagatgttaaaatggaaatggccatagcaagaaaacctacagctccagttgaccagtgaatagctttaagctcatcacgttcaagtatacttctatggacaagtgaagtcaaggccttagctgaaaaatatggtttttctggagaatgtgcatataactctaagaaacataagaagtcatagctttttgcataaaggatacacctgaatggcactaataatggctccaaaaaaccccaagaaggtcatcagctcaactgtatctgcattcttcacaaggaactcctataacaaaggaacaatagattttacattttcgcgcgatataacaacatattcttgttgtggcacttgcttacctcgctggtattactaacagcatataaggttgctccagctaaaacaagaaaatctcctttaacaggattacttcctcctgaaaaaccaccaaaattcaatgaagccatgattaaaaacatagtcatgaatcagtaagagctttcaaaaaccattaccagctcgatcccctgcatggacgtctgagaagactaccataaaaacaccaacaatacagataaaaacaccactgatcttcatcaatctgtattttgtcttaaggtaaaaccaagtcaagaccaaaacgcaagggatcgcccagcaatccagtagcatgacacttgtcaatgaagtgtattggtaagccttcaccactgtaaaataatcaaagcaatggagtcattgatttcataatctcgtaataaataaaactcatcccaaagcaggataataacaaagtacttatcatcagtgttcaagccacaaaaacttgacaaaagaagatctttatcagcaaacaacacaagactcaccgagaaaattggcctccacatcaacaaaagcaaggaggaaatagtaataccatttcgcctgcattgaagatcaatgttaacaatactttctatgtaaagatagatagacactcctgtgagaggtaacagagagtgaagaaaaaatcaatagtaaccttaatgtcggatcttcgatacagcatgatacttccatagacgattgccagtaacacataattcagaaagcattgtgatgttggaacattaattcctaaaaaagttttaaaatttacaagaatttatcaaccaattgataaagagatcatgaagccgctggggtaatggtaataaaccagaaaagaagaaacttgaaaccttttctggcgagctcagaagatgtaaagccattagaagtagcaagaagtgagaggagctgtcccaaaccaagaccaatcagtgtcttcttcgtcctaatctcctttaaatcgaaacccatcactgagtcagttagtgagaggaaagagtgtaggaagctgtagtctttaaatcctcagctgtacacagagagagagaagagagaagagagtgtgacgcctttgggaaccgtttgacttttcaactctgagttttagttcttgggattgagatagtcaattagtattatattttattgaggtacagttatttacttcactaacaccatttgaaactaatctttgtatcaaatacatttttccttctttacagttaccaaagtttgggagagaaatgtacaaacttgtggactcctccaacccaaaagtgtgaaaaataataatcatatatcccacaagtcacagtcaatgttatagacaagtaaaaaccagaggctttgatttgattaggtttcaggtggaagcatctataaggttgctgtggagcgagtcaccatcctcctcatcgaacagcttcctcctctcacttaccacttctccacttctttgttcctcctcatctttctccttcctgaaaatatcaacaatgggtcaagaacactgatcttcatgtgagtgcagaacagatactctacttgaagaaagattagaaaagactgtacattgagtatatgatcagtccagtagctgtagtagcaaatgccaagaagtagagccaatcaacctgacattaacatacataaccattggatctcatgagctgatttctacagacagaaattacaagattttcctaaatgtttgatttacataatctgcagaccttttcgtggtaaccaaaagtgcggatcaaaatagcccacatgtctgatgtgagcaacgagaggttgaacattgttgaaccattattctgagaggtcacattacaaaagatgttacagtttcagagacattaacatggaaaagagagtattgatcgtatggtatcagttttgtcacataccttgattaagattgtgattaatgtgtaaaacagaaataacccgagtgcgcctccaatgtaaagtaaaatctggaaccacaaattaattttccaaagaagtcattctatttgcagagattgaaagggagtgtagcagcatgcttaccgcctcagttgaccactgaatagctctgactgcaccacgttcaaatatgcttctatgaacaagtcagggaaaatgttcatagaagtttaagataaataaaaaaataattgccttgttgtttgaaggatacatctgaatggcagcaataattgcgccgaaaaggcccaaaaaagccatgagctcagtcacgtctgcattcttcactaggaactcctataacagagaaacagggagactacaattacagtcacactaactttcataaagtatcgactttcgcgatataataacaatcttctttccagtatgtggttacatacttgcttacctcagtgacattactgacagcatacaaggtagctccagctataacaagaaaatctcctttgacaggattacttccacctaaaagccaccataatattcttaaatcaagtttcttggccaatatgtgagtgtttacttgcagacttaagatgagtgaaaccatggtaagaataaataagagaaagagaagtaatgaatcaatttacaccattaccagctcgatcccctgcatggacgtctgagaaaactaccatgacgacaccaacaatacagataacaacaccactgatcttcatcaatctgtatcttgttttcaggaaaacccaagtcaagaccaaaacgcaagggatcgcccagcaatccagtagcatgatactagtcatcgatgtgttctgaaatgccttgacaactatggaagcaatggagatgactcaaaaactcatgatactcaacaaaaaacatgaaaacccaggatcagtgctcaggccaaagagtgggacaaaagaagagttctttctcaccgagaaagttcgcctccacatcaacaacagcaaggagaaaatagtgataccacttcacctacaacaatttttgcattgaagatgttaacaacacttgctacttggaagttcgaacattagacttttgttttgacacttcatgatgaaaccttaacatacacacactcattacattttatgtttccctataaatatacaaaactcacaagccaataagacagagtgaatcaaatgttttcaaaaagagaagtttttctttttttttgttgaaatcaagaaaagaagttcaatactaactttaattgcggatcttcgatacagcatgatacctccatagacgattgcaagtgacacataacccagaaacgtctgagatgttggagcactaatcccttttaaaaaacaattcaaatttttgtaagtcaatgaatgtataaaaatgggttggatttttaaaaaagggggaaaccttttctggcgatctcagaggcaatagaggcaattaaagtagagagaagcgagatgatctgtcctaatccaagtccaatgagagtcttcttcgtcttcatctcattgaaattgaaacagaccattactgctttcttacttcaatcaaacaataaaccaaagaaacaaaactctagctgcagattcagagaggaaagtcatggggaatccttttctttatttataatattctacaaacaatcattgacttttttaatgctttattgaattaagatctggccacaatagaacttcttacattgtagggaggctcaaataaaaagcctacgaatatgcttctatggacaagtcaaggagtatcctcatagattgcacatataagttttaagaaacattaaagtcttagccttgttgtttgaaggatacatctgaatggcaccaataattgcgccgaaaaggcccaaaagagacatgagttgaactctgtctgcattcttcacaaggaactcctatcacaaaggaacataacgactagaattacaagtacacttaaagtctttttagtatgtgatcagagacttgcttacctgactgacattactgacagcatacaaggttgctccagctataacaagaaaatctcctttgatgggattacttccacctgaaagctaccataaatatgcttaactcgagtttcttgggcaaatatgtgagtgtttacttgcaggcgaatccatggtaggaaaagaagagaaagagaaactaatgaatcagttaacaccattaccagctcgatcccctgcatggacgtctgagaaaactaccatgacaacaccaacattacagataaccacaccactgatcttcatcaatctgtattttgtctttaggaaaacccaagtaaaaaccaaaacacaagggatggcccagcagtccagtagcatgacactcgtcattgatgtgttctgataagcctttaccactagaaaagcacaagaatagaatctgatcaaaatctcatcataaatagtcaaataacagattactttctctgcagcctcagctggacaaagcttgagaaacattaagggcaacacacagatgagttaaagaagaattctttcagtcaggacactcaccgagaaagttcgcctcaacatcaacaaacgcaaggaggagatagtgataccacttggcttacaaatgttttgcattcgttagaaaattactaatgaaaccttcaatgctcattctcatactacacaaaaactccaatgatcatttcaatgttttcaaggaaagaaattcaatactgactttaattgccgatcttcgatagagcatgatacctccatagacgattgccagtaacacataacccagaaacgactgtgatgttggagcattaatccctataaagatttcaaattttgtaagttcatgagaatgtttaaaaatgggatggtttgaaaaaaaaaaaaagctaaaatcttttctagcgatctcagacgatgtaaagctaagagaagtcgagagaagcgagaggatctgtcccaatccaaatccaattagagtcttcttcgtcttaatcctattgaaattgaaatacaccattcttgttttctttcttcaatcaaacaaacaaaccctagctggagaggaagctcgggtgagacaattatggtgaatgcataacaatacaatggagaagaatcagagagtacagtgaaagctagtctttttaattcaacaaatcagtacagttactacagtatgtcgccgctccaaattgttgactctttttttcttttgggttaaagtgtgaaattaaaataattcgaagcagcaaacgtagttagcaagaacttggggatagaattataaattttaaaaacagaggagattgatttgttgcatgttgcctctgttacaaggaacaacactaccgccctcttcctttcccatctaacaaaaaaaggttgtggcaagaaggatatcaatggagatggagattttcgagagaaccatagggttttgattgttttggtacacaaattactctgatactgtggaaaaagctgaaacatccaggcatattcatacatcatactattactcaaaacaatcagacagacaaagccattagtcaaacattttcttgtctttaggcaaaaaaaattccctttgtttttcccggaaaaaataatctataatatctcatatccctttggttagggttccggtggaagcaactataacgatgtgtctggaagtgattgaccttcctcctcatccaacagtttcttcctctgctcctctctttcttcttcctcatctttctccttcctgataacatatggaaaaaacgcaacatggattgtgttactactttaagccatgattgtagaacagatattggagtaagggaaagagtgtacattgagtatatgattagtccaatagctgttgtagcaaatgccaagtagtagagccaatcaacctgacattaagttacatacatgattaattactttatatcatccgtataggtttatagagactgagatgtaaagagtgcacataatgttagatttataaccttctcgtggtatgcgaaaatgcggatcaaaaccgcccacatgtctgatgtcagcaatgagagggtgaacattgttgaaccattagtctgagaagattatatcacaaaagatgttaacatgttgcaaaggcaattgcatgaaaacagagtaaaaggtgggtttagatcatatcaccctcagtaaaatcggtagtagtgaatagaagaggaacatcgtgattgcgaatctaaggaaagggaaaacctgaaaccgcgacaatgtagaaactttaaactgtggactcataaaagaaaagtctttggtttctatagattgcaagggaaagggatatttactgcatcagctgaccagtgaatagctttgagctcaccttgttcgaatatggctctatagacaggttaaggaacgtcaacgagaatgtgcatataagtctaagaaacataagaagtcatagcttagctttgttgtcaaaaggatacacctgaatggcactaataatggctccaaaaagtcccatgaaggtcatcaactcaactgtgtctgcattcttcacaagaaactcctataacaaatgaacaataaattttacatttttgcgggatataacaatttcttgttgtagcacttgcttacctcggtggtattactgacagcatataaagttgctccagctagaacaagaaaatctcctttaacaggattacttccacctaaaaaaacgcaaccattatcataagcgtagattgagttttacttgcgtgacaagtaacgaatgattagtttctaccatttacctgctcgacttcctgcgtgaacgtcagagaagagtaccatgacaacaccagcaatacagataaatacaccactgatcttcattaatctgtattttgttttcaggaacatccaagttaagaccaacacacaagggatcgcccagcaatcaagtagcatgatactcgtaatcgatgtgtactgattcgccttcaccactgttaaaccaaagcaataatgaagttttattcaaaatctcactacaacagcaaccaaaatgtaatggaagtatatacagtttctaagaaaacttgtctccaaaataacttcagatcagtgctcaagccaaagaagactgtgtcaataagaaaactgaccaagaaaattgccttccacgtcaactaaagcaaggaggaaatagtgataccacttcccctacaagagtatttgcattgaagattttagtagcacatactagttacgttataagcactcaatagtgcatgtaatcttgaaaaaaactctcattacaccaaaaagagaaattagcagtaagtaacacaaagtgaaaccaaattcaatactgaccttaattgttggtctccgatagagcatgatacctccatagacgactgccagtaatgtataactgaggaacgtttgtgacgttggagcatttattcctataagatttcaaaattttaaaccatgaatgtataaaccataaagatcataaatctatatgatcgatcgaatcttaaagctagcataaacgagatgcatgcattaaaaaaaatagaaacagtaaaaccttttctggcgagctcagaggatgtgaaggcattagaagtacatagaagtgagaggatctgtcccaagccaagtccaattaaagtcttctttgttttgttcatctcattgaaatcgaaacccattgccattattgcagaagaagctgagatcttcggtgaatctataaattacagacattcaaatacaataagagattcgcagacggcagatcagaaaggatttgttgttgctgtcactacctaccgttgacattttttaagcttttctttttctccttctcttttccctccattcaactaagcttagttttaattaaggtaaagtttgtactttttgtatttgatttcaaacatttgtctaatatgaaaatgttaccaaatataattagtttgaattataaccgtgttatatagactgatccaataaattaagaaacataaattagtttaaacaaaaaaaacataatgcttaaataaaatatttaccaaaaggaaaaaaagaaggggaatgaaaaggaggagtcagcaagtacatcaaaagccaaaaatgacaagaagaaaagatatcacagtaccagcagataccttagcgaagcaacctatccaaggaaacactacgttctgttattattcattttgtcccatctgtaattgcctttgattggatatgatttctatcaatgaaagtagacgttaaaaaaaaaaaaagatatcacagtacgtggaaacacgtgacacatattttaaagggaaaatataaacgtgaaatgcgtggaaactggcaagtagactattaatatttatgggcctatagtggttatatcaggctttattgggctctctatacgaattaaaagcctcaaacaaataatagaacttgaattgtaggcttttgtacccaccaaactggccgccggtgaccccctctcacgccgtatctctttttctttttcttgtttttttttttttttttttttttttttttttttgtgtgcgcgtatttgtttcaccatcaaaaaattaattttgttttaagtgttttattttccttcgttttgtttaaagtgtttaaaatcgttagttcaatgttgaaaaatatacaataatagaaacaattgtgacttttgtaatttgaatgaacaaaacatataacaataagtcctataatataaacattttaatttacattttcaactttttctcattttaaatttttattcagttgaaggcttgaagcgttggactactttagagaaactttacaagaacgttcttaacatctttttttctttcctttttgaatatcaaaatcagttaaaaacacttttgatctcacagaaactgatacaaagccgacggaaccgaccagattaggtcaaaaacgtaaaagacgcgcaaaaagaaaagaaaataactcataatagaatgttttagtcagaagaaaaaagtacaatatgaccaacgtaaacaaaaaagatgttgacgacataaagaaaagagctacagagacaaaggcattaaaatatcttttgtcgaaatctgaagatatttccttaagcgcgtttgcttctctgtctcctccattccattctatatcatctctgtctttgctctaagctttcctgtcaaaacaaaaattcaattccccacgtctgtcttatccacaataaaaccgaccttagcttagcttagactcattactcatttcacaaaaacagagagagaaatagagagacatactttacaggtaataattatcttgtttaattgtattatatatctctaactaaatttgggataaaaattgtctattcttgatcattcctctctgtatctctctgcttttgacaccttctcttagctgttttttcatcttttatctctgtttttaaaatcttttggctctttcgaagggtttcgagtccttttgagttctttgggcttcctcccaaatttctccacgagctcgacccctttcgtatcttccttctcatttttttgccaaatttattcgatccgtctttcactatgtatccgatggattctgattaccatcgccgtggtctggtggtaagaagaattagaagatctcctcaaagctttggttttttttcgaatctatctctaattttccaaattgggtttgtgtaaaggtcttaactttagggtgaatctcgaatcattgcttagcttaatgagctccagattgttatgttattttgggaatcttaatgtgattaggattcgttagattgtttctgttgatttgaggacccttactttggctctgtgttaataatatatttgaccctgttattgatggatgacatgaataaagaggtttctgctcaaatctttgtgagagtaattagtttgataatgacgctgatgatgatgacattgcaggcaaacgatcgttcaccagctcagtttgttaggctggataaaccgagagccgtagacgatctctatataggcaagagagaaaagatgcgtaggtggttgtgctgtgcttgccacgttgaagaaccttaccattcttctgaaaatgaacacctcagaagccctaagcaccacaatgattttggtactcctctttgtgatttcctgcccttgagctgatcatttcttgcgctagtaacagatcttgttgtatgcaaattcattttgtttcggtttttgttttgttgtattgaagggcatcacactagaaaaccacaggcggctgtgaagcctgatgctttgaaggagcctccatctattgatgtgcctgcattgtcattggatgagttgaaagaaaagaccgataactttggatcaaagtcattgattggtgaaggatcttacggcagagcctattatgcaaccttgaaagatggaaaggctgtcgcggtgaagaagcttgacaatgcagcggaacctgaatcaaatgttgagttcttgactcaggtctctagggtttccaagctgaagcacgataattttgttgagctcttcggttattgtgttgaagggaatttccgcattcttgcgtatgagtttgctactatgggatctttacatgacatcttacacgggaggaaaggagtccaaggagcacaaccaggtcctacgcttgactggatccaacgggtcagaatagcagttgatgcagctagaggacttgagtatttgcatgagaaagttcaacctgcagtaatacacagagatattcgatctagcaatgtgcttctctttgaagattttaaagccaagatcgctgattttaatctatcgaaccaatctcctgatatggctgctcgtcttcattctaccagagttttgggaaccttcggttaccacgcaccagagtaatgaatgcttctgaaataatagttgatcacacagtattcttgaggaaggaaagattgtaactgtacattttcgctgttgcaggtatgcgatgactggtcaactgacacagaagagtgatgtttatagttttggtgtggtgcttttggagctcttgactggtaggaaacccgtcgatcatacgatgcctcgtggtcaacaaagtcttgttacttgggttagtactaaaaccatgttgctttaattttctgaggataatcttactttcgaatttactgattgttcttggcatttgccgtcttaacttcaggctactccaaggctaagtgaagacaaagtgaagcaatgtgttgatccaaaactaaagggagaatatcctcctaaagctgttgcaaaggtataagcttcatctttttgacagtttaatctataacccctgcgaaaccactttcaaaacgctaaccataaaatactgtttcgccttgttcttgcgcttcagctcgctgcagtagcagcattgtgtgtgcaatatgaatcagagtttaggccaaacatgagcattgtggtaaaagctcttcaaccattgttgaggtcatcaacagcagcagctgtaccagtccaggaagcctgattcttctgtgcaatagcaacaatggaagattgggttcggtttcagttgttgccataccgtataaatgtgttcttaaagagagtctttttgtcgaggcttttcttcagttgggatgtatatgttttattaaggtgatgagtagtgatttggtgtgtcttttcaaatgctttgtggagtctgtttttccttataaaaatttattctaaatctggtttgtattttgggggtcttctttgctctttcttcattaacagaatactaattataagcttttcatatacaaaccttgaaaggaattttcatcagttactaattcgatttcagagaaatgaatcattcaaaacacttgattagagaaatgcttcttgaaccgggtcggtttaacgaaatccactggctggaaaaattatgcttttatatatataagaagaatccaactgtgagagtaattgtataaacaagagcaaaaaagtgtgacctgatattttgcaaaaaccaaagaatacaaatattatatatccaaaatacatatatcacttaccaattttgttctcactctatcttaaaacaatacagcttcagacttgagaggttcttcaacgaactttaaaaccgactcttgagagaagtaagagttggtgtcatgaagtttgcttcactgtttcctctgctagtatacgaatggaaaacccccaatttctagaatattcttggccaaaataattcttccgaacaaaaatcctgcagcaacaaaagcgaaagctgatgattctccattcattcaggtactactgaagtaattcatcttttctgaaacctaggtttgcttctagagcttgctttggtaagaatctatctaaaacctaaatgatcatctttgggagctttttaaaggtaatatcatgaagtttggagagaacctgtttacatttaagaaacttttcatctgggaagcagtggagtcctgtcgtctgattcaccgcggtgactagcctgaacagacggagacaaaaagacagtaaacattactgtcgacttaagttggtacaaatacaagaactgaatttattcttcacctcttcatttgctcctgcggccatgttgatgaatgattcattagccctgaaggaaataacagagaaggaaaagaagttaaatggtgtaaccactgcacttgtatctgttacacacaacttgtcacttgtcaaaattatctaaagaagaaccgataaacacggtaaagaagtatgtacagtgacactaacctgtgagtatcctttgtgttgcctagttctaggttcccattctgttgttgctcgtctctcgctttggcaagtggtgaaaagaactatgtataaatgagacgaaactaattagacagaaaagattctgttaagttagattgagtcaccaattaaacggttcatctgtgtttacctggtgcatcgaaatgaaaacgatagaaattccgagaaggaagttcatggttataacatgtccaaagagcgcagcagatgctatgccagtaaatattgtggcaactgtcgatgaatatttcttcaagattgtatctgaaagcatcaaagatgaagacaagtaaatatccatgatatcaatcttgctataagaataataccattgattatatataacaaacaatctccagatatgttaagaaagtaagtatctagactcaagccaactagtttcacagattaaatgaatctaacaaagcttagtcggtattacctgcatatttgaagaaaaaggacgataaaatcccttgtgctgcgttgttcagtatcaaaaacatggtagccctagaatgtccttgtaggatgtcaaagctgccaggacctgtcaatatcatgacaaaatttctcagcaatgcatactgaagaccttgaaggtttttcaaaagctattatggtgcttaactgcttaaaacatattattttcttccatgccattttttaaataaaatgcatgcacatacctttatatataacagttcctagtattccaagaaagttgaatattgcaccataaccatagaggaataaattctgcaacgaaaaaaaaatgttcaatgagatgccataaacaaaaccaaggtcaaaagaagaagaccatgattctagaatttgacgtgaacattagtgataactgagctaagtaaaccagagaacagaacaaagagatcaacaatcccaaggttctttgattctaaagaacaactggtttactaacaaaatgaaagagtggctaatatcattccattaacaacacagcatatcatttccctgatgtaaaccgagaaaaatgcatcataaccatctaacctgaagatatatgcttgtgtcatactgactctttagagcatactcgttgaagacagatgccattgacgggacagtgacctgcatataaatttgcaatttagcctctagcatgaattacaaccttttcataatgcatcaacggggaagcacaagaagtcagattatctgaatggaacaaccaaaatatcttcaaaatgagcaaatatacttacaaagataacggtgcagacgtatgcacccgtagcaagaggaattccaatggctgtagcaccttcaggaagagaacgtaattggtttacactaatccctatcagcaacagagcaagtgcctcccactataacaaaattaggataacatgaataagcaatataaatataaaatcctacaaaatccaaccaagaatttatattgagtaatcaaaaaattttaggccgataagatgtaactacgaaaggaaggttacacaaaaacttccacaacaatattgtctgttattgataaccggtcatacatataactaataagaacaactgaaactgacctgtatgatagaaaaccgccgcttcattaccatctttaatagaacagcgatgaccagaacctttaggttgctaagcatctttacagtagcaggattgaaatatagctgcacagcagaaacttcattatcatatgacatgaaaatacatagagaatgcaaggtagaatcaaatagtacaagccgagatgaatcaaatagtaattgcacatcataattacatcaatccacaatttaattatgatgtaaacagctgacgactcaaatatctatcacccaaagcaaacatgacaggtaacgcattgaccaccggatcttaagggataagaagatatggtggaaaagagaggtgtacaaacttatccttctaaatggtaattccattatctggttatggttcactaaagtaatgtctgacgtggaaagaaaaaaatatagcatcaacaaaactggaacagatagaacaccacatgacatgctcttgccatagagccacaacttctgacaatatacctcactacattccacagcttaattacacttaaggataccaaaatgaaaaataacaagtggctatacctgcattgtgaacttcagatagttattaattgcatacaacagggctggaacagcaagaagcacattatttcgggctgcctgtaaaaaatcatgtcagtgaattctgcagtctaagtggtcaagccattgaactttcaagctcagcagaaaaaaatagttctaagaaaactcacaattatttatatgtactggtcagtaaattccacatttcaaacaactgtgcattgacataccaacatgtaactcttcgaatcatcaatttacttaagtctagaaaaccttatgaacagtaggaaaataagaaggcgcaacgaagatgagacatgtttgcaagacatgactagccatcaggcaatgaaagttcaagaagctagcttcagtttattaaaacatcggaattattctctaccatgacgattcaattgattaaacgaaggcattattctctttcctttaattttttccccccattttttgtcataccactaatctagtagcagcttggcaatacactactctcactctaattgacaaagaagagatacctggacaaatgtggaaacggatagaagaggcttctctccaactttttggtgcctggcctacaatttgaacacaaacacgtaagtattgatagagcatccacggttcttacagaaaagcaagagactcaagaaataggtaataattcaaaaatcaagaaattgtctttacgcacagaacataatgggatcctttcacattcactttactggtttatcaacatcatgaacttctcatacttgtcaccttcttatgaagttagaaacatctagtaactagtcctagatactagagtacaacttaaatgtcacactaaatgaatcgagattgtaagtcagttcagaaacatacctggattaaaagcatcacaatcgcaaaaataacttttgcgatttctgtcaagaagttgacgctaataggactgaagttgaatttcccatccaccttcgacatatacaccaagacaggctgaaaaagaggaaaagtatgtaacttttaagtgatttacacaaacaaatgatgagctgagaggaaaaagaagaacgctgataataaatatggaaaatttgtcaaacggagatgatttacctggagaccaacaagcatgcaatcacctacaaccaaaaggacattgaggacacgttgttttgaggataccctaatcttgtggtcgtcataagccctagaaatagttttgctaccaggagagaccaattttgaatgacatgcagggcactcagctataccgttcttcatttgttgtctttctcaatctgacaatttctatactgatccaacaagcctgataaacaacaacaacaactcatgagtcgcgttccaactaagaatcgcaacaagatatcaactttatgtggaattttagcagagaaggcaaatcaccaaatctgaactcacaatcagatctcagtagctaaataaaatcacaatctaatagaaacaatgagcgaaaaagaaaagatagatctcaaaaacccaaacatggatctaaagccgccattagaagacttgtcggttcattccaaaattctatcaaaatcgtgatcgatcaaactaacctaaacaatcagcttaacagaacattccctccagccacacggatccagaactcgagctccagagtgaataatcaatcactaataaatcttcgctctgaattgcagaattgaagaagatctagaaactctccagagactcagcttcggtaccagaaaagatgccaaggaatatgcagagaggaggagattgaatcagtgggtcgtcgttcgttgttgctcgcaagtgcgctctaattatctaacacgacctctccttctctcttttttgctttgatttcacaacaacgttttctttattaattgcggaatttttaagagatttgctctaatcagcctgcctaacaatagttttttaggggaaaaatacataaacaagtttattaaataatgtgcctaattatttatcctcacatcacatgtttttgtaacgtgttggtgatactaatacagtaatactcagtagcggggtagggtgttagtagggggtcacttgaccccatgtattttagaaaattttgtttattaggcttaattatttggtatttgttgataattttgttttaaatgttaatgtagacccattaacttattttcaaatcctgttttgtacatttttattaatttgttttttctatttatgcatattgcctaactctttccatcttttttatatattaattttaattatttagttccttcttgatcctacattagattatttcctactatataaagatttggcaactacttttgataaaaaaaaaatcaattatgatttagataaacaaaacaattaactaatgtgcacaatctacatatacatttgagtaaataaatatattgaggaatgaaataacatatgtcgtacctttttcactactattatagaaaaaaataaataaataaaaaatgataaagacatataaagaatcatgtatttaacacacaagtgaagtgtttctaacactacaaaaacaaaaacaaagtgtaatttatataatttgtgaggattacacaaccatgacattatttaggttctaatttatttgttaaaaaattgataataatatttaaacaaacattatcggtaaaattatactctaaataaattatttaatattaatatttatatgcatattaacattgacccgctcatattttaattttattttccaaaattcaacttttgattattttcgattttactgttttggatttaaaaacagtattgattgtttagatttttcttttaagtattgattgtttagatttttgttaactgagatcagatttttgctcacattactttcacctcagacgcttgatatcgttgcaaaatcttagaaacgttttctggatgacgctcttgagctagtcagctagcaagcgaatttgatttacttctaataagtttcatgtaactgcttcagcgtataaggaaagaaaggtgatgtccgatgaggcagctgactactttgcaagtatgtggccgcctcttcttgaaaacgtaaggtcttcttataatcttattcagttttctaaggcattttgtaagtttggatacactgaatggactaactgatctttcttctttaacccactttgtgaaacatttggtttatttcgaaagtctcaaaaagaggagattgaagcattgcaggatggaactctcaccccacaaaagactaggcggttttgtatcttcttcttttagtactagatattaacttgtttttgtagctctatctatatctatctcaaaatgatattccccatacatagataaattatgacttgtttaatttgtttgttttgatgaaatttgtgtataatttggcggtactgtttcgtgttgaagagcccaagcttgtttaaattgtttcttgttgggttctgtctagcttctgttgatttacgactacaatactatgttcatgtaatcacacaaaaaacgatatgagaccaaaaaaacataaacagttcaaacaagatgggctcttcaacacgaaagaaaggtgaaatgttgataaaataaaataaacagaaaacgatatgagatcgaaaaaggtcggtcatatagagcttcttccttcctctttactccttggccttctcgacggcgacttcctcagcagccgcaacttcagtctgtttctcctccaacgcctcagtcttcttctcctccggagtttcagtcacttcttcagctttcttctcctcctccacaactgttggagtttcagtgatcactgctgccttctcttcttcatcctcatttgtcttctctgcatcttccacaaacacttcttccgggtgttgattcacctccgtctcaacgatctctactgctactgaagtcacgtgttcaacctgtaagcgaaaacacacttattaaacgaaaaaatgcatgccgtttaaacggcgaatagtccatatcacttgatagacatagatttctagatacatgatatatatatatatatatattaacaacgaatatgaaccatagatacaggtttatagtttgacaaaataaaaataaagagaatatatacctcaacggtggccatttcgaaggaaaatatagtgtatgtgatgctttggtgtatgaagagatttgatcaagatgagaggtatttatagtagaagcaaaccgtttacaataatgttttttcaaactaaatatctattaagataaaattattagttttttgaaagaaccatgatgatgattattgcacatgaacgaaccttttttttgcttatatataaaagcaattgtactattttacacctcatgcccacatagtatggggtgactggagagggctttagagggtagctgttactttatataagctgtaaagtcttatactgtgatttttattttttaaaaaataaagctatgacttaaaaaaaaatatagttttacgaatttttactttaaaataagttgtaaagttatatacatactgtaaattttattttaggaattttttcatatttttaaaaagtacaaaataaaatattgtttttgttattcctcagctcttgtgaaaaatcattacttaatcttcattaatcgattgtttaggtcttattaatcatgtgttgagttgggaccatgattaagcaataagagtcatttacctcctgtcaagtatgcatatgcatatacttttggttgttgaatattgttggttgcaagcagtacaatcgggagagaaaggatcgaaagatcgacaaaggtgttgctaaagctgagggtgctgattaatcaaggattaatcaatacgatatctgaagctaaaactagaacaccaaaatgttgattcatgatcttaactcctaaacatttccttggttaatgaaagagttcgttcatctttcaaaccattgacaataatagcagctgtcacctcttcttcaccattacgggcttcttcttgatgtaatggtgaatagtaaggcctctatgctgttatacaatgctttaagtacaaggatttaaaaaatatttacaagcctttttttaagagttttaaaaggatttacaatgattttaaaggattttaaaacttttataattccttttaaagtcatttgaaaacttttgtaaatgctttcaaaactctcaaaaaatttttttttttttttttaaactcttaaaattatccttgttgtatatattatttaaagccttttaaacccttaaaatatattttacaatggttttaaatgatttataaggattctaaaatattgaaaaaatgttttaaaaaggattttaaagtatttacatgtatatttaaaaactttataaggattttaataagttttaaaatggtttacaagagtttttaacaattttacaaagctttaaaaaactttactaggattttctaagaatttttaaaggatttacaatggttttttaagggttctaaacaaaattagaaagactttaaatgcaattttttggcgggaaaaaacagagaaaataaaattttggcacttaaaatttaggtgggtaagttttggtttctaactacatgttctcattagatttgatgatgattaatttagtcattttggttaagaaagtggttatttttaaaaatgggccaaaaaaggatatcatagtagaattgtggtttgggcttaaaagcccattacccctcccctaattagttttcaacttttcatggagtcttcggttttcgactttggatcggagtcggggaacatgaatttcgacgagaccgtgccactgagccaacgattggagtggtcagacgtggtcccattgactcaggacgatggtccgaatccagtggtgccaattgcctacaaggaagagttccgcgagactatggattacttccgtgcgatttacttttccgacgagcgatctcctcgcgcactacgactcacggaagaaaccctcctcttaaactccggcaactacacagtaatcaatcttataattcatataatcaacaactatctgaactcttatggttttgaaatttgatggattttagtcttttattggtccttgttgcttcaatttttagtcttaccgatatttttgtttacctttgaaggtgtggcatttcaggcgcctagtactcgaggcccttaatcacgacttgtttgaagaactcgagttcatcgaacgcattgctgaggataactctaagaactaccaactgtggtaaagttcataccttttcacaccttgtttgatctatgtgcttttgatcatgaaagtctatgagtgagttatacttttgaaaattgtctgatgaataattttgaatcaataaatgtatattctacttctccatagatgaaagtttgttcttgtacacattgttaagttcatagtgtctcatatctgctgattatacaacgttaaaacccttggttgtttgttttgagtttgatggtccatgcttctgctctatgttttccttttctctaggcatcatcggcgatgggttgcagagaaactgggtcctgatgttgcagggagagaacttgaatttacccgtagagtactttcacttgatgccaaacattatcatgcttggtcacataggcaggtttgcgatctcaaaccttgttaaagcattcacttggggtatcattgcatatctttttgtttgataatatggaaacaatctgcagtggacactacgggcattaggaggatgggaagatgagctcgattactgtcacgagctccttgaagctgacgtctttaacaattccgcctggaatcaggtaacttgatcgttgatacacatacgaaattctgtatctctaatctatcaattgccgattctgtcacctatttgtataatctcattcccttaatctgacagaggtattatgtcatcacccaatctcctttgttgggaggcctagaagccatgagagaatctgaagtaagctacacaatcaaagccattttaaccaatcctgcaaacgagagctcatggcgatacctaaaagctctttacaaagacgacaaagaatcctggattagtgatccaagtgtttcctcagtctgtttgaatgttctatcccgcacagattgcttccatggattcgctctgagcacccttttggatcttctatgtgatggactgagaccaaccaacgagcataaagactcagtgagagctctagctaatgaagaaccagagactaacttggccaatttggtgtgtactattcttggtcgtgtagatcctgtaagagctaactattgggcatggaggaagagcaagattacagtggcagcaatttgaatatgtgacgccccaaaatcacacttgaaaaagacttgattattagtttttacgtatgtactgcttatttatgaatcacatgttcatgttaacatgtatcaaaacaatcttgatttctcagtttccttcgccttgtgatattcagagaagctttctcaagaatgattttgcatcacacactttgactaaacgcattgctctctcgataaccggaagatcaaaaccgaaaccgggttttggtttggctcgcggatttccccaattcaattttaacgacaaaactatactaattcataagattaaaaaaaaagtttctgaagtggtcgaagtcggaagcgtgatttggtcgaaagattggttctttctccgacaagaattatgtccaaatctgggtttagtctgctgttcctcgttcttctacttatcatgggtttcttatttccgttgagagtttctgcaattaggtgattaattttgggtaacaaccattgcttctatgaattgtcccgcttagtttcatttccttgagattttcgaatgaatttgcaggaaggatatcggatttttggaagagcggagttgcagaacaactgtccaaggaagatacttgatctccgatgatgaaggttagcgatttccactcttggaaagattcacctttttgaacattttgaatctctttcgacttagatttggtgatccatgaatggtttgttgttgcaacttgcaggcaatgtgtgtgatgctttgtcattggaatctcgaactcgttgttgtccatggaaaggagaaagattctcttgtcagtgagtcaatttttaagacgatcatagcctttgatcacggacttataggtttcattaaaactgatgtgttcttaatcagacttctttgttttgtggtttcgcttgaagtggatgcaacatactttcacaatgctgcaactcttatgaattttgcgtttcttgctgcttgaatccgtctcaggtattcaatggaatctttgattttttttccagatttttctctgttctcgcttcatctttttttttttgcttatgagcacttatcttctgcagacgcttcttgagaaggtggttaaggtcaaagttgcaaagccggctacatcaggtaacttgtcgttttacagcagcttcgattcttaaaccaccgcataaaagtgtttgcatttgcaagatggccaatttttcctctttggcagggacttacaagagtgtatttgatttttgtgccgggagatgccggcataactctgagagtgtggtaagcgatatactgttattgtttcacctaaaaaggctttgattgttcttttcctggcatgtttcttgaggttatgtcatgaattggatcaatgtagtgtggaagttaaggttttatctgaaaatgatggaatgctcttgaaagtctaatgaaactggataatcaatacggatagctctaaacagtgagatgtatattttgtttccttaacgtccaggttcacgaaaatgcttaccacagcgagtttcaccattgtttttctctgacatcaaatgcttcaggttaacctcaatagcttactttttttcttttgcatatcgtttaaatgtcgaaataccctatcacatgcatcaaataattgaaaacaggtgctaatcttacacaagttgaaacaagacttcttggtattgacgttattgtcggaaggtaacacccttcactgctctagaggtttgaattgtatatgctcttgtggagaccatactcttagactcttctctattggattggtttcacagtcaaggagattcatgcgatgcagtttgcaaatcacgtggacaattgtgtgtgatgaataaactctcacttctaaaccagtgtgacgtgtaagtctcttcttaagcaactattttaccagagtcaatcttttaagccaactatcaagtcatgtttcagagatttctatatagaatagattaaaaactggcaattttgttggtgttcacatagttctttctcttcttctttgtttgcttagtatgaaaagatacatgaactgcaaagggtcgtgtttagcaagtgccggggctgaccaacctgctgaagttgtcgaagatgcgccgagagatttggtatttcatctttttttttttctcttttatgcgccctttaagttcctgaatcctcagtgaaataatttatttacattgcttctcctgactcaatttttgaatcttgttcataaactgagtgattccatatgtgtgtgtttattttcttggtctgcagtatccaggcgcgtgtttgtatacccggacacaatcattgctttcctgtgacggttcacaccaacacacccgacgactctgcccatgtgcctagaagctagtcagtattaagacttatgccatacttttttcctccttattgtagcagttttagaatgctctgatcatgtaattttctcatggtgaaagaacacattgttgacatatacatgcacggttcaatatattatagtttaactactaaaacgtttattcattgaataccacagaatgagagaaaaagcatctgtccacatcgtgtaacgtgtatggcctacactgagaattaactacaaggctacagaggcagcaacgtattcattagatctttgtcacacattgctcattatatgaggtgcagctttcttgaacagagccaaaatcccaactttgtatttatccttaatctctctttcaccaaatcacctaagaggacagcaacaacaacacaagagaaggccttaagaaccagctggtggagttcgaattgttgtttcagatttgatctgtccaagagtaactacattagtttcatgttcttaagatctgcagaacttatgaatttcacattgatcaaccaagaaagagtcatgtttttttttattcattaactaatgatctggctttgttcatacatccataatcacaatggaactgacattgaagagaaatccgatttaattaatgatatgattacagagatttgtttatactttcacaatatcagaaaatcaatattaaaaaaaaaaaaaaaagaaggagaaagacatcagaagctgtaatttgttttaaacactcttttgtctgctcctactcctgcctgttccttagccaccgcaacacctctgttaagctcgtcttctgtttctccactgttatcatcagctgtcgcaaacgcaggatggcttaaaacgcatttcagaagctgcgttcctctcaaggcgtttgtgagcggtaagtgtcctaaaggcgtttcatcgttaagctcccacttgaattcgtcaggaaacgctctgtaattgtattgaacaacctctgtgtcaagaagcttcatccactcaactttaacgaagaatcttgtgaaatctttcttcacttttaaccagattttgcgttgcacgctgtatccgaatctaccatcactgtgtttaatccatagattgtcgatagcttgaagatcttcgggggagattgttttcacctcggagaagaaaacgtagccacgtttcacggcggcttctccggatatctgaatgagtaatctccgtgtctcctcgtcggcttgtctgaagttttgattgacgagatggttctccagaacgtcgaatatggtcgcggtttcggcagttgtggcggaggcgtttgtggttgaaacggcagatacggcggtggtggaggaggaggtggaagaagcagagcagattagtgagaatgttgcggcggaagtgggttgtttgagggaaagagaagttggtccgaagtgagattggcaatggagattgttgcggtggtgtgtgtaagaaggagaggagtggtggtggtggtggagagagtttgtggtcgccattgatggagaggaagagagagaagagtcacgtcaggggaagatagagagtgaagttggagaggttaaagaagaagagaaagataaggtgtgtggaaaatcaggaactactaagcggggtcgattctgattggtcacttatggctcaggtttgattttctctttttctctatactttcattttgcattttaatttggaaaaaataagatttttagggattcatttcttttttttcacactaatttctaagaatattaatgtacatactatattgtttttgatatcaaatttcatgtctacgtcatttctctcgttatcgttattgtttgaaagtagatattaaggtttttaaaaacatatttttgttgttttaaaagaaatcaatatcggtcaaaacactgttataaagctatttttcgacgtcacatttttgtaacatcacagattgacctatctataatgggcctttaaactcattggcgtataaataggcccattatcatttgatacaaatacgacggcgttttgaatgtttgtgctggacaggatcaacatagaactctgatggcgccatctttgaagaagagccgtcgatgattttttcgtcattgagacttatataaaacaatcactgagagcgatttttcaaaattctttacgccgggatcaagtagagaaaagtaatcgaaggttttgttagtgctggcagtcaccgtcgccattttttgaaattcttagatcgaaactgtttggcgggagttgtgagaaacggtggcgattgacgaagaacttgttataaggagttgggttttggtagattgtggtgattcttcgatcggaggataaggtgtttgattgaaagagcagattgattaaggcgtgttttggggctgaggaaatgggtcgcagcagttcgaagaaaaagaagaaacgaggaggtagcggaagaaggggtcagctgaaagaccatggatctaatgctgatgaagataatgaacttctatctgaggagatcactgctctgtaagtttgaacttttaatttctgtgaattttgtgaaacgagttatttaggcaatgtgagatttagggtttttgatgatttgtggttaatttttgatttggaggggcatgatagaagttgctatgacctttaaagttgtgctgtgattagaaattgtgtaaatgttgggattatgggatttgatcgttcagatgttacagggaaaaacaatagcaattatttgtaaatgttgttaaagacgagcagttttaattaacaccacaacgaaatcaggaaaagaatgagtctctatatgaattctaatagtaagaactaagaagtatcggtttttgttttcatgttatcagctctgcaatatttcaagaggactgcaaagttgtttctgattcgcgttcgcctccgcaaatagcaatcaagctcaggttttcttctgatcaacatgtttgcattcaagtttagctgttgtgatttttcttttttgtgcatgtaaatgcgtctgattcaccaaggtccttgtaattcgagtaggccgtactcaaaggacatgggatatgaagacaccgacatatctgctatgcttatagttaggtgagtatcttctttccgaaattatgaaataattaacatgttcatctttttattacttcttctaactagtttgtccttttaggtgcttaccaggatatccttacaagtgccccaagcttcagattactccagaacaagggttgacaacagctgatgctgagaagcttttatctcttctcgaggaccaggcatgggaatattttctataatgatatactctatggtattcagaagtgctctatgctgacacaaggtactcaaaaaattatattctatgcaggcaaattccaatgctcgtgaaggtcgggttatgatattcaacctggtggaggctgctcaagagtttttatcagaaatcattccggaaagtcatgatgaggaatctgtaagtatattcacccaaatgactgtttatgcctaacaacagtatccttgtctcttgttaagtgctggtaaaaagaaaatttattgcatcacgtatctatttgcattggtcattcttcctgtaacaatagtgttattatttctttctgaaggttccatgcttgactgcacatcgaagcactcagttcattgagcaacctatgctttcaaatatagcaaaatcctgttctggtggaccttttgtgtatggttttatagacctatttagtggcttggaagatgcaagaaattggagtctgactccagatgaaaataggggaatcgtatcttcagtacaatctcacccactagacacttcaagaattttgcatcagaagccagacaagaatctgaagcgatttgaagaccatgctaaagaagaagttgcactgcctgctcccattgccaaactgaatactgttcaagaggagaatgttgatgatacaagcatctcttcttttgactcaagtaaatctactgacgatgtggaatctggattattccaaaatgagaagaaggtgaggggaggtccatctgttttagctcaatcccttttttcctttttaagatattggcctctggtcctttcatatgagacactactccagaaataatctaattagaatttatgtgaatggggctgcacgttttcttttggttagagataactagcgtatcctgaccaacaaaaccagaattaagtaataagagtcatatacctcctctcaagtatgcatctacttttggttgctgaatgttgttgttgcttgcatatttttgtttctcttagcaggaatcaaatcttcaagatgatacagctgaagatgacagcactaactccgaaagtgagtcgctggggtcatggtcttctgattccttagctcaagatcaagtgcctcagattagcaagaaagatctgttgatggtccatttacttcgagtagcttgcacttcccgaggacctttggctgatgcattacctcagataactgatgaactgcatgagcttggtgtaagtcttttggataattgtattttttttatccatcgagggaagtttcttcattttttcccccaaaactatgttaaaccatttcagatattgtctgaagaagtgttggatttagcttccaaatcatctccagactttaatagaacctttgaacatgcattcaatcaaaacatggtacgtatcccttggcacacttcattgttattatttacttatttgagtttcatgtaatgcatctgattgatgttatctttcaaggcctcaaccagtgttcctcagttttgggagccaccttctgattcttgcgagccaaatgcatcactcccaagctcgcgatatctcaatgattttgaagagttgaaaccccttggtacattctccactatgcttttctctctctctctctctctctctctctctctctctctctctctctctctctctctctctctctctctctctctctctctctctctctctctctctctctctctctctctctttccagttttaggtgtagaagatcaaattcagtagtgtctttgctcaaaggtttataagatgttatttgttactcattagttatttagatgtgtacttctgcagaaaactgtctctgctagagttacgtccactttctcaacattttatttgttctgcaattttgtttagaggaagtagttttccttcttgctctctgctgaaactctatgattggcaggccaaggtggtttcggccacgttgtgttgtgcaaaaataaactggatggaagacaatatgcagtgaagaaaattcgactgaaggacaaagagatacctgtcaacagtcggatagttcggtaagtgagaaactgttcatagtgagtacatttggaccaacatatatacttaaagcaatttaaagatctctgtgccatcttggggtgtttttctgtgttaatattagctaaatgttatgccacctggcaagggcttcttggaaattatctatgctctttaagcaagtggtggagatctggattaacatgttcttcatctgcgtatatatgtgctctatactttttttacttgcaactgtgtttgctgcaaaccaggctttatggcctcggctttaaaactctagtgtaggctgtatctggggaggataagatactctataactgatggtttagatcggtttagagtataatgctaaatctgtttttacatgtgctcgttatgaggtactcagagaagtagcaacactttcccgtttgcagcatcagcatgttgtacgttactatcaggtaaaggtcctttctgctcttctgaactttctactgattaatgactacattcagtgagatatcttcaaattggataccagccacgtgtacctacatattgtcattgaatttctgctgcttagtgctattccttttgcctatgttctgtttgttaatgatattaattttcatgaaaataggcctggttcgaaacaggagttgttgatccctttgctggcgcaaattggggatcaaaaactgcagggagttcaatgttcagctactcaggtgcagtgtcaactgaaattcctgagcaggacaataatcttgagtcgacttatctatatattcaaatggaatattgtcccaggtaaagattttaaaagccctatctaaactcattatttcaccccacacatatagtgagctgttaaaacacagatgtagcgtcattgatttttgacattgtgagttattaattatttctaacttctaagttcccctgtgtcccacgcttgtccaagaaaaacttagattaaaatgatccaaaatgtctgatattttcatgaaatcgcggatcagtacatttctcctcgatctgtatagtattgttattttttgttgtcttagctttgggttctttcttctcttctcttcttactttttttgttcatgttatgttcaaggactctccgccaggtttttgaatcatataaccacttcgacaaagactttgcatggcatttaattcgccaaattgtggaaggcttagctcatatccatggacaaggaataattcatcgggattttacacctaacaatattttctttgacgctcggaatgatattaaaattggggattttggtcttggtatgcttccctacctaatgctattatttgcttcaatttcttggtatgtctgttgttcacatgcttttctgaatagacttaaacctctctagtaacataacgaaggtaggttccttgccatgcttgatttctgctttttatcattttaaagtcgtgagggtattttgatgcatgaattttactatgttgttcaagtctttaaataaaagaatcaatctaatcatctcattatactgtgagtatttaactgtggtatggaaaacaaaaacgaaaatattgcattttcttactttatcagcaaagttcttgaagctggaacagttggatcaagatgggggtttctctacggatgtggctggaagcggagtcgatagtactggtcaagctggtacttacttttacacagcacctgaaattgagcaagattggcctaagattgatgaaaaggttagtagctgttggtgccttaaatgcttgtatataccttttcttttggtcctcaggtttttattatttcgtcttatatctgtgtgtttctaaatgatgtgttgaattgcaggccgacatgtatagcttaggggttgtgttctttgaactttggcatccttttggaaccgccatggagagacacgttattttaactaacctgaagctgaaaggggagctacctctcaaatgggtaaatgaatttcccgaacaggcgtctctactgcggcgtttgatgtctccaagtccatctgatcgtccctctgccacagaacttcttaagcatgcatttcctcccagaatggaatctgagttactggacagtgagttctttgcagttctctatttgtgtcaacttcatatgaatgttcttggtcgtttgaggttttcatctgatctgtgatgtttttctagtaaggctaacaacacatagtcttgttctgtctccattccgctaaagttacaattcgtaaactggctgactacaattgctattaattcggacctgtcatttgcttataacgtatacaaattttgagttggtgttagtagtgtgtatgttctcttttatttgatgaaatgctgattctttcttaacaagtaaccctttcttttctaaatttcagatattctaagaataatgcaaacttctgaagattcaagtgtttatgatagagtagtaagtgtgatatttgatgaagaagtattagagatgaaaagccatcagtctagtagatcgagactctgtgcagatgatagttatattcaatacacagagataaatacagagcttcgtgattatgttgttgaaataacaaaagaagtctttaggcagcattgtgcgaagcatctagaggtcataccaatgcgcttacttagtgattgcccccagtttagcaggtatccttgttgctatccattacctgtcactcaaactagatcttgatctatcttttatcttccctctaaaggaaaactgtaaagcttttgaccaatggaggagatatgcttgaactatgctatgagctacgactgccttttgtgcattggataagcgtaaatcaggtcctgtgttgttatgtatatcgcccttctttttcttgtatgttaagcagaaaagtgctcactaatttctatataagattatttccaaatcagatgtgaagttcaaccaaattggaccaagaactgtcttagagagcagctttttatgaatataggacaatttatacaaagtgtaaacttgacattgagaaagttgcaaagtgaattctgagcaagtcatagctacccttacatgaaatctttggttttaatttcttgctttatttgtctaatttggcacacttcaattttgcaatgcagaaatcctcattcaagcgatatgaaatatctcatgtctacaggagagcaattggccattctccaccaaatccgtgtcttcaggtattgtggtcgcacactctgctaatataatttctggccaatatagtataagataaatgctggctgtccattttaccttttattttctctgtgaaaaaagagcatatgcttataaaggttttgatgtttgattgccaataggcggactttgacattgttggaggcacactatccctgacagaggcagaagttctcaaggtgcgagacacaaatggaacgaatctatttttatatcgagtaatgatcattacatgtttataagtcacactgccaacttttggaggaaatgtagtaagtgttgtgatggtgtttctgggaaactaacgtgaaactgaacaattattttgccttatgcattttcctacagagagcttacatctcctgcaccgttttaatccattaactttacaggtgatagtagacatcacaacccacatctttcatcgcggatcttgtgacattcatttgaatcatggagatttgctggatgcgatttggtcctgggcaggaattaaggcagagcatagacgaaaggttgcagaggtatggttattgttagttcaaggatatgggtcattgtatcaatggtttatatcggtatcttgaccaattctttttcctgtttttcaattgaagcttctttccatgatgggatccttgcgtcctcagtcatctgagcggaagctaaaatgggttttcataaggcgtcaacttcttcaggtttgaggctacacaataaccctatacatggttggcaatcatagtaacatgccacataccaatattatagtgtactttgtcttactcgggaatctcctgcttaccaggagttgaagttacctgaagctgttgtcaatagactgcagactgttgcttcaaggttttgtggagatgcagatcaagcacttcctcgtttaagaggggctctgcgtgctggtacgatccaactttcgccactcctaaatttgtgaagcagattataattggttccatctgctgcagatagacctacccgcaaagcactcgatgagttgtcaaacctcttaacctacctgagagtctggaggatagaagagcatgttcatattgatgttctgatgccaccaactgaaagttatcaccggaatttgttttttcaggtacaagtgaattgtggggcttttttgggtctttgttaggcttttggatgttttatagcttaatgcgttgtttacaatgattgaattacttactctggtaacaggtgaagagatgggttctgcatagatgcttagttgatgcatagattgttgttgattctgctatatgactgtatgtttaacatctgcgaacttcatacaaatgtttgtcaggttttcttaaccaaagaaaatagctctgggacatctaatgatggcgttttacttgctgttggtggtcgttatgattggttggtgcaggaagtgtgtgatcgtgaacatgtaagttctttccacgtatttttcatcttgcatggagagaagctataggatatgtagcattgataaatgattattcacgtaaaagatacttatcatggtatcagtgtatgaactgaaaaccgggaagtgaaatttatcctcttatctactagtgtcactgtgaaagttgagtgcaagaggatggtaaaatatgttattgaaaagtttttattattatttttgttattggatccagaaaatgaacctccctggtgctgttggagttagtcttgcactggagacaatatttcagcatcttcctatggatctaaggcctattaggttcattgtccttctgaatctttttcatgatcttaaatggaaacacctcgctaatttgtattgaactgcagaaatgaagtcagcaccagtgtacttgtttgttcaagaggaggtggtggtttactggtccagcgcatggaactagttgcggaactatgggaaaaaagtataaaggtgaagaaagcttgaatatgttatgttgatagatctgtttggacatatcatttgtgttaccaactaataacatttacatgtatgcattggcaggctgagtttgttccaacacctgatccaagtcttactgagcagtacgaatatgcaaatgaacatgaaatcaaatgtctagtgatcatcacagagtctggagtagctcaaaatcaaatagagtttgtaaaggtaataaatacatcatgttctgcttactattgaagaaagccgtgaaaatgaccagtaaatttgtggtttgcaggttcgtcaccttgaactgaagaaggagaaagtggtaggaagagaagaacttgtcaaatttctgctggatgcaatggctgttcaatttagaaacccctctgtttggagctaaagagagtaaataaagagccactttttgcttggtgaaaatattatttgccactcaacagtcacaaattttgatcattcacaatcttaatgtgcatatatcttggtattggtcagttacattcatatgtgtacactagcccaacctcacatcagtttaatactactgaaactgagggtgcaaatggttaacatgtaaatgaatatgattagaaattttagtgggataaattgggatggataatgcatgaataatcatggaatcatatgttttttgtccttaggttgttgtcgatatcaaatggcaatatggcataatgttacaaagtacttacagacttagtgaaatgcgtggaacaaaagcccgtatagctcagtggtagagcgtcagtcttgtaaactgaaggtccgtagttcgatcctgcgtgtggcacttttttattttcctctccttttaactacttattgtatttgtttgttattattgaccattgacagtaatcaacaggtaaaaaccactagtacaataataaataaccaggttcacttatacaaaagaactttgtaataattagttgaaaaaaaaacttgatacattcttgcttgaagagtctctctgcctctttgttactttcctgccttaaggaacacattatacatcagagtaaaatatcttatatatgtcattagttactaaagacttgagaaaacagacacttgttttcagaaattatgatgcaagaacaagctctgtccaggagaagctggccctatctcttcctcaagactcctcaatgcttcttgttgcttcctcccttcatcctcctcctctgcgacatctccttcagatgccgatgatttcctcctctgcgatgatgtcacgctcgggaatgttatccatgatccgcctctgaattccgtgttctcggaaccagacctttttgaaccgatcctccatgacttcttgtgcattctgctgctcccaagaaccacttctgttggtaatattggctgctcactgctcgggtttcccattagctgtgcaagcgctcgttccaatgctgttgtcactttatccattgatggtctatctttccctctcattctcacgcatttgcaagccacactcacgattcttttcaaagcttcgatttcagatggatgtttcaagaccgggtccaagagtgcgtttatatctcctgctttgatcaaaggaactgcccattctactatgttcccttcttcgtagtgcatgtcaatggcttttcttccgcttaggatctcgagaagcaggactccaaagctgtagacatcggatttggttgtgagatagtgaagtcgatagtactcgggatcaaggtaaccgagagttcctgctggtagttctgccaaaggagagccgctatcgacaggaccaagtaaggagagaccaaaatcagctactcgagcattgtgttcttcatctataagaatgtttgatgatttaatatcccggtgaatcacgggagggcaagcgtaaccatgcaagtattcgattcctctagcagcttggacagcaatcgttactcttttgacccaatctagttgctctttcaaggccttgttctttccatgaagatggttgtgcagtgagccgtgtgccataaactcataaactaaaagcctttctccacattcttcacagtatccaagaaggctaagaagatgagcatggttgagtcttgataacagatcaagctccgtgcgaaactcatttgaattcttctgtttgtctgatgacattatcgctctcttcactgcaacagtggttccatctctcagtactcctttgtacacacatgagaaactccctttccccactattgattcttctttgaatccatcagcggctttttcaagttcctcataagtgaaaactctagcccttctgcgcttttgcagctcatcaagatccggacggattttgccattatctttcgtaaaggctgaatctttagaagaccttgtatcattttctgagcacctacaattcctcaatctgtacctaatgtataaagccgctgttatcgagacaaccgctaccaaaaatagagcaaatccaatctctgcagttgcaataggtagctgcagtgaccaaaactttcctttttccttgcctccactggtagccgaagaagagcagtttgaggagcaatcatgtgaggaacaactggagcagttgtaaacacaaacttgatcagatctctctgtgcatacgcttttctgatacattccaggagggcaactggtgctacagggcaagcaaatgtgagagccagtaaatttgcaaggcgagttttcttggttactgagttcatgagttcctggtggacaaggagtgtctatacagagtcctggtgagacagctaaagggatagaagcagggaaaccaagaccccaacaaacaggtgacatagaagtccctgtgagaactccgcaagtgaagtaattccccgctgcaagatcataaaagccgatacctgtaggagcaggtgtactcctgttcacgaaaaaaccccaacagaccgcactatgatcatagcgtttgattccacaagcataaaacttcccacctaccactgctaagagtggctcttttggtggtaaatcaagaatcttttcttctgtagaagtccctgtaacctcctcttcgaactctaagctctttccccaacatagcactcgcgattccaacccgtcaagaatgccacaaacatggtatccaccagctgcaattttctgaaactttttttccttggggattaaactgattacttgactactattctcatctccccaacagaaaaccgacttatctttagaggacagcgcgcagttgaactccgaaccagccgaaagcgaatgtaactgcttatcaaagacaaagtttcttgtcatattgtaaccccaacaatcaacaagagaagaggaaataatgttgctgttctttcttcttcccactattggcttcctcaaaccacaaagatggtaatcaccagcactaacttctaaatactcagctcctttggtcattggttgaggaactcccatttgaataaatgcactgtttccccaacaataaggctgatgagatagcatcagaagcccacacataaacccatctccacccgttaaaccgatgaactggagatgaccaggagtcccatagaggattgctgagttcgatccgtagcaaaccacaagatgagacccatcagacttcagaccacagaatacagaaccaccttctccataagaaattgcaattgaagacattgaaccaagagctgaagcaagctgccatatactagtgaaaagcacaagctttacaaggagaatccattcccttgctctcgtttcgaacattctcattcttttcaaagtcaacacacacgcttcttagttactgtcttcactttctgagacattccacagagtgactaagagtatgacccttgattagtaaatagcaaacgagtcacacgaagttcacaaaaactgtggaactgcaatcaagggcatgcaataactaaaagaatagaaattacaaacaatgagagctgaattagtgacgaagaaacaaaggactcgtcagccagacaatctccggagatgtaggaaacaatcttgaagtggaaaattcagacaaccaagtcaaagaaggacctcttgtctctctgttcttctgcaacgaaaacaaaaacacttactcctttcagatctcagaccgcaaggtaacaacatcataacatcctccaaagaccctttgaagctaagcttctcaaaaaaaaaatcttttctgccgactaaagaagtgttgagagagtaattgggtaatgaaagtaggagctagagttatacattcaacagtagctcatgaaaatcttgagaaaccaaaagagaaagagagaagagagagacatggagcttatcaaagagagagtcatgaagtactgagatggcattaaatgcgaccaaaactgctgcttctgaataatggcaaatgtaggtgacgccatttaatattaaagagttaatgttaccaaattttctcttcttgctttctcgtttttttttacttttttatttatttattcgaatttttccccattcttcccaaatttgtgcaatctaacccaaaaagttttatgtcaagtttccatctctatgcacattggagtttaacacaagattcaatgagacattaactattactcattccttcaaagcttcctttttccttttttaataatctttttaatgggtgttttactttcgccgttgccgtcggtgtttggtttcgagcaatccaaaacattttagatcaatctcttaacttataatagtaaatggcttgtgaggtttcatgcacatatttttagttcaactctgtttctcgagacgcgagacacaaacatcctcttttgtcttctttctcctcatctccttgtgcccaacaaaagaaatgttttgtcctctttagactcaagatttcaaactaacagacctctctccctctctattctctgtgtctcattacaagaaccaaaattgaaaaacataagttgactcgattttatatgttcttccgtctttaaagttgacttgagaccattactgattctaagaaaaaaaaaaaaaacccaactaactatatggttcagacttcagattcaaagaataagaaccggccactcacgtgctactcacatggtaacgaaccaatacattgcagacgcacatagccttggagactctacatttgcaaattacctagacttatcaaacattcaacccaagtttttttgtgtaaacaaagatgataaactgcttctaatcaacgacatggtgtacaacattgatctgtaagctaacctccaagattggtttatgaatgatgtgtttaacaacacagaattgcgtttacagacaagacagccttacaaataataaaagacgaaccaaaaagaattgcatactgacctaaaaactgacttctccctaggtcattgcaaaaaaccttcagtaatatttgactcaatgctctcatctccatgtgtttgatggcctaagtgcaagccaacaaccaaaaataaagtcttcattactctttgttgtatcaatcgtatatttatagagagagcacaaaatcatacctcaaaaaaaaagcagcagtagaaacctcttggttagaggaaaggccatttcttgactatctctacatcatgtatatagccatttttctattacttgaacaatattatacaacataatggatgcttcacccttcaaacaagtcactctgaccgcgcctgctcacttaaaacttcgctcttttcctgcagaggaagaaacagcgcataggataaggctactattgtgtttattgattgtagcgaattgattagaaaggcgatgttctacctgctcctccgtgtttggtggcaaacttttgcctccattgcaacggaacttgaatgactcagaataactagtagactctctatcgatgatgaactctggagaagagatagtcgaggatctactggtcttacgaggagaacacggctggtttgagtgataggcctctgcttctgatgatgataattcagagccagctccccgtggacatataacagtacttgagtttccgactatttgaaagctttccatggatggatttttcggaatttctacaaggagatcaccagctgaatgattctgttctgcagcaaccatatcagattcacttgccaacttcttccctggaggaataatacagtccaagtcaactggatttacacagcagcttttactatatgattcgacacaagatgatgcaatctggcaaggtcctgaagaatcaggtatggacaagttaagcccgcttttttccttgcaagtgtctgagctctctttgattctgttgcatggttctatggcagatgatgctagagatcgttcaccattgggatggtgatcagaaggtaagtgagcattgtctttcattggcggacttaaagatgattctctccttacatgaccatccgtgtcttgccctgaactcttctgtttcttacactctgtaatgccaagatcagaatgtggggattttctgcggcgcatgctatcacatacattgacctcatctctcatgctattgatccaatctgatggattaaaatttagatcaactgaaaggctaataccctcttccaaactgacatgaaactcaaacgaagacgaactaggattatcaccactgtctacatctctcattctattttctagccgagaatctgctctcttggagtttgctgttgggcccttttcattcaatttcctcatataaggaggagcagatgtaaaatcaatcaaaccatcatttccatttctttcctgcattttccatagaaacatttaagagacgttagaagttggcagagtattaaggacaaaaacattgatgcacctatttcaataaatttctttgagaaactatcgtacattatagcggtatgactattgtaccatctaccataaaggcgaaaatagcggattttatcaatttgctcaatgaaaaccaacttagtgaaaactacagctgactcatcctagtggttgtaagccgacttcactttcatacaaatacatatttcaaaaaaagtgaatcgaacctgatacggtgtattattcccaaggataatgcctggttctctagccactgcaccttgaacataatcctctctaggtacatccaatttgttaccataagaatctgcaataacatttaaccagtcttcataaatggtataacaaaatgagacaagagaaatctataagaaacagaaataaattcaccaaaacctcttttcacattccatgttctaatcgctggtgctctagaagttgtcgctgaactatcttgattcccagggaccccaaaacttaccgggttcaaattatttttctgcaattgttagatagatacaacaacacatgattaggttccaaacaagaaatcattaggagaaacaacaggacatgtgacgatattaaatttatagagcaacaaggcatgaagttgcatattaatgatttcagattatcttcaagcaacaagtttttttcctcctgagccatacttagttttctgaaaccaaaaaaaaaaactacctcgaagtaagaagccaatgattcagccatatcggaacttgatctattggcaggcaaattatacttcttgcataaactctgaagctctttccttgaaaatccgcaatagaaatccacatcttccttcctgaccatctgttaccattacaccaatccaaataaagtgttacactttttaagagcttgaaacaaagaatgaccaaaagtagtgaacttttgttttgggtatcaaccaaagtaatgaactttacaaatacaatcttacaagattttcccaacggtcacaaatttgaaggaatataaaacaatagaattcttccaagtggaccaatgaatagaagctaccagaaacttgaagaactagtttcagctgaaagagaagagagactaaaaagatataaaatttgaccaaaagagaatgcttccctgttacagaacatcaaaaacctaagagagactaaacactgacaaggacacaatcgaattaaccccatttagatcgaaggaacatgaaaatttttagaaatagacggcgaataattcgtggaggaagctttagtatttacctgctgatcgagtggctttttccgggaattttgccgagaaagaaagtttctggagaaattggaagtagcgatttcgaaatctctgcagggacctaagcagacagaacgagcccacttttgacgaagctgtgtcttcaaatctggacgtgaactttaaactcaaattctattgtgttatggatatatgggcctacttgaagcccattaaggttttacaacccaacatataactccgctatgttttccctagatttatgttggttcctatagcttttttacatatccgaatttgaattatagtgaaagtcagattatgtatcctaaccaaagattgagaactttcgaataccgaaaagaaatcttaaacaaatgctcgaatatatttaaataaaaattctaagtattaagtatagttcattttttttttcaattatttctcgatgttgtttcaattagctgtggaagtgtactataataaccaaaattaaggatcatgtgtcgtagtggatttgaatgagctggaagacaaacataacatatgtaaatcaagtgtcattagatcccgttacatttatttattttatattatatgaaatataaaattaatcgaatatccactaaaacaaagtttacgataatttgttttactaaaagttgattattttagttttttttttcaaggattatttttcactactatattacacttgtgactcaagtcgatctatacaaactatcatgtttgggggcgatttagcacgttgcaagcaattttgaaataacaaatgataaattgtgcacacagtttgttcattaggattctttaataaaaatattgactcaatgcagagattcaatttaatattataatatactataaatatgttcataacatattagattatgccaataatttataaatttcgtaattacctcaaacaaatctctattttaataaccaaaagatttcaaattgaaaagaaaaaaacttttctaaattaacacaagatgagttttttagtcaactcaaaatagtagctaacttttttaattaactcaaaataatttattttagacgcgattcagttatgatattttgatttttgatctaattgatttatatgtaatcttatcttgtaatttgttgacataaataaactcattttcaaactatattaatttttaaaaaataatattactttccttttttatatcttaaattgtttttatctataattgagtatcatatatatatataaattcattctaatattatatataaagactaacaaaaaaaattcacttactactataatatttcaaaactttattctagaatatataataataaaaaatttgaactaaataaactcatatatacatgttgatccatgttgagaggttatgttgtacttgttgttttgttcggaatttctgaaatttgtagtttgtggagttgcctcgtagattttaggtttacaatcttagaggtattattgttcatgcttagagatattgattactcgttttaagcttttagatttgcatttgcttcttctaaattttggaggtattgattactcgtttaagcttctagatttgtctttgtttcttcttcggcgattttaggtttacaattttctgtctgaatctctattgctccttgtcgctattttctgtctgaatctctgagtttaggttcaattgcttcttctcaattcttctccaacttttcctcttcttctcttaacaaatgtgtaattggctaaaatcttggttttgtggacacactgacattaaaacaactgtggatgattgtgttacacttgtgaatggggatgtggaaactttggaaaatttggaagttggttatcggaggtagatcgtgacaactgaaaataagaggggtcaaactacaaatgacggaagtaagcttttaacattgttattgataagtaagcttaccattcttactgatctttgatcattttctttttttcttttaccacagaaattgctatgtacaacgacgagactagacttttaggattagagtgtgattaaaccaacagacagttcacagcctttggggaagaggtaaccattcttctttttcgaaattttcatatgtattatcgttttgatagtcatatctttatatatatatatatatatatattttattacagatagctaaaatcataagtttcaaaagagcgagataattttttggtagcgtgaatactatgaacaacgttagagcaagatacaactggtaagagtgtttaaagtttaaattatctaaatatttcatatttaatatctgataaatgttttttataccttttttttttggcagaggggaaaaatagtacaaagcatgatcgtccgtatatagtaaaacaaaagaaaaaaatcggttgttttccagaaaaatcaagtactataggattttggtttaagagtaccctactatgttgttattatgtgaagtcactattcaaattttgttccactgcatttgtttcagctttatttgttcccctttttttctttccttctaattctggtattcttaaaaggaaaaaatgagggaccaacggtcatattgcaacgggcgtcattctctcggtagtgacacgtgctataatgcccacttttattcatttttattgtaaacaagttgtttaaaaccatcaataaacggggacaagaaccaaacatcaacaattataacaacgcgttttgttataaggataaatttatcatttttcttctatcaaaacccaatgatcatacccttgaatcttgcttgatcacgcgtatcctccaacttccagtagattaaatttcccaagtacttaacgttacttttagtttatccttttaactcctttttaattttctgaatcaataccaggtaaatcaggggggttcaaacttagtctatcttcttaactcttttttgtttttaaatgttttgtagactatgtaaactctcatcctaaatctactttttaacttttctatcgatagcaataaaaagttgtaaagtatctacacaaaaacaagatgaaatggtcaaaagtctgtgactagctagtgtttgtattttaattcagaaagactttaatgagtttatagtcgtgctctttagtgttaaaataacaattactcctagacttttagttattttttattgcattcttggatatcctccaacaatattgtattattcaaaaaattttttactaaagtccataaagcaatgaggtaacgtctaggtcaattaatggatggatcatccaacggttgtaccaaaaaatactatagagattaaaaaaaagcatatctctgaattattattatttacgtccccatctctcttcctctataaatagtataagcagagacaatattcatttcaagttcctctgtataccaaactatcaaaaaaactctctccatttctgttctcaacaaagccaagagttatggtgagagtctttcttctctacaacctctttaactcctttcttctttgtttagttcccaagaagcttagagttttcttccctccttcttggtacatcgacgacaagaacccaccaccgcctgatgaatcggaaactgaatctccggtagatctaaaacgagtgtttcagatgttcgacaagaacggagatggacgcatcacaaaggaagagctgaacgattctctagagaatctaggaatctttatgcctgacaaagatctgatccagatgatccagaagatggatgcaaatggagatgggtgtgtagacataaacgagtttgagtctctttatggttcgattgtggaggaaaaggaggaaggggacatgagagacgcgttcaatgtgtttgatcaagacggtgatggatttatcactgttgaggagttgaattctgtgatgacttccttggggctcaagcaaggtaaaaccctagaatgttgtaaagagatgattatgcaagtggatgaagatggagatggtagagtcaattacaaggaattccttcagatgatgaaaagtggtgactttagcaatagatcatgagtttattctgacatggagaagaaggaccaatatatttacctctagtcctctactatatatgattaatgtatcagctttctccaagttaagaaatttgggcagggatcgaatcaacgcaaatagtaaataagtaacttgacatagagtctaggaaatttcatcaatccacgaatcattcatacataatatatctttgtttggggtatagtaccataagatatagatagataagagtctaaaaagaagaaaaacaagtaaaattaaagaagaaacaaaattgcctagtcttttgggcggtggtgaaatctctatgctgcaatgctttatcaatatgtttttgttggagtctttcgacgaaacccaactgttttcacagaagaaagtgaaagccaagcaaaacgttaattcagtaataaaatccctttttaataaaaatatgtaaaataaaataaaatgctggccgatcatagctcacttctttttgaagatacagccgcaaagtggcatggtatttagcttccttttcggctttctcctttctttccaaatgtactgatcatcaagttgcatgaaaattattactagagaggtaaatcaaatattataagtaattgctacagaaggtaggaaaaaaaaaagatgtggtcgtagtcgtagtacacggttcgtatatccccccgtatttgcgagataccgcaagcgatgtggcagcctggtccagccagtattcctcagatgttgcaacaccctcaatcgactgatatgaacgtacaatgagaaagacaaaatataccaatactaattaatatagacttagttatatatatagaaaatggattcaagccttattatatgcatagtcaatttcagaaagatgcaattcaagagatgaaacatacgttgtttaacttgactatatccttttgaagagctttgatcttctttatggacttgtcgacgaacatagtactaccggagttgaaaaagcccattcgaatccaaaacaatctttaaaaaaaaaacaaagaagattagctagggcttatcgatcagtctttttacgatcataagacgatgtaattcgagatggacacaaacctgacggatgctgaagcaatttagctctgagcgaagaattcaaagaccttttgccttatgggttaatggtttcatggaaatcatatgtaacaaaaagaaaaagataaagtgcagctctatataaaaacttccaatttgcttccccaaaaaatattgtgtatcttctaataaatttgtcaatacgtgacccattttggaaacaggatatatatattttttacgaaattctttaaacagcaaaatagagatatgtacattaagactagtaagaaaataataagaagaatagaaaagttaaataaatattccaaaaagaaaaaatctcatttttcttaatcaaaaacggattgtaagaacccggcctgattcagctgttatcggcccaacttacaaaatgggctttcaacaagtgcagaggcctaactagataattagagatggaagaaggcccaacaccttgatgtaaatttagagaaaagtacgacgccgccctttctcgctttgagtagaagtcatactgtcaaagggtatatctgtcttttaaaaaaagaatttaaattaaataaaagcaaggaaattgagtggggaaagcagaaaattaagaaaggagagagtttgaagtttgaaaagttgggagagaaacgaagcaagcggaggtgtggagaacaggtgtgttcgttgtcgacgccgtgcttggagaacaggttttcttcttctttgctcttccttcaatgccgtattaagcttcttcttcttcaacttttgctgtctaaaagttgtattatcttattttcagcttctagattttcgatttgccttgtgctccttgttgattttaggttttagttttgcctgattcttctcgatttaggttactatggttggttcaaacattggattgttgctaatttgattttgaattttgcatttggtctctgattcaaattaggcacaagagaaggcggatcttgtgcttctcatctctacttggatcgattgttgctactttgctttagtttcatatctcgtctctgatttgactgagacgacttgtgcgtataatcgattgtttttttgcaattcgtctctgatttgactgagactaagaactctctcgtgcatcatatcatctctgctatgatcgattgttattttgagtgacttttgcatttcgtttctgagacgaagaaagctattgtgcttttcatctttattgtttctgattatcttacaatgttgttaattgatgagtgtttatttgaagcatgcatttgtggtccgattttgttgactgtaactctggctcagtgatgtttgtgaatttatttttgtcctgtctctttatcacgaccttgttcttttgactgagttttggttactatcattggttgaaatgatgaagaaaacactcttgtgcttctttgctctactattgttggcgtctaagagtactcaagattcatgcatttccctttttctgccattgctttatatattttcacacatgatgtttcttaatttgacacaggatattccagtggcttaaacggtgtctctgtggagacacaaacataactattgatcaggcaatagctttggttgatgaagagatcgccaacttgcgaaaattggagcgagggtatcaaactaatatccgcaacgcagaaaatgccagagatcaaactaatgtccagataggtactatttctactcgtctagtcacttcaatattgtttcttaatattgttggttaattctcttctgttgttttatcgcagaaagggacagcttcaacgatactattcgacttttacaagcagagtgtaatctcatcaacctagagatcccaaccctcaatgaagaggtaaatctttatatgtattttggttttgacggctctcaaaccatatcatttttatttatttatatgattcttctaaatgttattattatattggattttgttacagaaatttgcgattacaaggttgaaatcagcaaaacatttctttggtgctgttagttcggtgaacaagaccagagaaagataccaccagtggtaagagtttttctttaaaatatgtacctagattatttcttttttaatttcagaaaaaatgtttttaatactgattttttttttcttttggcagagggtaataaagaagagaagatctatcgtgtttaaattgctttgcgaatcaagttgcttgcattttgcattaggcaataaaataccaaataaagtactctatcttcacttcctatggaattggccttttttgaactattcgatggtttgttttgaatactgattgctttgtgaaaatagaattcaccagccacttctcaatattgtcacatgtttctgatttcagttttctatttatagacctagaaacatacaacatttacgagatactaagtaatcagaaaatgaagatatatcattccactaatgttcatcgccttggtcgtactcttgacatcattccccactccaacgctctcttattgcaaatggtcacttcatttgtgactgctaaatttgaaagataaagccacgtgggagaaatgttgtgatagactaataatagcaggtcctattggttaataaattcgtattgtttagtccccaagaagcttagaattcacttccctccgatcctttttggcttccttgaagctcaaggaaggtaaagccctagagtgttgtaaagaaatgattaagcaagtggatgaagatggacatggtagagtcgattacaaggagtttcttcagatgatgaaaactggtgactttagcaatagatgagttgatctttttagggttcatagtttctatatctaattgggtttatctattttctctgtaaactaaataaattctgaaaataaaaaataatctgaaatcctgaaaagaattttttaaaaataattagacaaagagatttgactagtcacttgcttgggtgttgtaagtcaaacaacatggagaagaaggactaatcaatttacctctactatgattaatgtatcagctttctccaagttaagaaatttgggcagggatcgagtcaacgcagatagtaaataagaaactaggcataaattgtaggaaatttcatcaacctacgaatcgtcattcatacataatttatctatgtttggggtaaagtattatttctttaatgaagaagaaacaaaattgtctagtcttttgggcggtggcgaaatctctatcctgcgatgcttgaatatgtttttgtttgagtctttcgacgaaaaccaactgttttcacaaagaaaaaagtgaaagccaaacaaaacgtttattcagttaaaaaaataaatccatgtaataaattatgtaagcaaacttaattaaaatgatcggatcctcacttcttcttgaagatacagccgcaaagtggcatagtatttagcttctttttcggctttctcctttctttccagatgtactgatcatcaagttacattgatcatcaagttacatgaaaaaaatgaaaaaaaaaaaaaaaaaaaaaaaagttacatgaaaattattactagagaggtatatcaaacattatatgtaattattgctacagaaagtgtaaaaaactaaaaactgaaatatcttccaagaagctcatatcaacatcacttatcgggaaatcaagcagaagtcgaagagcagagtctgttgaatcaccttcaagatcatttgaacatggagaagactctgagccatgaatcgccacagtaacctcctccataagaatttgttgagctctttaaaagtgcagaggaggtagacgttgttcctcgagttgaggagttgaagtctgtgatgtttttccttagggctcaagcaaggttaaaaagagatgattaagcaagtgtgtggagatggagatggagatggtagagcagtcaattacaaggagtttattcagatgatgaaaaccggtgactttagcaatagatcatgagttgatcttttttagggttcagagtttttatgtctaactggtttatctattttctccgtaagtaaattctgagatcatgatttgaatttgataaaaataactagacaaagagatttgactttgtcacttgctatggttttggtactggtttataattatgacaacgttgcctttgatgagacagacttccccatttttgtctgattaattcatccaataatgcttaatcttcattcatactactgcgatcagcaaattttcaatgtcttttctaacatagtgaatgagaatacaagaacatggtgcttgttttgttttttttctcctaccaaaacaacaaacaatctagtatatataaatgtcactaacttgagcctaataaataaagggacaatttatatggttcgaccaaacactcgaagttttttgaaaacaattttggtcaatttctacattcgtttttttttttgcattacgttcaatcatttttaaatggcttagcgaatcaagatgcttgcatttcgcattaggcaataaaataccaaataaagtgctcttatctccacttcctatggaatcggccttttgaactattcaatggtttgttttgaatactaattgctttgtaaaaatagaatatcaccacttctcattattgccacatgtttctgatttcagttttctatttaaagacctagaaacatatatacaacattagatactaagttatcagaaaatgaagaacatttcattgatgttcatcgccttggttgtactcttgacatcattccccactccaacgctctcttattgcaaagagtcacttcatttatgcatgcaacatttgaagttgaacgatagacccacgtggttgaagtgttgtgatagactaataataccaggaccatgtatgtgtaagtatattaaagatcctgtacaatggaaagaagcttatcgtcttatggcttcttgtggaaagactgttcctctaaatcaaagtctcaagtcctatttcaagtgtggctaaaaatagtcaaccaacaaaagcaataagcggtcgtcaagccgaaccggagatacttaataagattagttaatcaagtctttccttgtctttttttaatcgtataagttgttgctctaattggccttcattatatttatgaaccatctctcccacattccacgtttttcttgctttttggaattactatttcactctttcaaattcgatactttgtacttgcttttatttaaagaaataaaaaagtagtctacttctatttaaagaaacaaaaaaaaagtagtctaaactagagaaaacggcatgtacgcgttaattatgcatacatccttggcccttgggactattcttgtgatttcacttcataattaactgtcacacaaacatggccaagatggtatcaagaagggaaaagatggtatctactatctagaactctcaggcgtccattctcgtgtttgtgagtttattaaagggtgtggtccccgactctttcaaatgtatttataacaagtttaattagttcacatgtcgcgattgttatgacgacacaagaaattatcgttttccctttataacgttgtcgttacgaacttccttaaatcccccaaaaaaagttttgtttcctaattatcctataattagttgatgatgttagggtttgaaaacttaatatagcgaagaaaaacggtttactatacttaattatgagcgtattttctttacgtttgccactttctttctttgcatggacattcactaagagcgtgtgtttgtgtttcaggtgattcttcgctgtgttagacgtggactacttctaccggtgttcaacaatctggtaagcttgtcttttgggagtacgaacaaaagaggttggaaactgctgccacttctgattgagcagtctccaaagcttgaaactctaatcatccaggtacgtatcattagctaatatatctaaagagagtcagagattagggacttagtggttgagcctttacatccatcttcttgatgcttttccaggggctggatagagttacacaggcgatgtgaccatgcctccgttccaagtgaagatgctgcatgttcatggttatggaggaaatgcggaagaggtggaacgcttacataaatttattggggagtcggaatgcggtgaagtggtgctaggctgcggaagctgtggtggataataccatgtattgcaaaccaaaagggttctatagtctatagttgaggcttcctggattttcggtttcatccaaatgcaagatctcatgtagtttaccaaattattctgtgtaacaattcatgtacatgtcgcattgctcttgcagttgcaagggcctctttaatttcagggagctatttttctgtatcttttggcagtctctcccttagatgatacacgagtaaccttacctacctcgtcaaactccacctggcataagattaacatttctgtatttgatgactacatcgtccctacaatgcaatttcacacttctttccactcttgcagactttacacaatatgtggtccattagcttggattttcagtttcatccaagtgcaacatcttagacgatgaaaggtggtgattaacaagctgatttgattcttcactttctgatttgtgatcttaaatagagttttaggattcttccaatctgtagtatatatagcttactagtttttaccagcagaaagatcttcaggagaatgccgatttaattagagcgtaaaaagtaaaaacccttcactttatgtgcactaacctatggctatgcatcatccgaacgaaaccaatgtcagaacagaagaagaagaagaataaacaaaactttctttaaggcaattgaagctcttttgttttcgacaagaaaaatctttattaaagagagaaaatgggggaagagaagatctatctcctaaatcaaagtgctgaaaaaccagagaccaaaagactatacttggtggttctgttgatgatctctctgttccagattcctcacattgtctactatgtgttggattctcttagaaaggctttcgttgtgctgttcgatctgttcaaatagcatctccagatgtcttttgtaagtagccgctctctttttctctgctgctagctgctgcatcagttcctgaattttgtcgtgttcgttctgcaaatgaggagagcaaagttttagaatttaagtcttttctagtaacaactgatatataagcaaaatcaaaacaccagcacatgaatatgaatatgctatatagcaactagtcacgaaccagtatcacatcagcatatatatatatattaaccagctaaccaagaaacgccaatttggattttcaaatgcaatggctgaatataaagaaatattgaccaacgaaagagagtaacaactaaccggatattgatcataaatgcaaccccttcgaactctgccaggcatcaaagagtgattgtgctccttgacaaactttgtgataacccatttaccagagttctcttttctaatcaagatcattgctttacatccaacccttgtttccgctctttgtctaataaccttatcccgcttgctaggcaacctgtaaccttccttgttacaaacaagttgcctgcctatgggagatccatcatgccttgaccgtgacagtttactaacacggatgacgaaccctactttagtagcatacgcattataaaaaccatgagccgctgcttcagattcgaactcctggccaacgtaaggctcatctccttgagcctctgtcatatctgcaacagccagaggaatagaatcaagatccaccttctcatcttgctcaccagaattttcaccgagttcattatggttgtcatcatcttgctcaatcattgcttgaccagagctttcacccatttcattatgattctcaaccgtggtaacctcaagctcaacaggaatccccatcatcatcccagcagctactccattatcaatcctgaaatccactgcaactcaaaaaaagggaaaacagcaattccactaatcaaatatctagcaagaagagctacaagtgttcatcatcttactaatacaaagttgtcatcttttctattccactgtctaattcaagatatgagaacaaagctcaagtacaagtgctctcaaaatcatccagcctccaccaacaatacaaaacaaacttaaaatggaaccattctttgggattcaccgtcccatagattcaagagtcatcaacaaatcggggtttccaaaagtatcgagatgtccaacttctcagtctcattctttcgcagggactagtctaagtggcttaatcgatcaatccaaaatcgaaaattaaaaacccgaaataatggtgtaaggaataaaacaatcttactggtcaaaagatattttccggcagatgtaggtcggagacgacgatcgaattaggttttcgatttgggggagagacagagaaggtgccggttcagggtatggattgcagaggacgcagtaccctatgacgtggcgatagatgattgggtcaaaatcggaaagaagtcaactcaccgttcatctaagctttgggtttatcgacttatggttcctccggtgcgcttcgcctcgtatgattattcctcatgttctttttttttctttcattacatgtttattttattttattttttacagcgtaattctcgccgaccgacgcacccgttagaccggtgtgtccatgacttttaataaatgttaaaattgacccctttattatccttcatttacataatcatccttgtactaacaaaatttctctaatttctagcattcattttgttcgtgtcaaccaggccaattcagccggtttaattaactttctttaaaatgctattgataaccagctaatgatggtttagtatacgatttgactaccaaactacattagctaagtttttttaatcatagaaattttgaatagcaaaaaacttattacatagtaatatattcagttacttatatttcatgatttagcttatatcactgttatcatcgaaacctatccagatagttttaggcatgaccacggttacggttattacggttacggtttattaaccaccgtatatgattataactttttttaaccttaacattaaccgttatatatacggttaaaacggttacggttaaatacggttatggttagatacggttacggttatttgataattatgatataattaatatatgagacaaaatattatattaatctttataataaaataaataaataaatagtgatatatcaaataataattattttacgtgattatgtgtttcaaatatttatagcgaatcagctatctattttttttaaataaaccaatgaatatacaaattaatggttataattataatgatttaattaattatatttttcaaacaaaaacaataataaagaaaagatgttatgagcactaagaaacagtttttagagtataaataataataatatgaactacttatgatttgatttatggtaaaaagagtagtggagtaacttcgatcgtattagtgggcatattaaacgatttaagttactattttagtaaaataattatttatttagaattatacacagttacaactatatttttaaggttttaataatacggttaaccgcgcggttaaacgtacggttaaccaacggttttgatacggttacggttattatatttttttaaccgtaatgaatctattttcacggttaacagttacggttattaaccgttttatacggttacggttgggttacggttaataaacggtccgattacggtccgaaatacagttacagttagattttggtcatgcctagataattcgcaactctagatttttatagacattataaatcatccacatatatatgaatcagtaatccaaaaaaaaagatctgtaacatatggttttctttcgttgcgttttaaaatatccattttatttagcatttattaaaaattctcttcacttttttttttttttttggaaatcaataaatcgctttaattacgtggaataaaacgtctaagaagaaggatagtcgttagttagtagtgataactgatgcataaaatataacttgggaaataggaaaccaaatagtgttggtacttggtagatagtctctgataaataaaaagatcatacatgtcaaagctagccccgtttataaaatttgtaacagatttgcatttctcgatttagtagatttacatgagataatatcttgtgtaatcggaaataaaagttatcctaacaaatgagataatcgaaattagaggaggatattaacatatttatccaacaacggatataagcccctcgtaattaaccttgcgaaattaaattataacaaatcattcattaatacatttcgattttggtagatttgcctaaaaaattatccatgaatggtattttattgaaaaagaaagttatccaaaacaaacaaaatattcggagtcaaaagaggaggattaatagtatcttttactccccttaatagtactatcttaacaacggataagcccctaataaattaaccttgtgaaatacgtcgtctaggtcccattgaagaagcataaaatctggtcaaaaacattaatcactatttactctaaatctcaccaaatcataacatatatgtaaacaaccaatagaatattacgattaaaaaataagttaccaaacacagtttagatatcttatctgatcaatctttaaatggataaatttgaatttgtattaattaaaagtcttgtggatttgactaaaccactcaccctaatacctctatataaacccttgattctctctaatacctctcattatatccaaaacataatctctctctatctctctctattttgctcaatcttaatcgtccgatcaaaacactccgactaaaaatggctgcatctaacggcgagaaaagcttgatcgtgagcttcggtgaaatgctcatcgatttcgtcccaaccgtctccggtgtatccctcgccgatgctcctggcttcatcaaagcccccggtggtgcacctgccaacgttgccatcgccatttcccgtctaggcggtcgtgccgctttcgttggaaaactcggtgacgacgagttcggtcacatgctcgccggaatcttgaaacagaacggtgtctctgctgaaggtatcaatttcgacactggagccaggactgcacttgcgttcgtgacactaagatctgatggagaacgtgagttcatgttctaccggaaccctagtgccgatatgctcctccgtcccgacgagctcaatcttgatgtcatcagatctgtacgttatttttatttttaattaatatatgacacgtaggcaaattcttttttgggtccgtgtctcacatttaattagcgaacggtgctacatcattaacgtaacggttgttggtatacgtaacgtagatgtcaagttaggttaatgagtgctctgttttgtttttgttttacacaggctaaggtgttccactacggatccataagcttgatcgttgagccatgtcgatctgctcacttgaaagccatggaggtggctaaggaagctggtgcgttgctttcatatgatccgaacttgaggcttcctttgtggccctcgaaggaggaggctcagaagcagattcttagcatctgggacaaagctgaagtgatcaaagtcagcgatgaagagcttatgttcttgactggatctgataaggttgatgatgagactgctttgtctctgtggcactctaatctgaaacttctcttggtcactctaggtgaaaagggttgtagatactacaccaaggtaatggttttcgaagagtttttctttcttgtggatttgactttaccattaatgttacttaagttgtgttcttgtatgtatatgattacagagcttccgtggatctgttgatcccttccatgtggatgcagtagatacaactggtgctggtgattcatttgttggtgcattgctttgcaagattgttgatgaccgtgctgtgcttgaggtatataccaaataattcatcaaatcattctgcaagtttttatagattgttttcagattcttgactgtgttctttcttgctttttacaggacgaagctcggctgagagaagtgcttaggcttgcgaatgcttgtggagccatcacaacaacaaagaaaggagctattccagctctccctacagagtctgaagttcagagcctcctgaaaggaaactgatttcacaatgtctggatttttaggacttcaagttttaccttttcttggctttgttttttattttcccctgcttttggctctgtgttcttgtagaaccgttctattctgttatgaatctcgttttattccaattgcaaggttttttgtcgtttgagtaactttgatgaataaaaactctttaccaagttcagtgaacaactgtctgaaatgtaaaaagcctcaaagcacaattgcttgaggataacattcagaaacttgcaaatctaatgatctccaaatgtgtttgcattcttcccaccttgaactcatcctctccagaaatttttcagcccacacttccttgctaccttccatactcagatcatatggcactgaaaaactgagtcgattcacaaaacacacttttacataaacatttttgcttaggcagtaaagttatcatcttggttttgaagttcttataccttgttagctcttctaaatgagagtccttctcggtggtaccattcctaaaatatcttgagttagacacccaagtaataataagatacttgagttacaaatatacaatagcttgcctgcatactagaactttgaataggcggagggatttggtggataggttgtagattgcttcttctatgtgatctgtgccaaatagatacacaactggatagtccagcagccatctgcagatacagatagaacacaatggtatgataaattgaaataactaatggagtaatggtggacgaatcttaaaacgaattgggcaattacccgtttaaggttgggattgtaactttagtgtcttgtaaacaacagctaagatcaatgcataaagaagtctgagaagagttggcctcatcaagtaccgtagtggtatcagtattgctgtcatctaaaggaaatgtcgaagagaatagcttctgaatcgatctaagctgcatccccagattgctttccttgctttgtgttaccatcttgatacaaacaaaggaaaagacaagataaatccaacgtgtattgtaacatgaaaagagaaaccacttaacaaatacaaaagctttataaaaggaacaacctttggaggatcttgttccaagtcaatgaagaacaactcgggttctgaatctaagctggagcttacaaacttgggcaggcttcttacatttatgaggtatatcatatcctctataaccataaccttcagatctttaaaaactggtaaaccctataagaaaaaagcaggaatcaaatcagctacaaatatactcaagtactaatgtgcttgaagaataactagagcctaacctctcggatgagctcaagaagtgacagcaaacgattctgtagctcaggcatctttccaccatagtcaatcatcacaactggtctcattcctgtgcataatgccagaacatctggtccaagaaacccgatttagcatcgtttacagattcaagcatatgacaacaaattgagataatactagaatctagtgttgatatatgaacgctttataatgcacgaaatggctttattctttgggttcttaaacagagcaatcaaagcaccatcaaacttaagaatcaatttttcgttcctcaaggaattgttaagagcatatactcatataaactataacccaaattcccaaattgaatcatgaatatcaaagagtcgcaaaacataagaaaaaagtggaattcatgagacctatttcgagacggcgtttggaattgctcttgagtctccatttgatctgagagaggcaagaactcagaaactgaagtagttcctcagagcttggaacctccatattcgcagaaaaattggagctttcttcttctctgtcgcaataagactcagtgataccctttctctatcggacgttttgttcttagaggaaattacaatatggaccctaaactttctagtttctcataacacaccctaactttaaaataacaccaattatgtcacccacgtgtcaagttttcacgggaggggtgatgacgaagaacaacgtattttcacacgtgcgaacaataggcttcacacgacttttctttcgttatttttttccacattggatctaatcacttttgcaattcaccggaacttagccgacgagcgctgatcaaatcaaccggagaagcaaagctatagatctactatctccttcacagttgctatcaggtctgtgttcgtcttcatttttaccaaatcctgattgttacaattttcttcgttttcttctgtgtttatcttcgttttcttcggtttaaataatgggatatttcttgtcgaaatctggattctatgcgcatgtttagtcacggataatatcggaaacccctggagtatcagcaatgtcgtaatttttctggtttgcttagtgaattc

SEQ ID NO: 1371 - DNA, 100906 bp, Arabidopsis thaliana
gaattcctctcaatctctcagccctaacaacatcaagaagattattgggaagatgcgaaacgccattcaagatctgcaaaaccgcactcatgttcggtctaatcaattcagtgtgatgtgcacacaacagacctagcttcaaaacaagctcaatttctcctctgttttgttcttgacgaatactttcctcagctgcatcgaaaagtttcccactttcccaaagctctaaaatccaatcaacaagaaccgcttcattttctgctgcacgtctctcaatcaatcttctaccacaaacgacttcaagcataaccaacccaaaggcgtaaacatctgtgcttgtggttgctcttcctgttcttaagagctcaggtgcaatataacctaatgttcccgctactctagatgtctgaggatcaaatccctgatcatacagcttcgccaatccgaaatccccgagcctcgcattcatgccgtggtcgagtagaacattagccggttttatatctcgatgaacgatgacttgtacccattcttgatgcaggtgtagtagagcagttgcaacgtctttgatgatcttgaaacgttgttcccaagtaagccgttcttgattttcattcgtgttgctacgggttagacacctgtcaaggcttccattaggcataaagtcataaactaagtagagattctctttatgcttacaatatcccaaaagcctgactagatttggatgtctgagacgaccaatggtcgatatctcggctagaaattcgctcatcccttgtcttgaatcatgagaagtccgttttacagcgatctctgcatcggaacccggaagcattcctttgtagacttgaccaaagcctcctttcccaagaagttgtttctctttgaaaccctttgtggcattgaaaagctccttataagaaaacctatgaggtccattctgaatctcccattcttcaagaacctccttaaccttcttatgcctcacataaaagacaaaacctattccggaagcgactaatgcagtgaacacggccaacgttaagcagaccgctaaaatcctccgtgttctatcatacgacttctttggatatggaggaagggttgggattacgccaaggtcccatgctggatatataactccttcttcataggaaaattgcatcacataatagagtgctccgatcgacccggtcgatgccgtgaaacccaagtacgtctcctccaaaaaatagggcgagagatctcggttcaaagacaagagcgatttttgtggcggaacagagatttcagcaggtaataaagtaacattgagctgtttatcggtgtgactataaacgatggaaagcctcattacctttgtgctgatcaaagaaagctttttgaagtttccatcttcatcatcatagtaaccagcagaagcagaggcaacagatgtcaaaccattaatgttaatcccaacatgattatcatcaatatctccaaactcttcgtcttttcgtatatctaactcgatagctataacgttattcgaggctttaccgttgtttgtctcgttaaagattcccaggtattgatcgggggaagctccgggaaggcctcttgtaggagagaaaacgaaagccataccgtgtgaaccttgctgcttatgttcagggacgatcccgaagatgatgttgaatgagaaagatgagttcttgatgggaacgggagtgttgttgaaagcttgaccgtaggaatgcttcgtggtgtttgttaaaaggcaataaccgtttaaacctgcagctgcagcttcttccatgaggaagttgccattggagttgtgagtagatgaaaacagagtaagcaacagaacgagaactatttgtaagactttatgagacatgttcttgtttgttattttttggcttatgggaaggttatgatcttaatgtaatatttatcatctcataagaattacggtcgaaaataatgggaacccaacgttctttttttctttttatttttgttattcttcgttagtaataaaaaaacatatgtatttaagcacatgagctagatcaagtcgtaaagcaattatagtgggactggtagagcgtgtcgtcaaaagacagaacttttctacgatcttaatactttgaagtattaaattactaataacaacagtgtgaaaagcataattaaaaagcagcaatccaacaaagctatttttccacaaccattttgtagaaaaaacaacgtatgtttaacatttttaatttagtgtagattctaacaaattctctactggtctgaaggcaaaagtgaagttatatgtcactaatttgtcatggtttgatcattatatattgagattaatcctatgtagtgtaacaacatcaaagtagtttagaatgtttttggttatatgtcactgatttggcaattcacgccattttgttttgacgccattgctcttgaaagttcggtttcttaaacaaatccaacaagaaaactttgaaagcagaaaatacaaaacatattatatgttgagtcctaaaaatttaagatataagaacttggggatgaaacggaaggctttactgattcaagataaagaaaccctaatgtagtgattcatcaaatagacgatacaaaagcttgaatgtaactgttcattcaaactaacttctttaacggtttcagcgtccatgggacaagaaagaatttgttaatgtcattgtaccaactgaatacagattaagaccaagtagtacttcgattgatgtttcaggcattcctctcaagttctcagctcttacgacatcaagaagattatctggaagctgcgaaacgccattcaagatctgcataaccgcactcatgttcggtctaatcagttcagtgtgatgtgcacacaacagacctagcttcaaaagaagctcgatttctcccctgttttgttcttgacggatactttcctcagctgcatcgaaaagtttcccactttcccaaagctctaagatccaatccacaagaacttcttcattttccggtgcacgtcgctcaatcattcttctaccacaaacaacttcaagcattaccaacccaaaggcataaacatcagtgcttgtggtcgctcttcctgttcttaggagctcaggtgcgatataaccaaatgttcccgctactctagatgtctgagggtcaagtccctgatcatacagctttgccaatccgaaatccccgatccttgcattcatttcgtggtcgattaggacattagctggtttgatatctctatgaatgatgatttgtacccattcttgatgcaggtgtagtagagcagatgcaacatctttgatgatcttgaaacgttgttcccaagtgagccgttcttgattctcattacggtctagatacttgtcaaggcttccattgggcgtaaagtcataaaccaagtagagattctccttatgcctacaatatcccagaagcctgactagatttggatgcctgagacgaccaatggtcgatatctcggctagaaactcgctcatgccttgtcttgaatcatgagaagtccgttttacagcgatctctgcattggaacccgggagcgttcctttaaagacttgaccaaagcctccttttccaagaagttgtttctccttgaaatcctttgtggcattgagaagctccttataggcaaacctatgaggtccatattgaatctcccattcctcaagaacctccttaaccttcttatgcctcgtatagaagacaaaacagattcccgaggcgacaaacacagcgaacacagcaagcgttaagcagaccgctaaaatcttctttgttctgtcagacgatttcttcggatatggaggaagggttgggactacgatgaactcccatgttggattctcaacttttggagtagcgtacgaactcaacatataatgaaatgctccaatggatccagtcgatgccgtgtagccataatacatctcctccaaaaaatacggggagagatctcgattcaaagacagcagtggtttccgtggcggaacagggatctcagccgggaataaagtaacattgagctgttgatcaggatgactataaacgatagaaagccgcattacctttccgctgatcaaagaaagatttctgaagattccatctttatcatcatagtaaccagcagaagcagaaacaacagatgtcaaaccattgcaacatgattatcatcaatatctccgaactcttggtctttttgtatatctaactcgatagctataacgtggtttgatgatttaccgttggttgtttcattgaataatccgaggtactgatcggaggaagctcctggaaggcctgctgtaggagagataacgaaagacatgccatgtgaaccggactgtgtatgctcaggtactattccaaagaggaagtggaagctgaaagacgaatcttttatgggaatggattcgttgttgaaagtttgaccgcaggaatgcttcttggtgttcgttaaaatggtgtcaccaatggagttgtcagctgcagagccctccagggtccagtttccattggagttgtaagtagatgaagacagagtatagagcagaacaagaactatatgcaagactttgagttcactaggcatgttaggattttttttgtttttgcttatgggaagaaattgatcatatgagatatttttatcatctcattgagagttaagtaagagtataaaagaattccaaactgcaaaagtagggtcgaacaaaatggaaacgaacgttcacatggatttccgcgttgttcatattaaaaatttatgtatttacacacacatggggcctaaaccaagtcgtaaagcaattaagataataatcttccaatcttcattggattcaaagcaattatcgtgggattggtagagcgtgtcctaatcctaatattaaccgctgactctctgagcattagaaaatatatggatcaaaatttcaaaaagacgggatttttctatgatcttaaaactgtgtgaaaactggaaaacatcaaaaagtactttaaaagcaataatcgaacaaagtaagtttcacatccaaagttttgaccacaaaatttgtattaaaaataagtttttgacatgttttagagttagattctgattttatttttttctattggtctacatgaaaaagtaaagttatatcactaacctatcatcgttgatcattatatatgaaaatactcatgaaagttaatattttttaggttaacaagaaaaacaaacaagggatcaatcatcttgttcaattcaatataattaagcattgggatttccaacagaaaatgttgagtaaaacatagactagtgttggatatccaaaatagaactcaaaccacattcactaatgccttattgataaaaataaattgcttagcactcagactgtaattatgggagaaagagctttgcagaagtagaccaagttgctaatgttcatacctcaggctgcattttctccacctcttcccggatagactggaacagcggggtcgatagatatctctccccgaagctcgggaaaacaacctgaaaaaccgcattcatagattcattaacagttacctacttagaagatttaacaatctaactagccaagtgactatattgttgattctttggtttagtattggatcacagactcgggagactttaataatcctcaaatctatcttaagatgaaatctaaagcaatccatctatatgttgcacaaagaccccttgcaccacctttttgttttcaagacataacacataactgaaaccgaaaagacttacagctatgagttttccagcattctcaggtctcttagccaccttgattgcagcagcagctgcagctccagatgatataccaacctgacaagattattacattcacgtaagaatcttgtgtaatttccacctttcacatgcaacatgacaccacaacatccgtgtggttcccactcagaaatcataaatactgcaaagaactaaccatcaagccttccttaagagctagttgctttgcggtttctatagcttcctcacttgaaatctggtaaacgcaaaaagaagatagtaattgatgaagtttgagtctcaggaattggaaaatttaagcaataaattgacacaagaattgtggatgttttgtggaaaccagataaattgtataaccatacagaatccaacaaaataaatcataccgctatgacttcatccataattttctgatccaaattcttaggtataaatccagctccaattccttgaatcttgtgaggtcctgtataaatgcaagagaaagcaaaatacgtgaatataagatcatatttcgaaatcatggaaacaaaattactgattgatatctattggcaagccttacccggtttgccaccagaaagtatatcgctttcggtgggttctacaccaataacctggtacatgtaaacatcgaatagttaactacgaattatattgcttgaatgaacatacaatactgtctaaataacacctgaaaatgtactccagctaagaatgaaaccattgaacttttgcatctacctgcgttttgggatttttctctttaataaatcgaccaacaccagtgatagttccaccagttccaattcctgcaacaaagatatccaccttgccctttgtatcatcccagatctcaggaccagtagtctcgtaatgaatctgcgtatattcaaacttgagtttacaaacgtgacaagagaacctcacagaagatcatgccgatttcaaaggatcagccacttcccaatttgcttgtacagtttaagtgaaaaccacttcagttacacacttgtgggcattctctaaatacagatgagtttctggttaactctaacttaacatttcatttctcttcttatggtacatgactagagcaaaaaccaaatcatgacacaaataaggaaaaatataaaccacaaacctttggatttgcagggttgtcaaactgttggagcatgtatgcatcaggagtgtttttcaagatctcttcagccttctgaaccgctccagtcatgcctttagcaggatctgttaatacaagctcagctccaaatgcctttaaaagaacccttctttccatactcatggatgctggcattgtcaagataagtctatagccccttgaagcagcgatgaatgctaggccaatacccgtgtttccacttgtaggttccacaagaacactctagatcaatgcagtaaggacatgattaaccaccagaaataacagactatagattgtacaactttatgtgtgtaaaagctggtctcatccattaaactttacaaaagactgatcaatctataatcgatacctttccaggtgatataaatcctttttgctcagcatcagtaaccatactgtacccaatcctgaatccgtgaaacataaaagttaggacttgaagggactcaactaaaaacatacaaacaagccacaaaagacttaagctacagacctatccttgacactgcaacatggctccatgatctcgagtttggcagcaatatttgctacacaaccttttgctatactgttcaagtacaccataggagttttcccaatgagctgaatcaagccaagaacaatgagagatacgtaagtaaattctgaactatttaaaaagctaatcaagtttcaaattttaatggacaatcacactttcgccaacattcccattagaggaaagctcaaaaatttgatcaccaatttcaatttcaaatctaacctgagacacattgtcagcgatgttgagtccatcaggtccagtctcgcgcttaacagcctcacacacaacagacggatctcgttccgaaccatcagcaaaactccgactctgcctcttcatcgctagagagaaatcagaagcggaggagaaggagagagaagagatctctggcgagcatctgaaacgacggagagtagaagaagaagaagaagaagtcaacggattaagaagtaaagcagaggaagatgtggcggccatggatgtgtagcagcttcggtttcccaaaagtgtagacaagatttgagatgcgagcttagcttcccggttaaaccttgaagccatgatcatcgccaccatgatcctacttttctattttcttggaatacgacgtcgattggattttcagatacggtccatttttagaccaagctttcaactttatattaagtttcatttttatattttatacattttttttttaatcaccaaccaagtgaagtgcactgaccaaaagcgaacgtggagaatgtgttcttattcgtaccttcatacctctcaagtgttgcatgaatctttctggttaacttttttttttttaatgtcaaattcatcgtcttggatccgttgccgttagatattcttgttcttgaatttgacattgtttggttttggtttggtcaacaaggaaatagtcagtaacaaaggaaccaaaagcttctgagaaaatgtaacttgaaaagattcttcttcttaaatttgacattatttggttttggtttgttcgataaggaatcagctcatcttaagcccgtataactgagtcaaacaatggtaggcggtagcaattagccaattagggttgtcttaatccgagctacataaactctaacaaaagcgttccaacactcaaaaaaaaaaaatgtaaaacacctgaacaaacacattcaccgttaaatttgcacaaagacaaaaatgggccttagagccgacactaaaaaggccgttaagcaatgaatagccacattaatcgttccacgcgcattattctcacggaaatatgccgttgttgtacctttttttttttctttctcgatattttcgtccattagtaagtatcttctaagacttctacatcaatagaacattaaattatgatcaattactattttattgggtaacgagtaaccacatcaatagaatctgatttcttaaccattcgaagtacaaactgtaaaagtctgagaaaattggttgtttttcgtttgtagttatgcaattttaagtaatgtctgtaaaatacaaaaattttgttatacaattttgatatatatattatgtaagagtttcatgaaatttatgcgtcaaattcacttaaaaaactatataccaaaagtcttaccattttacatttactctatatattcaataaaaatataatttaaaaggtatagagacaaaaacaacacagagaattcacttgcaaacaacaagtgcttaaactttatttttattgataataaactctttaacaagtattatctcggaacttacttgacatattctacctgaatgaacaaccccgactaaggagaattaagtttaatgaacaacccctgaatgaacaaccccgacattttctacctgaatgaataattaagcctaattgtcctctatttcttatcagccgcccgtgaagacaaaaagaactaacactaagaacaattaagaataattaagcctaattattcaactcgactaagaacaaccccgactaatgctttgaagtttacaaattgtacaatgcttaaagcctctagaagcctaaaccctaagatctccaagggtctttgatatccaacaacttcctgaaatccaacacgtcggcatcagctggttgaaatttgcaacttcataattcatgaatgcattttactcatattgtttttaatcacatttttgctctagaatacttattacccgagaacgcatttcgtttatttttcgactattcaatatgatttgacgaaactaaaaagtgatataatgtttgagtattcgactgtttttggctaaactaaaatgtggtttacaaacgattgattagagatatttaggttcgtatctcaactaagtgttgcgactaggtgctaacttgtttgagtgtgcacagtcttttgtaactaagttcgttacaggtgttccgactaatgtgtttatctcttctaaaagtgttgctatttagtatgatttcaactaaaagtgggctattttttttttttttttttggtctataatgtactttttagactgaatttgataaactacttcgactaagtaatttaactaaagcaacaattcctacgtgttgttgctaaataacgtggttcgactaatacttagagtaatacaacgactagagttgctaaaatttaattcaacttaaaatgcgctacgtttttcttactaggtgcttcgactaaattagactaagtgtttcggctgggatttcattaaagtgtttattttttacctttaaagtgacgtttggctacatgtgttttttacaagcaagtttttttttttttaatattcaaacaaatgtcattatcaatctatcatacactttaaaaaaattatcaaaaaaaaaaaaagaaggcattgaaaaaaactaacctttgagaagatcgcaattcatgtgtgaggctggaacttgctctaagtagtcatatccgtggaccgtagttgttgggcttgaagcaagctttttctgaagtcatcttcccatacaaaaaaacaaaagaatcttattactaaatttttggattaataataaatattacatcatcaaagaataatcaattcaacttcgaaatccaaatgttcatcagtcccttttttataacaagtgtagcagagatattaaaatcaaagtcaacaagtatagcaaagtcaaacagagcatagcaaagtcaaacatagcaaaattcccaaaacaggaggaagtaatccgtgtaaataaaacctaaaaatgcagctagaaagctaaaacacagagaaaaaagccatgttcagatatggacacaatcgtgattttaaaagcctgatttatttttgaattaaagagagaggacaaacaaacagtgaggaaagctgaaagaagaaataaattaaaaaaggcatccgttttgcagtcacatgtgtaaaaaagactgaaaataatcagaaaagatcaaataaagaattaaagcgactcaccaacgattggatgaagacactttggactcttcttgtagataacgacacttcggattttattgtagaagacgacaggagaggaattttacatttctagaacattagattactaaattgtactaaacgctcgtgtgtgtgtgtgtttatatatagacaagttttctcgcccgttgggaaaagcatcaacggctactttgtcatgtctgaatataagtcagccatgacgtcataagttaccgttctgtatcttcaacggctaactcacactgaaccaacaagacacgtgtaaagtcgtatacttactgttgggctttctccatatcggcccaacccattcaaattggtcaataattatgaatctttttgcgcttatcatttattttattaacaataacggggttaaggcttaaccccatttgaaaatgtttacatcttaactagtctcaccataattatgattacactcttacttaagacaaatgttcatcatacattatacatctttaaacatgtattttggattttaaaactctatgattttaatgattatgtatagtattattcgcttatggtttatagattattaacaaatataattatgcaataatttttttttgaatatattttctgacctagccactgttatatattgtggccaatttctggtacattttattttttgtaaagtcattttgtggttatatgtggctaagacaaaaaatgtttttggagcaattagacttagacacacggatatgtggtgtccttttgatggctatattgatggctagctacaagaattgtggtaattaacaactttacgtacaccaaacgttaagaacatcaaaatcactccatctagtataacatattttttaatctttgccgtgcaaatacaaattacacggtgattaatacttccaccaccaaacaaacacagcacactaatttttagaggaaaggaataaagcaaaaacaaaatctctgaccacaaagtgtgtggatcgaaccaagctacggccagtgaaagtgtaaaatcagacacttgaaaggctagtccatttgcctacttcgtaaggatccgcatagtaatatagcttgatcctgtttgctaaagacagtcctgcagcaaaaggagaagcccggctgctcaaatcaacagcctctgcgggctcatctgtaaaagctgctacatctcctagcagtttaaacgatactctctgtgcttgtatctgtttagggaagtcaaaatacaactttgttccatctctcgcctcaggcaatctgtattccgcgattgtcaccattttgtattgctcctgtagattaacatttttcagatcaacatgaaaaagttattacaacattttggtttctgaggatatataataaaccgggaggaggagagatagatacctgtagaacagatacttgtatatacaagatggccggagagacgtgtctatcttccattatgacactcgtcgggtcccaaatgtcaactacatctgaagaaggcgagtgggttacacgaggctttatcgcactaaaagcatctaaacggaatccagcagctaaaggtgaagcaggttgcagataaagttccaagactagatcattctccattggtctctcagtctctaatggtatctggaaggtgaaaaaaacaaatattagtgacaataaacgaaataccacagaaaaaggtgaaaaggaacgagcagttctctaaggcactaaccaggaatctattcaaacgtggggctctgtccagccagtttcttacgctcatgctctcaacactttgtagcgttttatccctcacggtgtttccagtgaccaagatgtgttttgcatgaatacatggatcattctcaatggttgctccaaaagaggcacgtcgaggaattggagcaaatgggttctcatccaaagataagagattgatgtttttgtccaaactaactgagctactagatccaagcctaggaagacgcagtgttatccatataatgcggcaacggacaggattcttgaaagcaaattttatatgcctaggtgctctaccagacttttctgaaccagaaagctcaggcgaagatctaataaaggactgtacatcccactttcccatcaaagtccgtgcttccttgtttatgtcgctgctcgcccaaatttggacctgcaatgaagatacataaaatgttgaaatgagtggcagcattatcacgtaagtaatggcatgggttaacaagaattcaactgaagatagaaaagtcaaacttacggtaggagcatcagcatcagagtaaccacatggactaacgagtagaatcacactgctgacatctgaaagggtgttgagaacaatggcggcttcaacagagtctgcagacggaggagctttccagtaggcattacttgaagcaagattcagaggggtgagcaatgagaaaaatggtgctgaatcagtcgcagtttcgacctaaattgcattatgcaaacatccaaaagagagaaaggaggattaggtattacataacagctctttccaaagacaatgaagtgatcatagtaattttaaaacacataagaagcatattaccttatgtaagaagcttgcaaatgggaactcagaaagcgactcctctttacccaaaatttgacgaaggaaattgaagtcttctcgattaggagaaggttgacctctaacagcaaggtgatttgtaatgttagatccaaatacctcattcaaagcttcccgaccagcattatcaacacggccacttcttcgcaagctgaccatgacccttacataatctacaatcagggcttcaagcactatcgagctgcagcattttttacaaatgtaatgatctgaacctatcgaagtagcagagacatctgcaagacttccacctccattcgcagtgtccctggagtaggattttgaaagcagaagagctccttttccagcacaacaaaacttgcaagcttttttcatacattggaagcacaagaacactgagcccgactctcctcttgaactcttggtagaagatccaactggacttttattgacctcggctcggacttgacacattccgccatcacaaccctcaccaattctggttatgttccagaaatctatcacattattttccagcttctctagaccaatagaagctataattttatcttcaagagaagcctggcccataactgcaagtgcatttgctattttgcataatcttccaatatataactcgtcgtatgaagagtttggattaatggtagctggatcaattccaatcgataacagtgccctatctctttctgctgcagaaatattgagacgtagacgttcaatttcaagcttcatagcttctacaaactcaagcttctttgcctgtattatgccagacatgcagaaattaaatttaccatagaaaatggaattttacgaagaaagataacatatgagaagaatagttaaaccaatgaaagattcatacaatcagaactacagtttgtggcaactggaaagacgtaattgcatctcaccatgtttggacccgcaagggactttaggcaatttaagtacagatgagcaccactgtccttgggccttttattttgtgggacagacccgtcaggaacagtgtcagagccgcgatattcaacaactgcttcgtctaagaaatcaagcatgtcattgcctccacttgcaatacattccaccactggttgtgggaaggggtcagaagaagagtcctctcctgtcaaaaggtcaagcagattactgggaaagggatccttctgttgtactggtgtggaaacagtttcagcctgtaaagatgttgttgcagcaaacggattcaagtcagaacaagatgaaaaaggacttccatcttcatctggtttccttgcaagttcagctaatcttcctccagtacgttcacaagtaaacattcctttccatggaagagaaattccaaggacttctatctgcggcatagacacaatgcagaaaaagtgtttgttttttcttcttttgatgatagctaatcataaactttaacgagttcagagcatgatgaagctaatagatattcatcaattcatagtttggaaactagtaagtacctgaccaagagtcataggaattctaacagcaccagctggataaaatgtaacagcaactacacgggttaagaaatccaactgtccttctagttcttcaaaatcatatagcagtgaaagacttgacgtatctttttcatgaagacgtgcaccagctccagtaacagccatatcctcagaactaattggccctggtaagggtaccagaagatttgtaccatttgcacagcgtggtattgaagcaccctgtccagaaaacataattacaggtaatcggtaatccagttgaactaacttgcatgtaagtctacagatctcctacaaacaataaaacagaagggacaagacctaaaagagagtcaacctcaacaactaatttaaggtcctctatgtggcgtccagttctcacgtccacagtggatggacatgtcaaatcatccgcaccgtgtgatatggtcagtagaagttgacatacatggcaaggctcactgagatagataaataattcaacaatatctgcagcttgtggacatagctgcaaaagtaacaaaaagcatggaatttttttagctcaagtattcaagtaatgagaactaagaggtaatcttatatctaagttgaggtacccaagttatgtccttcctcttgatactcagcagactggacccatcattggaactttcggacatgttaggtacaggtttcagaaagaaaccagatggtcgagaaagtacctgacatgaatatttttgcagtgagaagtagacagagaatatagaaagcaacaaatagtagagtctacaaatcaacgaatctgttatgctcttaggaattatatatctacacacaataaacaaagtgtatcggtccaatatgaaacaaaatctacatacacgcaaaaaaacgtgattcatactttagagcagttaatatacatggaaaaaaggagagctgagagctgggaattttttactggaatcgtgtcaatgtgcttacatgtaaaggctggacaggaattgatggaagatgcttgaaaagcctcattcccagaaacatctcgagctgtttttgccgtgaactatcaaccatagcatttttatatcttctctgtagtgtaatcttcatgtttttctgtgctgcagaaaactgtttaaatgctcctgattcttcactgaagatgttgagaatttggctgtgcatagctttcgagccagtatagagggttgcatggatatcaccttgttgcagaaaaagatcggcaagttctgacacaggagataagatagttgatctcttaaattcctcaaacctcatgtcaagtctcttccatggtttatcaggacatggatgactccatgttgttgtctttgtattgtgatctatataatatgattttccagttacggcatcagctcttttttcccatcccggtggaaggggagcgttatatcccccctgattattaacagaattatgaccatatccaagatcagtatcaagtgatattcccagccttctacattgctctacaaacacttgaagaccaccaaagaaactagccgcatttgttcgatccaaggaatcagcgcagttaaaacgtatcaccccattttgatgtgatctcaaacagaaggcaccttcaatgtcatcaatacagattacctcacctctgcaatctttcagtctttgacgtgaaggcaaatagtcaccttcagaaattcctattgccatagtgggagattttagatacatccacaatccttcaatagtttgctgttccccttttagtttcacgctggcatgccaatcataatttatcaggtgaacacgagtataaggaagctttccactggatttgataaagttcatcgattcttcaaaatgttgtactaagatacattctgatttcccttctccacttcttagtaaattaacgcacacaataggaacaaaagcctttttcttctggttttctccaacaggtgcatctagattcctagtatcatatcgcttgcttaacctttggtaatactctgtactgcctttataaggatccctatctgccacataaatttctgcttctgccgcagtcatctttaattctgcaccccaccatattggtatggtgccacgtcgccaaatgtacgagttgaaagcaatgctttgaccatttcttttaggtatccatacaagctgctcacactcaacttcgttacctgcactacacatatacttctaaattaggccctagtcaatccagagccacactttttaagagaacaacaaagaaattaagagagaggagcattttaggggggcatgtcacctgtgccagaacatgaattaatgcccctagctaggtaacgagtccctggatgcagtctgctacgacgggccattagagcaacaatcccttctagctggcctgagctcccaaaaggtcgatattctgcaaacccctataattaacatcaaataagaagatgatgtcatatcaatttatatgcttttgaatcttcacacaaaaccgaaatcggataggtagatcaaccttcatcaattcattaatggaggacgaacctgcagaagaatgacacagtgttcaggtagcccaatattcttaaaaggcacggacaaccatctattccaaacaaattcatcatcagggctttgaagtggcatacggcttgggaagggccgagtgatgtctctagtatcacagaaatagtgcttcccgtcgatgtcaagctcagtcaactcctgaatattcttggtttcacctttcccttgaggctgtggattgtagagtggtattttgacccattgactctcagccactgtatatacacatccaccaccaggcaaatctggaatacttggatttagcctggtcgcaactaaaagcatcccaaagctccccaagacagcataaccgagtattgccctggcataaacagagcttctaacacctcctcttgatccattcgtaatataatctaaggcttcacgctctgacttaaaattatcaaggccaggcttcccattgtaccgcaggataccagtcgtaggatcgatatagataacttgagtatcagccttagataacaaacttgcaatgacatagacttcaccagtgtctaaggtgacaacaactacagatgtcttttttgaaccacctacaccaagaagataagaaaattagccaaccaaatgatgaaaacagctagagtgaaaaaaaaaaacacttgaatcttcaaaaagaaactaacctggtggatgcagatccatctgagctcaggaccaagcggaccaggtgccctctttgacagcttcagggaccaagatatcaatgtggaaccaaaaatctagcaaaaagtcaacgaaataaggaacttccatcagagaaataaaaagcaatggaatccaaaaaatgtagcatagttagttctatacttaaaacgattcatcaacgccaattaaaatcaaaacagagagatcatcttcctaacaataatctccgatataactgagacaaaagatcagaattttctcacaaatttcgatagaagtaataaaaaaaacgagtaccagagatctgagactttttccgagaatagcaaaattaaagacgcaaatcgataattcaaattccgagaaagcagaaagataaattcttcagagaacccgaatcgaatcataagtcataagagaaggaactcaccttgaagttgtagagatgatcagatgcaaaatttaccaagtcgttcgtagacgaacaaacgaagaggaagaagagtaaatctgctgttacccaacacacagtacaaaaacaatcatagtacgacacgtgtgaatctgtttaattgatttatgaaaaaagagaagaaattattgataacttgaaaattggtccaattagttttaaaatgtaacgaatagacccaatcaaaagaaaagacaaaataaagtatagagatgatgaattaacggctttggacaagccacacgattcgctttgcttatcttgctccacccaatccaaattgagacacaatctctatcgaatccacgcgcctctatcttttttcaatcgagtcgccattaacatatttcatcaagctcagtccactcttctcatgaaacttcatcatcatcgaccttgaccctgataggttattaaagttactgcatttgatctctctttgaactgcttctgttgttcaaggttccaaacatgctcagactcagtaattgaataatgggtattcttgttgcaggtttcagacgacacccattattgtaaatctgctgctggagtcttttttgtctgaatcttcttcttgttgagacactgtttcttcttggtctgtgatttttgttttgttctcattaggacgttctttattccggttcagatttactggatcgtcattttctctttgaaattgtatttttttgttccttttctggtatgttgtgaaagctatgagattgctgtaagaatccaagactgaccaacatgtttcccctgtgctcggccacaagctgccgttaccattctcaggttagattttctttatagaagtgaaagtaaataagctaactggtagcaaatttattgaagtcatccaatttgagctatgggtgttacgctttgttagtgctttgggtttttggattcattttcatagataagtaagtacctcataacgggtttgtttctgcagattttatttcctggcaattggcgaggctgttcttccttcaggagagagttgattcacagatacagttcaggtgacaatgccttctttggtatctctaatggaacacgcctgcagaagagtttcgtacctcaagccactgggagtttcttgaccggtactatcgaaaaaacagaacaaccagtatcaacattcggaagtttgtgccagaatgagttggacagaataaactacatggtttataacatgagtgaagcttttgtagcgagtgatgagggactgacatatgtagaaaatggagaagatgtgttccctgttgaagctgttgcagcagatgtttctcctgttgaagctgttgtaccagatgtttcccccattgaatgcctttctgctgagactttaaccgataagaccagtagccttatagactctgttgaatcgggaaccaatgcgactgttaaaatatctccggatagttcagtctcacttcctgatgcgaaagctagctttgatgacttttcttctgggctcaagcagtccttcagctcttcacttcctgatgcgaaagctagcgttgatgacttttcttctggggtcaaggagtccttcagctcttcacttaaccaaggagaaaatgctgtaaagaacactttggagtccttctcctcgtctgtgacatccattacaaagaatgcttctgaagttgtagatagtgcagttaacagagcgttttctacgctagaccaaacgggagatgtagctggagacaagttttcgagtttttctactggcttgaaggaagcttcaaacagagcagctgttattgccattgatctgctgaggcaatcagttagtcttggagagagatctgtaacaaatggagtttcttttgttgtgtactcttatggatcagcaaaagaattacttcctccagatgtaaagagtgcccttaactcgtcagaagatgttgctctaaaagtattgagtcccgtgggagctgtattgcagcaggtgctttgtcttatatactgaaggttcattcatattttcgtagaagaaaattaattctttatggactacagttgctaacagtatcatgatgaacaggtatctgttgccattggaggtttggagagaaatatcggtttggatccagatgacccaatccttcacctttttctcttcgtaggcaccacaggaaccttttggtacacggcttttcttaccctagaaggatattaaacttgcttttcttgagaggacaatgtagtatagaagaatttatattttccaccagatatttgcagggttctatatcgggtttggacatatggtggatatgctggagatttgtctcccaagtcaactctggaccttttaaaatcaagagacaagtcagtgctcatagatgtcaggcctgaagtaagacgctcttaagtttctaacaagttcccatttcatgatatataacttttcaaaacccaccacaatttgattatttctttcacataatgttcatcaaggagtttgggttgaaataaaaatgctcattttggctactgtctttttgaaggccttgagagagaaagatggaatacctgatctgcggagatcagctcgatttcgatattctagcgtgacactgcctgaggttggttttagcatcctcattgttgttgaccacagcgaatatagaaactctacacatgtaatctatgaacacaacgaggtttcagcaatcagtgcaacagaagtaggatatcagacttttctttattcacattttttatgggttcttgttcttgattcatgtttaaggttgacggtgatgtcaaacggctactgaaaggtggaagtgaagtagatgatatcttgacagcagtaatcatcaagaacttgaaaatagttcaggtgtgctaccttcatgcttcttttgtaacttactatggttttgtggctcgagctgtttcagtttctaagtatgctgacatctcataattttgcttactctcccactaataggacaggtccaaggttgttgttatggatgctgatggaactcgttcaaagggtattgcaagagccctgagaaaagttgggattaaggcaagtcattcaggcataattcactttgaacacaataagttacctttaaacattttcgaataagctcttctttggttgcctatgatgtgacagaggccatacttgatgcaaggtgggtatagatcatgggtacaggaaggtcttcgtgtgaaagagccaaaacctgagacaacacttaccatcctcaacgaggtaataccatatgaatacaaatatgtttggactgtttcttcagctagatgaaattgaaactgctctcaaatcttttcatcagtaagttaaacatatcttaaatgcttttcaggaagctgaggcgatttttgaggacataaatccctctccattgcaactatttggagttggtgtggtatgcttctagttctatttttctatttccgtttaataataatcccatcctgactaatataagaagatatatgcagggttttttcgcagcattgtatgctttgtctggtgcgtttaattctttctcatttcccctttagaatatctcatattctccacaacacacaagctcctcacatccacgttttgcactaacatgattgctctatctctcgcagagtgggagaaaacactgcaactcatagctgtcatcggccttagtctggtatatactagcctttccagtttctaagttttgtcaaattatagttgctttgttttgtttttcaagtttcaaacattatgcagactatatacctacgactttcttcatatgatgactccgaagacttcaaacaagacgtcaggtataaaagcgccatcattagaccctttttccatagcaaaaactcagcgaaacctctgttctgtcttaacaaagattgtttcatcttcttcttcaaggctgttgcttgcacctgtgaaactcggagctcaggctttctcgtgggctgcaggaaaactagaaacaaatggtgttggcctcccaacttcgccttcttcttcagatgttcgaagccgggttttgcaagctgctgctaagcatgaatcgaaaccctctgatgaaacttctgaaagtctccaagatgcatcatcgtcaccagaagaagctttgaacaacgttgatgtctccgaagcgtaaagactctgaaaattgttttctatttttcttataattgccaagaattacttttgttcgtctcttggaaccgttaacatcggcaacagaaaaagtgtaataaaaaaaaactgttttcttttcgttcggatgctgagatttgttttgcaaatttagaactagctaaattgggtcaaaagttataggttacacgtaaaattattacagcaatttctcccctaataactttgggctttaggcccaataacagaaggccttaaagtggcatacttagggtttagtgaaaaagcaatcgtcatccttgactcaggggtcaggtcaaatccaggagaagaagaggtaatcattctacacagatagaaacatttattttttgtttaatcaaaagctaacattttgttgtgacagttctcgtgttttcttaatatagatggcaagactgataatcgtgccagaatccgtcttattaatcaagacaagaacaaatacaacactccaaagtatcggtttgttgttagatttgtatccttttaattagttcatcacattcccagttgttagtggtgtctgtttacattcttcctatcgagttttgtttggccttgaatgtgaggaaagctaacttgattgaccgtattcgtacacttcactcagctgctgaagccatatcaatgaagttgacgacgagtgaaaacgtttcttctctttaaaaaactgtatttccatctagttttgatcttactttcgtggctttgaatttttacttttcatatagcatcgttatattactctttacctaatttccctactgtacttgtgaattttcccgtcgacgtatgtgcaagttactaattttatgcaagttgtgaatttgcaagcgttttaatttctaaacgaaagaatactaatcagaaacttagaaaatttgacaagattaactaaacattgtatatgtctatcgaccactactacattatttcaatgtgtaagcatattttttatcatttaaaatgaaaaacagaatggacaatgataaatcaacgaacgacattagcagaagtgtgtggtgtttctatttatcagcacaaatagaaaacaatgataaaatacagaagtggtgatgcagtggatttatcatttgattgctggactgtcatttttgttattaaatcttatgaactttatttttttcttataaatatattatatataacacatttaactaaattagatctcataaatttgttgtagattttttttttttttttgctattcccagcaatctacttaaaaacgaatcccatcatcacccaaacatgctaagtgtagcagaagggataatattttgtaggtaaggaaacaaatattttattaacctgtaaataaaaaatgaaaaccaattatacacatatttaaaaactaccaaacttagtatagtattattttttttaaaaaaaattataataacaaaataataataataataaatggtaagacttattttgaattatgtttattaataatatttttgaggtttctttgtaagtgatggtgattacatagaaacttcatatcaaatatctatatattttaaaatttcaagtaaattgatttttcaaaaaatattattctatactaaatttaaagtatatgaaaatacagaaaattgtttacaaaaatgaacacaaattaggaaatgaatatgaagagtatgtatccaaattgtattgccatgtttgcatttaatttaagagggtgtatgaaaagcaaaaaatcttcttctaacaacttacctaaaatcatctcacttatacacttccataaattaattagtttttttgtattcattagctggaaatatattaagattatttagtttttttttttccatatggaaaaggaaattcacagcagaattcctataagttaaaaaaacttaccttaaaactatcaaaatatatcaaaactcatatctcctgggtcctcctggacctggacttaaacatccatacttacacatatccactctatataagtttagttcactaccactaaacccaaccaaagcaaaaacatcacttctctcaacagaatagtttgaggttgtgtgagacaaaaagaaaaccatggagccaactaacgatgctgagacattggaaactcaaggagaggttacaaccgctatttggccgtcatctcaaatcctcaagacgactatcgatattccggggactctcagccatgacggcagatacatccagtacaatctatttgggcatatctttgaactccccgcaaagtataagccaccgattaggcctattggcagaggtgcttgtggcatcgtttggtaatatccttttaacagaattaatagtttcatttcttttcctaatcattttgagcactttagaatgtagatgccatgaccatttttgtgtgtaatttatggtttgggttgataagtttcatctttttatgagaaaagttcaaatcgtttctatcatagagatctctaaacagttattataccattcatgacttttatgttattcttgttacttttaaaatttcctcacttgacacattagtttttacttttctttttaactttttttacagttcggctgtggactccgagaccaatgagaaggtagcaataaagaaaataacgcaagtatttgataacactatcgaagcaaagagaactcttcgtgaaatcaagcttcttcgtcacttcgatcatgagaatgttcgtttgattttataactattgtctcaccttttttcttttattttgttattcattaaaagctaactatgtaatatcatttttctatagattgttgcaatcagagacgtaatcttgcctcctcagagagattcattcgaagatgtttacattgtgaatgaattgatggagtttgacctttatcgaaccttaaaatcagatcaagaactaaccaaagatcatggcatggtgtgtgtttagagttattgtttcttgaaacttaaaaatcattttgattagtgagcttgacacaatcttcaaatttttggcagtatttcatgtaccaaatcctgcgcggattaaagtacattcattcagccaatgtgctacacagagatctaaaaccaagcaatctcctcttgagtacacaatgtgacttaaagatttgtgatttcgggctcgctcgtgcaactcctgagagtaatttaatgactgagtatgttgtcacaagatggtaccgtgcacctgagcttctgttgggctcttctgactataccgcagcaatagatgtttggtctgttggctgtattttcatggaaataatgaaccgtgaaccgctcttcccggggaaagatcaagttaatcagcttcgtttgcttctggaggtagtaaagtaaaaccctttgttgtgccaagatcatattcgttttttgtgattcatgattagcttaaaaagtcttgggacattgttttgcagctcattggcactccatctgaagaagagcttggatcgttgagtgaatacgctaagcgatacataaggcagcttcctacgcttcctcgccaatctttcactgagaaattcccgaacgtgcctcccttagcaatagacttggtggagaagatgctaacatttgatcctaaacagagaatctcaggtcagtttctgtctccatatagcctcttctgcagttttatttggattcttatcatcagttttgccactttgcagttaaagaagcacttgctcatccataccttagctcgtttcacgacattaccgatgaaccagagtgctcagagcccttcaatttcgatttagatgaacatccattctctgaggagcagtttagagagttaatctactgtgaagccctagctttcaaccctgaaaccagcaatgattgaaaaggaccatatctttgatccttgttctgtttttttcttttccttctctgcttttctttgaataatttcccttttcatttcctttaattttttcatctctcagaaattttgttgtgctaagattttctgctagattcccttttgatgttgtcaaatttcatttttaagcaaataaactgaaaaaccatgattctgtgggcatcattgcgactttcaatccaacaaatattaatacatgagctattgtcaaaaatataacattgcaacaaggaagaaagcaatcatatcctactttgagtattttgattgaagacaatcttactctttgtaatagttcatttgcagttttgcttttgtcaattcttcaaattgccaaagaatctagagagtggtacagggccatcggtttcgtgtttacttttgctagagtgtttgtctctgctggacttgtgcttcttctccttctttgatcttttcgaacttgatcttgatcttctagattcatcttcatcactgctagatgacgactctgaggacgaataatgctgcaaattcataacacaaccgatcatggttcatgttagcataagctagaaaacctcacactatctgatataagctaaacttttagaaggcacctttctctttttgcttttcttcttctttgaatctctgtctttcttatctgcgaggtcattgaaccattggcgaccagttaataacgtcctcagaaagaaggtttagatgtcatgttaagttaagtggattatgtttaccttttcgtgacttatcactagaatagttccttcctttggagagtttcaacgacctttctgcatccagctgagctctatactcacgcatcagtttatcggtatctgcttcaagttctccctttttcaattcttcttcctacacatgttacacgaaagaaagatataatgttaaacatttcctaatgttccatactcacaatacagagagactgctgcaagtagtagtaaaaaactgatattgcagataataaaaatgtttaaaaaatgagcatgactagagttacttgaaaaccgcgagatagggatagatgtaatgtagaaggaagacacactcatttttatataaacacacaaagactgcgtatctgtggctgaagatgataaacagcagaggaaaagaaaatgatatgttggaataaagcttctaaattgacgacaataatagcaatcttatgaacactaaatcatcaatggtcaattgattatcttctatggcattataacaaggaacaccgttccatacaacatacagaagaacttaagtattaaaaaggcaaaaagattaccttttgcttctgcttatactcttcccaggtaatagtatgtgtagtcttgaggctagccaaacgagccgcatgccactctggtgtatgaaatgaaccatccacctgagacaatcctcatcagaaatgttccggtaccaatgcaaaatatcaaagtttgactaatccaaatgcttctttgtgttcacagcttacaacaacaataaaaagactcttgaatcactgtaacacaaactctgatgctacacttttacgaaatcacatttaaacatggacttgatatcgtctacaagacctagcaggtattagatacaagttcttcccccaaaattgggactcataaaggatctcttgtaggcttaattctaaatgcagctcgataacccaacaacacaaaagatcaacaaaaccataagtaaatcaaccaaattggaattttgtttggagaagtaaaaaaaaacagaatcaatttgcaatgaagaagatgagagtatgaaaaggtacaaaccattccgtcttcaacctcatccggctgggcggagctggaaccaaccctagatctctgcatagccttgtaagcttgattcttccccatagctaatagaagatttaccccacaagaaacagtccgcaaattccttgcaggagaaagagaatttagagagattgagaggaattgtttgtaaaatctagggtttgggggattaacggtccaaagggagaggatttagggatctgtagagaaagcaaacgagagagagacgagaacagaagaaactgtgaggtcgaaccgaaacgcactggagatttaatttcaccctccaaagtaaaataataaaatctataaggactaatgttcaattattattagttttaatatgaaaactcgatcgaatcgaaataacaataatcatatagtatatagttttggaaataaataataaaagcccttaggaccgattcgttatttcttcgctctctctttctctctgtgtctcgtactcgagtaggtctcaggtaaggagttcttctttcagttcctttaatccttgttaaagtttcgatttctctttacattttcaatcgaattcgcttctattgggttgaaggtttaggtttttaggtttcggagtctttttgtgattcgagagattgactctgaatggtttttaccttttgagtttttgtagttcgaagagcgaccaaactgatttcagatctcaattgtttctgcagttacgtaaaggatcgagcttaaaagatgagtggagttgaagagaaagtttctggaacgacaaagacacctgcagatttcctcaaatccatccgtgggagacccgttgttgtcaagctcaattctggtgttgattatcgaggtgcctctctctctcgttagatgttcttatgtgttttgcaagttctctatctctgctgcactttaggttagaagctttgacttaggactagttcttttgtctatgttaagggaattaaagagttgcttgtattaagcccacttaagtaacttaattatcatgttatgtcttcagcttttaaatgattcttttaaagtcaatatgtgaagcttttcttacattttctaaggtttccttgtgaacattgttcaatggttttcttaagaacatgttcctttctgcctgcaataaggttacaatagttgactgagatatttgaatatttaagtcagtttctctcattatcaaggctacttatatcattcttgttgacttctttcctttcgtgcccgagtcagttttgtctatgttctgttcaagcttaatgttgagttcttgatcaagtttttattactcttttcacaggcactcttacttgtcttgatggatatatgaacatagcaatggagcagacggaggagtatgtaaacgggcagctcaagaacaaatatggtgacgcctttatccgtggaaacaacggtaactaaaatctctcacactcatccttctctcaatcttcttctttgtatatctttctttttaagtgtggtttctttggatgcagttctttacatcagtacagtaaacatgactgtagcagacggagcctaggcccatcatgatcatcaacaacaacaacagtggtcatgttatggctgccatttttgttgtcttcttctacctcatattaaaagagtagtagacatgtaccaagattgtcatcctatgttcttcagtagatttttgggatacagacatcacttttttcttagtaatatgatactcttccatgtgaccccagataaagaagaaaaattattaatttatggcttgatacaatcatacaagcaaacaaaattgagtttgggtgaccaacagatcgaaacgaggaagatcattaaagtttagtaatcgaattatgtcatttagggatcactggaaacacacatgtcaaactagtataaccagtcaatcatcagattatcatattcatagccatcgacacatttgaatcaggagtttccattgaaataaaacgctcaagatatcattcttggcgtaatgttatttttaatcttcaacctcttttcacattactagcaaaaggtctcgtattcttagccgcttgtatatgtaagtagcctgcttatgtctaagcagcaaaacatgaagtagagcttctctcaataaaactctcttcactagtattaaaaagtctatgtgtgtcttaaaatcatagtattatttccttcagcttgattcttcttccgttgcattttcttctggcttgcttcccaatctccccaaccttacaatgtcttccaccataattcttccctctgttgaataacagatttataaaaaagatcaacttcagggagataagagctcaagaaggagaggatcgctctgttctttacctttatctttggagagactactgattagttgttgaaggccgtcgttagcgagtgtgtctttcaggtacattgcagcagccgcaacttcatcaggtgtgacttttccatctcgatctctgtgttcattcagatgtgatcactttagattctaagtctcggaaacagaacactcaaacagaaaaatggagtctatatacctgtcaagaagctgccagcctttgccaattttgatatccacatcatcaatttccttctctaggttttgtatcagaccatcaaccttaaaaagtatgaccgaagagtaagcctcttaaacaaatctcatgggactttaatagtcttaaaaaccgatttaaaatcttcttaccttctccattagtgcagaggaaacctcgtctgcttcagcaacttcatcagcttggtcaatatctactctagctgctttgtatgccttcattgcagctttttcaccatctacatcttctctctcgaccattgtgttatagaactccacctggagaaacagaaaaacaaagtctttcaatctacgacacaaagtgctgatcaagcattggtggacagcgtacctctttcttgaccaatctcaggaattcttcgcgctctctacacaccgactgtttatatcaaaagcaaacagagtatcaaataaatatccaataaactgctctgcatacccattgttgataaccatagactcatttttcttacagaagcggaagccaaaacgcccaaggcgcggctaagtttgcaaagatcatcttgttgttcaagaactctagctctggcctgttcttgtgcttcgctggctgttggtatggtcatctcttgcagtgccttatcctcgtcaccacctttaacatccttaatccttgtaagctcttcttcttctttctcttcttcttcctgcaaatataataaatacaaaatgtaaaatctggagcaaccaaaattcggtttctctaacttcctcaagcaagcataatccaatacagtcaagtggtgtatcaagaccttgatcagttcttcttgcatctcaaggtactctaatttccgtcttcgctcagaaacagggtcttcagatggcagagaagtaataccaacagtatccacaacctcgtcaggtagagaagaaagagtagctcggacagcatcctctgctttaactcttccagcaaccgtgaatgccctgaatataaattgctcttagaaatttctttgcaataaaactgatcgaagaacaaaaaaatgacagcaaagagtactggaaccaacctagagaggatcaataacgaagaggggacagaatgattaagtgacaaatccatccaatcgcgaagctacaaaattgtttcaatactaaaacattaatagctgtagagttatcttctcctgatggagtttaataaagaaataacaaagaatcaagaatcataggagtaaagaggagaaacctgttgcctcatctcttcaactgaaaccagtcccagcattccccgttccctgcaatcttcgcgtaactcagcttctgaaagggaatccacaccctcagctctaatcagtttatcatcttccttaatgctgcagtgaaaagaagtagaaattaaacatcaaattaaggtaaaaactaacaattctaataacaacgagatatggaagaatcttacctcctcagtctttttctgagcatataccgcagataagcatctgttccatatgggctaatacccatatatttgcacatgctaaccaagcgaggcctatatttgaaaaacaaagaggtatattactgtcggaacatgaacctctaagagcacaagacatctctgagatcaaacaaaaaagaaacgactaacctgctaatgttatccaaagtaagctcatcgttgaaaagctttgcaaagcccaaaagttcatcattatggactatttgacctcttcgaacctgcaaggcatgattttaagaacaaggagaatgaaattcaaatccaaaaaccgaaagaagaggaagtatttgagccaacacaaaattatgactgtttaccttgtctagaaactcatccaggtcttcagcggtttgctttacttctccagttcttgaatgtttaacttccttagccatctctctggcggtttcctgaagaaacttagcatattctatccttgcaagtaatttccttttcaaagcttcctgtgcattaacaaaagagcaacatcggaaagagaccaagaaggcaagaaggtagtaaacgaatgagtaaagcctacactctgttgaaacatacctcttctttcatcttgtcctggaaagttgatggtaacatattagggaagagcttcaagaaaactgggagcaaaaactccataaacggcacaaggatgaacactgcaaatggcactaatctaaagatatcagctgtcgttcgagttagctgttgcctttctcttctggagagactttttccaccagccaacttgagcagcaatcttgaactgattctagtgtctgcccagagtaatttggtccccagccaataatgtttcaatgttgatacaaactcatgtttccagtgagtgagcttttttgcccaatccgccctgtagaaaacagaaaatcagtacacataaaaatccatgcataaagcctggcgattaagaacgcaaaatgtgaggataaagccaaacctgttcatggaggcaacagcttttatagcaggtcctatcttaagaacaattgcccatgccctctgtactatcgatcgagcaacctttttggattcttgaagacgtttagctttcgcctttgctttaacactgctcagactttcaacagcttgatcacattcctcaggagatgcttctttcctgttcttagcaagctcatcaacctttttatcctcttcttccggtttcttagctgcaactgtagtagcattacgaatggataggctcatgtatctcatccccagagaaggaccaacttctgaacttccataaccaaatcccgaggagtgaaaaccatgaaagctacgattgaaatatccatttctagaaagcaatagaagaccatctcttcttgtaaaggacttgtgttcagtcacaggtttagtttccacgggaggacggttaataccagagtggtaagcatgtgaatgaaccgtctgagaggagtttccaatgtactgaaagctctgaatagagcgagcatagacattcaagtaatcggaaatgatattctttctcctaacgatcgctcttgacgccattttgtcaaatcccttgttgtgcaaagatgaatcacctgaacatctcccagaagagaacactcctgatagatttgaaagaggaaaaatcgctatcaaaatctacgaaccgaaacaaaactcagacgataaatcgaaatcggtatgagaaaaatcacaatatttaccctagaaaactctcaaatgacgacaattctcgaaatctcgaatagagttgaaaaatgaagcgacgcaagcaatcgaaatgcaaagccttgattttaagaaatatgaggaattcgaagaagatattgaagaaaataacgaagtataacttacagtagacggaggaatctgaaaatgacgaacgctgtttaccggagaaagtgaatcacgccggagaaatttgagaggttttagggatgcggcaaataaatcgtgagaaagggttttagatttttctttacttatttttttgtatcactttttaggacagaataaataaagatatttgttttgctcacacctgtatgagtgagtgattctaaaccgttggatcagatctaggtcccagatcttttcgattgtaaccacgtgggctaatccacgatcagatattatacttgaaccccaagggccaagacgaaaggatcgttttatattttatttttctataattatttttggttgtattcataattaaattagtttttttttttaaagcttttacttcttcatcaaacaaaaaaaatgtcttttaccaagtattatttatatccagtatgatttttattagatcatttatcaaaaataatattgttcacttcacacacaaatttacatcagaatcttaaagttttatttttttaccaattgaatcaaaatgaactttattttattagaagtgttagtttggatttgataattgccttcaacttgagataatacttccgacaactactatttctttttgtatccattccctccggcacctcttatgataagactcttatctagaaattaaaatgtgcttccaatttcagtatgaacaagtgatgtttatcataaaatataactttacaaataactcaaaaacttatgatattaaacaaacaaacatgaaaacaaaaaagtgatcttctgtttctacaaagcaaatgagtttgtgaatcttcttgagtcttctgcaaaatctcactctcatcttgttttttcttcatctttggggtttaagtttaagatttgattggattgattcaatatttccatttcatttcctgtgaaaatacaaaacatgatgaacataaatctttgacttaactgaggattgatattcagattaaagaagatgaaactttgtttttaccaagggaacttaaatgtgtctttccaccaaccctgcttggaacagtttgtaactatcttgtcgagccgaataataatctcagagaatattggcctcacactgatttctggatgccagcattcctcaatcaacctacatagtcatatgattcttgagatgttaatgtttgtaaaacaatcatatatgtaataatagctgatgatcttgaaatgcttactctttcaattccggagggtaactctttgactttgttctgattgttggtcttttaccttctatacaaatcgattctgcaacctcttcaggtggtttaggatggaataaagatactccctcggtcaacttcacatatgaaaccaaaaaacaacattgcagagtttgaaaccgagacatttaattacaaagaaaaggctaaagctttgtgttactacctcgtacaaaatgacaccaaacgaatgcacatcagcccttttatcgaagacttcatctttgtaaatttcgggtgctatatagtaatctgcagttcaaaaggtaagcataggatctttcaagaacaatgcttctaacttgtatatatatatatgaatctgtttctaacttaaaatgcagcctttttcttacttgacttatcgatttgagcttcgtggttcactacttttgcactgtcttctccaatctttgacaactttatcaaaccaaaaccagagatcttcaattgccctcctctatctagcaaaatatttctggcaccttacaaaaaactttcaaaatattatccaaactgttttttcgccattaaataatttgttctcggctttgtcttactttggcattaactcgcagtggatgatcggatctggtttacattcatggaggtagttcattcctctagcaatatcaagagcaaatctcagagcttttgaaggagaaagacgacctttcttttgaagatagacacttagatcaccctgaaattgagatgattaatgaaacaagattgcttgccacatttgtgattcaatgagctgaaatgaagtatgaaacaatgcgtacttacttttggattacactcaactacaatcatcatcggtagattttgagtgacggctccaacaaattgaacaatatttggatgccgagcttttgctagcaaagtcaattcgtttgtgaaagcatttctgctcgtaaaaaagaaccggaaatagacaaacacaatgttagattacttcatgctacggacaaaatcatacagagaagttcaagaataatgcatacactcgttcaggatctgaatagctatctttatcgaatatttttactgagactcgcgtgccattccatttagcaacttgataagttccctgcaaattaagcaaacacaaacacatcagaataagagagacttcggacaaaaaatctcacctggctcttgtcaattaggaaaatcaacaaacctttgaaatgccatcaacttttcggacttgcagctcgagtggattaagctcatactcaggaacttcttttggattccctaccgtcattggagtctttctagttttctaaaaatcaacgacaaacaaatgttgaagatgaagcaaaacatagagaccaatcatctttattttaaatatcataccggagctttagcgcctcgagctttcaagagattataaacttcaacattcccataatactttgcatcaacagccgcctgaacaatgtcaaaaatgtcaccttaaggatgcatccaaaaccaaacactattaaaacaggggaagaagagaacacaccgtactaccccaacgatcacgagcatcgatattagctctccggctaagaagaaccttaacaacatcataatgaccttcacaggaagcaatgtgaagagcagtacgaccatcaagatcaatgctattcacatctattccttcattaagcagctcctcaacgccattaacatcacctttactcgccataaagagaagctgcatcgtcgaatcaagattctcggggacagacatatgcggctcgcagctaagagactcaggactacgtctgatcggatcaagcgaagattgacgaccgaagctgaatctcatgttgttacgccgtggatcgagagaattttggcgcgtgaattgtcggcttaatgttcgtctcattgatcctgtcgagaattgtctcgatatcccacgcttcaactgcgcggcaatgttgtccatgattgatgatgataatgaatcgcaaagaaccaagatcagtcaatgatcaaaaccacattgtatcttccaaggagagggacgatcgtggtgagctttttttttttttaattgttcgtcgtttatggattatccataaacagatttgacaaaagaatagtttcgttggctcaaaaatgtcgttttgagcagtaaaacgcgggtaatcactattttctaatctctttatttattggatccatacataattagatgaactaattagaacttatataattaaccaacgccattgataactaagcttaatttaatatgaaaatacaacctggagattggtttatattaattcaaacgttgacatttttgttgttataaccagtccaatttagcaaaattaatcatcactgcactaattaaagatgagagaacttgttcgatttcaaatgaaagagatgacattaccagaccaaatacaattatcaacgacgagattgaacaagtttacatcttctacagattattgactgattcctcagaagacgacgcgaaactgtggagcgtctttgccgtcggcgggaagaatctcccaacggcaaggttcgagatcatcggaaacgggacagtaaccagcgagagtgactctgtctccagtagcagcaacggagccgaactcgaaaaccgtcgcgcgatcgggccgaggaacttctatggctccattcatccccggggctggagtttctgatttcggcatctgaatcatctccggcttagacgtctcggactgtgatggcttaggacttcccgtgaaccatgatagaatccccattgctactctcgaatcggtggttctcaaattgtaatctgaggaattagggtttatctttttccccttctgatctgctgagtttgttacattgggcctttgaattattaagctgcgcttcacttgggcccatttaaacacgaaaatatggaatttaactatatgcccttttatttcatataaattccaattagaacccatacccttaaaatacgacatacaaggtagtttttttgtaattttacatatatccatacatggatagatttctttactctcaagcaaccttgagaacttgcttaccaacgttttttccatgaagaagtcctacaagagcagcaggaccattctcgagtccttcaacaatgtcttccacgtacgctaatttctcttcttttatgtagggaagaacaaactccaagaactttgggaatctatctataaagtcataagaagcaaacccttgcatccttatcttcttgaatatgatgtcaggtagattttgtaacctgtctctggtttcaagatggtactgagatatcatcccacatacagcgattcgtccatacgttttcatgttaagtagaaccgcgtcaagcattttgcctcccacgttctcaaagtatatgtcaataccttttggtacacacctgcagagagaaatattgtgaggagattttgattcaatgattcaaagaaactgatttataagaagccaaatatgaacctcttcaaggcggagtcaaggtcaggctcttccttataattgaatgcatcatcgtaaccgaatttgttcagcaggagatcgaccttttgtgggaaccaaattatgtaattagagaaaacttatatagagatagtttaactcatttgattgatgagtttcaaaactatggcctaaccttttgtttacttccggcacttccaacaacatagcagcccatcaactttgcaaactgacccacgagctgtccaaccgcgccagaagcagcagacacgaacactgtgtctcctttcttaggtgaacatatctcgaaaaacccggcgtaagcagttaaacctatcatacctgttatgaaaaaacagagcttttaagagaaataggtataggtccataacactattacactttttttagtttctgtgactaaccgaggattccagtatagtagctgagaggaacattgatattgacgtcgattttgaatatagcagccgggttgatagtactaaactcctcccagttcacaattccccaaatcatatcgcctttcgtaaaagatggatcatcagaatctattacttgagacactccaattccagctataggctgcacaaagaatcaacaacaatttcttattaagtccttgtgtatgtatgtatgtgtgtggagagttgttacctttccggggatgaaggcatccaaaagtgctagagtggaaggagttggttctctcatgagaatccccatgtaagggtcacaagacaagtaaagattcctcaccataaccgccgctgatccgggcttaaccttgagttccacggggtctgaagctgtgataatcattaggtcagattctttagggatacccttcacataatttctcagtatcacttgcttgtttttcacggtggtctccatattcctctgttttactcttagtaaaagcccttcttgctttggtcagatctatatatcttcaaaactgaacaaagtttaaattggtgcatctcccatcatacatagaatgggctcatcatagtcattatcacagtactatgattatgaattgcatgcataaagtatgtttggtaagataaaatttaaaatagtgtatggtctaattcataatcatagtactgtgataatgactagtgaccaacaaaattactataaaatgtaattcaaaccacgtattagtagatactgtaccagctccattatgtgatgcgacaacactatactttgtctgaaactctagatctgaggtatcagagaacctcaccaaatttgtctaaaattctcttgagtgtgacctaatatccacgcattttgtaggaattttggaaataagaaattatattctaatagttttcccatgatttatcattgatacataatttattattagtctagtagagtttgacgaggtatgttaaggttactggtttaacagctgagggagagactgccaattgttaaagaaagatagctccctgcaataaaagaggctcctgcaacagtaagagcaatgcgacctgtattgcaattcatgagtttcatgttacacagaattattctctaagctacatgaaatattcaacttggatcttgcgcttcgatgaatctgaaactccaagatgcgtctttagaagtctttcatgtggatgactgaccgtgatgtgcgtcccaaaaccctggagtacctacgacgagttgccatacgcagcattatatggcgtcacatgtatcatttccaagccaagaccaactcaaatcgggcattacagattaacggagttttcgatagagggccaccaagactcacttttgcttttgtttagaccctaaactctctaatattcaacaatgtgctgccacgattcattgtggtacttaataagaaattcatcttacacatgtcacttatttttttcaaaaataataaattagttgaaataaattcgattgaacatatgttactttattttttatatactcatgttcttagattgcacgactaataaccaatgtaaatgttcttagtattagctagatgaaatatctctcaccgtctccgtccaattatatccttaaattttgcttttatatattggatttgtaacatttcgatttacttagacaacattgtttacacgtaattcatttatatagctgataatactatattaggcttaggctataggcattatgatgtacaatttatcgatttgattcgttttattaaacacaattcccattcattttaaatatccacctacgttcataatcattggttagtccgcattgactaatgcataacaaatagcatcattagaaattgattttgcgaaaatactagaccataatttcacgtattccaaccctccaggaataaagccgtaatatatatgaaaatacgacgttacttacaattacactactaacaaaaagaagacaaatatttttcttttctggtcatagacaactgttgggccgttgaaatcctgcctcactacctccagcgtgactacaatctgttgttgctggtttattccggtacgtcaacttcacatcttgaattcgaattcccgtgcacggcttcttagagctacagtctaatttcactccaacttccgtcgccgatgtcccgtgtatatcgaagaacattacatcgctgatttttatcccagaaacctatcattcatatcaatcatatataaaccaattaatatctaaattaagaatagctttttatgtgacgtttaatatgttttgagaaaaatgtggacctgattagggcaattttcgttgccagggcagtagttttggtcaatgacgattgggttttgtacgttgttcataacacaatgctggaaacggatattcttagcaaatccattactgggcctggcccatgactttattctcaccccattctctgttcctgtaaacgtcgccgttttcactgttatgttttgtacacctacctccacactttcttttcccaagcttccaatgctgtaccaaaatataaaaatgattgatgtggataaataaaagaaaatgatcactagaaagtgaaccaaaaaccagttactgttacagtataataaaattaaaataattgacattttataaccaaaaaaaaagaacacaacaaataaattgataaactgaactaatctagtgccactgtgtgacattgacaaatatatttttctaactattagaaatacatgaaactgaaaatgaatgaattggaacaaattaacaaaacattgttctctctttgtagttgtgttgattactaattcataaacggataaaccgtgtcaaccctatataaactagtgtcggctttaacttgtttactataattcatataaaccaaaagtgaaagaaaaaaaaccttataaaaactaaaaataatggaaagataaaaatgaagttacaagtaattaaattaataattcaatacctgatcccatggccagggccacaagcgacattctcgatccagaggccgttagtgccgggaccgatggagacacaatcatcgccggtggagattttggagttgaggatggagacggtagatgatgactgcacgtggatcccatcagtgtttggactgtttccgtctgcagaaactttgactccgtcgagctttacgttactgcagccgttaatcgcgacgtgaaacatctgactgttaagtgacgtcagcccggagatcaccacgttgcgtgagctctgaaaccctatgctctgtttgcaatttgttgctcacgtgtcaatttcatttatccgaaaacaataggaagtatataataaagattatcactaaatcaatgactctatgattggtacatgtgaatgaggattctacgttaattaacgtgagaagtcaacgacacataatatttatatgaatgtaactctatgttagcagaaaaatggagaaaaaattgcggaaaatgcatcatttggatcgtgctagcggaatttgcggaagcgcatcgataaaacggcgataattcattttcaaaatatacctactaagaaaatgcttttaaatgatttcaacaatataagtttaacaataagacaaaattgatggacttttatacatgtaacaatttttttaccattttccctacttattgattagaatttctatggcaacaatattttgtaggttggcataatttaaaattataaatgcataattcacaaataacatcaagacgttaaaatggtaagttcttaccgtggcgccactcgggcaattcttgccggactttttgcaagaccatagagaagctccctgggcgtcaagaactccgccgtagacagagatgccgtcgagatgctggaacaaaatccaatagttttctttaccgatgactcgataatccgatggagccacaagtgtaccttggatacggaacgtgacggacttgcgtttacacttggaaccgtcaaaaataatgcttcttaacaaaaaccgtcccttaggtaccaaaatggtgaccggtttgaccgatgcacatgctttggcccacaggacggtaaaggccttggtcgagtcggttttgccgtcgggtttggctccgtaagagaggatattgtaggtttgagctgaggaagatgagaccgagaggagaaagaggagaactatgagaagtgaagaatgcattgctttgaaagtgagagatagagggagaagttgaaaagtggtgatgggtgtgtgggatttgaaacggtttagtgtaaggtatatatagtatttgcgtatttgtgaaatggattgttttttgttgattaacatttttctcttgttattttctatattatcatatcaacgaaaccttagatctgaagaataaaatttgatatgtacagtagtatattttcttaaatagtttattcgagtgttttgtcaaatttcaaaatattgcaagtggtagatttgagttttagaagtttgtgtctattgtgggtttatatcgtttatcatgaactctatatgctgaaaaatcagattgtttatttatagatttactgtgactaaatgatcgtttaaattgtttgtatcatattacatgaattaatctctataaatatttcatatagtaatattatctaattcatgtaagtgtatacaaaatagttttgtctgttttttttttttttaaatcctcaaaaaaaaagcaaaaccaaacattcatattttctgaatcaaaacaaaaatcaacgctaactcgtaagcattcggatacaatcaactcatgaaaatttacgcattgaaatttcttaggattagaactcgaatgtgtttcgacataaaatcatctatgttgtattcaaatatatgataactgaaaaagcaagtggaatggtcaggggcagtgcatgttgatggtagggagcataagatcaatgcatgtgacgactacaattggtagtaaccgatttagctttaattatcgataaaaacgttacacgatcctaataattaaaagcaaggcaaggaatttacggatccatgcatatatatttaataaagtaagcaattaaaggagaaataatgtacgggtcatacggaaccaaacatgagtgggaaacgtgacaagtggaggataaaacggagaagaaattgaccaataatatcgtaagtaaatattttgataggatgataatcatattcacaatcacatgcatggccaacaattcagaaaaatgtgatgtttgttaaacacaacgcatttattgccgcatgccgtgttaataggatcacgaaatgtaatataaatatcgaatgaaagtagtgtatgctgaaactaaaccataagaagaaggatatccttgtaatgttccatcgtctttagcgttcagaaaataactcttagggtaaatttagttggctaaaacaatcggtggcctaaagttaggtagagaatagagacctcgatcttaagttgattttagtaggctaaaaatgatcggtggcttaaggatagagggagagactagaaagacctacattgtagaagatagaaaaaaaagaaattttcacagaagtggctgaaaaaaaaattgttctcatgatttggtaaagtgagatgtggttttcaccgtttgtcttttgaatggtttttggaccaaaatatttttaatgggatcaaccaaacctcacaccagttggttttggtttagtttctatggttcagttttgaaaaaaaagaaaaaaaaactgaaatgaagaaagcgaagaagaagaaaaagaggaagagaaagagatggagagatttgaaagagaagtagagagaagttcaaacttcattatctacttcttcatatttcgacatctctccattgaactctaaaattgaggaagaaatttcttgttttcagagatgaacaaaatgcaaaaaaaaatcacagattcaaacaatttagctttttaaactaaagatactctatatttacaagatttatatataaatagtaattaaaacgtataaaaaaatgagattttgagaaaactgctaaagatgaccgcaaaattaggtttgcagaaaaggatacacaggttaaaaatgactggaaaattataattatacccttcattaaatttcttctgtgtacgtatattcaatttacagtgtacgtacacaaaattatttagtcgaatgtatatggtacaatttctaataactaaagctattttattacgtattcttatatctcaataatctccatacatacataataattaaatagaaatagatggtgaaataatatttgttcctcatattgaaagttatgtacgtatatgtgtaataatgtacgtatatttttgttgataaattaatgtatgtacatgtgtaataatatacgtacatctttgtttgtaaattaaattactaagaaaattttattgatacaatattaaaccaatattgacagtgggcgagatatattctaagacgttcatacgatgtgattttgaaacattctgaattcttgacgacttgagcagtcaaatgtcatagacaagtatcatcaacgcatatcatcaccaatcttgtaggatatgacctaggttgcttatagcaaaaaaattgtttgattgcgagataagacattgtttgttgtatgacttttctgttcttaaaaacactctccaatctatattgtacgtacattggtacaaaccatgttgacaaatacttcttggagtcacaactggtgtacggtcacccgggtgagaaatgttatctccgccaggtacacactgacttgtctacgtacactctgccaacagaagactgaattcccttggatgttgaacagtcagctgtgtgagaatgacgttctcctcaacattccctattccatattcttctacaatttcatcgttccacttgttgtaatcataatcttcgccactactttcactaccatcaatagtaggatcgatggtacttcccccatagatccatcgtcaccctgataatcatcatacccatcaccatcttcgttgtcctctcatcttcatcctcatctgttttatcgtcttcaatgtcgtcttgctaatctacggtctcattattttcatcaacattaaaacactatcacacacacagtcactttcagcatcgtcaccatgagtcctagagacattatttccgagtgtattgacggttgtaatgaaagagacaaacaagttgagagaaggatacccaccacgaataaaaaaaatcgtatcccaccctcacttgactgtcaatgtagacaggagggcgtttagtatctacataactaacatcactcccggtatccagtaactaatcatgggattgatctctatggacttcaaactgaaagtctcgcttagtgtacatacaaattccgtgtacgtcatgttttccttaacacgtacacaacgaccaaacatgtcttcctctggttcaaatttccatttttcttctttgcatctccactcaccgaccatagtaaatacgagattatccattacccaactgtatcataaattcaggagaaacccaataaatgcaactgaaaatatgattatatcgacaaaaacaaatagaatttcgttatacacacttataaacataaatatctatacatttaccattttcaaccaacaaaattagaaataaaaaaattctggatttttttataaaaaacaaaattgatttcgaacacaatgaagatcatagtgtattataacaaaacaaatctttaaaacttcattacttacacgataatgcttgtcttggccccaaatttcgtaaataaacaagatcaacacatcttcaacatcaatgtacgttcgcaattaatgtttgtttatgggttcatctttaactcaacaattattatcaataattttataatattataacatgtaatgatgattttgcattaattgtgacaagagtcacgtttaaactttttgagccattaaatgttgatgtcatttagtttttaaaggaaaaaatctcccttctagctgtacagccgcacttctcaaagtgaaacaaaaatatctccaactaaaccggaacagtgtacctaactaaaccgtacattcaatagtttctcaactgtagcagcaagggtaaaatggtcaaatttcagctgaaaagacaaaacgtgaaaaccacatttgacttagccaatccctgaaaataaaacatggtcaaagggtgtggcctgcaaattaccctaaaaagaaactaatatttaggatagtttttttagtcaaatacttaatcagaaactttactataaaatttacattacgatatgaaaacaaatgagcaaatgataggatacaattgctttttctaaaaccaaattggatttgatatgtataatcaacaaaagtattgaccaaaatttaggcaactgttatttggtagttaaaaacttaaagtataccctagtctatatgtttcgttattattgtttgtattaaaagacctaggaatatcttcgtttagcttcaattagaatgcgtttcttacggccaaagaaataaaccaaacaggcgcggcccataagatgattaatctccaccgtccaactaacacatctcaagtattcgtttctcacagttgcgcacagaccacatctactacagactggtttacaattttattgtcaaaattagtcttaatacgagtaatttagattttttttttttaatactagacgagttaacagtgatagagaagccagacaatgtaacgaaacttattagccacaaaccgtattaaaaatgatcgagagattcccctataaagcaaataaaaaaatgaaagaccaaagaataggttgtgcatgtgtaaacgacgattcctaattacaatggaacttgtctttctccgaagaggaagatgaacaaaacactaagaagacaaagaagagttttttgaagtgggaaacactgaatcactcaatccaggtagaagagggtaacaatcttccggagatttctagcttcttgacatgtctccatgagaagcttactatcatgaaacgcaaagcaaatgatttgttgcacttgtgatatgatatccatgttacatagcctgcaaaaccaatcaccattttacttacttggagatacgtctcagaaaattgattctacaatgtttcactatatctcataagccatcttttctcggttttgctaccgtgtatggtaaagagtggtgagtgacaaacctgctggcttctaataacggtaaatggtcgttgtgaggcttttctatcacgttttgtacctgttgcagacattacaaaggagactcagttgaactatagcatagccaagaatggatgatattcagatttatagcagatagaagtgaacatttcgatatttaagacaatgcagttggagtaaaagaaaatcttgaaactagtctcttacttttgacagtagttcctggctttcaggaggttgctttttcaaactttgaggtaagataactgtaagaagctctggtctctctgctctaagtgcacctcttataacagctgcattggttccagctgcacctgatgtgtagatatggtttttctgcaagataaatcacaggggagatggttataagatgtggtgaaccaaacatatggttcagaaattgtagccttgtaggcaaaatgtcttacagttataaccatagcatagctaagaatctgaatgagctcttgatgcatgaaacccatatttctagttccaaagaagccaattgttcttggtccttgttgctgtatagccaacagttcctgccaattcgcatatggttacaacctaaaagactgataaaacatttggtcttccatcatctaggcagtcaaatttagattaacttacttgtatataatctacatcagggactcgttgtagctccgacacagcaagtgaaccaggtccttcaacgatagcttgagcttgtgttggaatccggagtccggtggtggtggtgtcttcatctgagtcaaacctacaagtcacattgtcctctttgttcacccaactatccacgtcgtcttgatctctcgtttgttcaggaaagcactatacagcatcacatagaaacagagcccctgggagtaaatcattagtgaaaacccaaatgcaattcataacacatagattattggtatgttgtgagcatttaagctcgaaacaaagagggcacaccacatcttcgacaaatcaaagctgatgttctgagaaaactaagcttttcattcattgacgatcaaaagagtgcatcgtcttattcaatgcaatgaataactatttgagttcttaagagaaggtaatcaattggccacataatcaacctataccaatggctaacaaagtcttcaaaaaatcaatctcgaatcaaaaagcagtaatagaataagaaggcgagtgatcagaaattaccatgggaatagagggagaggaggatctggatcggcgtcgtctaacagagaaaagctgaaacgattgggattgagaagaacacgaagtagaggaagaggaacgacggcgatagaagttagggttatccgatcggaaaggagaaggtagcaatgaagttgttgtaagaggcaacaaaagcttcaaaggtagagccgaactcatctccactacgaccacgtacgagtttcttcacttgaattggaagatgataatacagagagaaaattaagattcttcgggggtttgattctctctggtgaaattcgtcggaattatgaagaagaagataaacacaacgttgaaatcggaagaggaagaagaagaagctaaaggtgagctgagatgatggatattattattttaccaataaccagagaattaacaacaaaagaaaatcaaattttccggtttagctttgagaggtttggttcagcttattaacccgcacattgattagtcagcccatttatgaatatgtggcaaatttttaaatcgaaagcccacaaaacacggattcatttaagtatcaatcgaactaggcccacatcggtccgttcttattcccacaatggcccttttaatcaattcattaattatagttaatataatatcaattatgaaatcttgcaaactaggagtattaaatcactacaagttgttatttatattttcggtggcttttaaatagaacaacacaaaggcaataaaatacctaaaaattaattctactatattatttgggaagtacattttaaatataatcttaatttttgtaagtaattatatattagaaataaaaatttaaagagtaaattaatttatatctttaaagattaaaaagtcaaatactaatttaattaattaaattaattaaaaaacaaaatacattattaatttccaaaaataatagccaatcaaaatcaacatataagatttgatatctaaattttaattaatttaatttaattagaaaaacaaaatacattattaatttccaaaaaagtaaccaattaaaatcaataaactatatttggtatctaaattatcatattaattttttattaattattatagttcacttctcattctatttttacggaaaaataatatcatcattataaaaaaaaatagagttttttcgcatatgccataatttgaatttttaaaaacgaacataaactgttcaatacatgaaataatattataacgggtgaaaaatatatttaagaaaactttctactgaataacgggacataaatttgaaatatttatactcaatttcatacatattatattgaaattttataatcttatatactacaatagttaataacatattagatgtgattcaatttttaatacaagctggaaaatcctagaattgacgggtttagatcgatattaatacaagatggtatactacatgtgaaactcttaaattaacaatcaaactacaagtgtataatcttaaacactaaacaatatagataatatcaacaaaacatttacaactcacagtctactatacatttaaaatcaaataaaataatatcatatatttttaaattatctttacaataaaagtttttagtttaactaaaatataagcctaactgcggtatactgcagattaatctgtagattataagacttattagatctaaagacgggtcatcaaagatttcctaaactgaagcaaaatatactgaatattcaaatatatatttgttaccaaattataaacaaataagtcaatttaatattttatatatgaaatcaattaaatattaatcacaaaaaattagcacaaaaaaaaagtattcaacaattaaaaatttatcaaatctctgtgttatataagttttgatactatatttgaataaaatgtaatatacctttttaatttgtattctttaactaatttaagctaactaatatatttgctaatcttatatctaccaaaaccgactatcgtttcttatctctatagtatttttgcaagacttttttagtggatttggataaaaatgcattcgagtcatatggtacattcctctattaaataaatatggtgcactcctatgttattagctaaaatgtttagattataattcagagtcatatcattaataaaactaatattaataaaataaatgactttttggcaagacggatttggagggacggatttttgaatcaacattaataaaaaaatatattaatccaccgtttcaatatgggttaaatctttaatttattattttttaagaccactaatattaaacatatcaaatcatcctaatttagaaaaaattatatagaaccaaaaatgttatgtggtatgtataatgttaatatatatataattaaactataaaatataaatgtattagagaatgatacaatttgcaaaacttttatatataaaaaataattataaaattataaaaattactactttagaaaaaaatcatgggacggataatgaaattacagaacgtgttttattttggaattgggttatatggtggatgtatttgaatcaatatttataaaattttaaaatattattaatatgttgttttaataggggtcaaaactttagtttttttaacaattgtctcatgaattcgtggtatagcgttacttaataacaattataaactgtaaaatataaatattttgtaaaagtaaaatttgcaaattttaatatatattacttttaaaaataaatcgtcccgcgatataccgcgggttaaaatctagtttcagttaaattataaaatacaagaaagtactaacacatacgcctagacgtaaattcaaccattagtgatattagccaaacaaaaagaatatttatgaatcagttatattgaaaaagaagagaaaatgaaaaccttttttttttgtcaacaagtcaacaaccctttctttctaaagaaagatagacaaatgaaataaatagaaggtatgtattgagtaaatcaccaaaccactaccaaaaccataaacctcccaacttccccacacaacacataataagttaataacctttcttcttcttcttcttctcttgtttttggttttactatttttcttctttcttcaacgataacacacataaaacataaccacagaaaaaaaggagcaaccaaaaaaaaaaaaaaaagaatcaatggatggtttgattccaatggcgtttaaggctatgaggaaaaacaggacccgaaagcgttacgagtgtctctcttcctccgccggcacgactaaagactcctacgacgattccgacttcttccccttcgccgctaaatccgatcactccgttgtatctcgaccttcgtcgtcttttgatcatatagagatgaataacgttgatgttcaacaacgtcaccaccgtggatggtcagtgggagatttctcatccatgtcttgtcgggaaggaaaaagatctggtgtcgacggcggagatatcggtttttctccgtcgcggcgaggacaacttgtgaggaatagaagccatagattgttctcttgtgtctcaggtgaatgatttgtccatatatccaacaagcttaaatctcagctcaataaaaaaaaatttgcatctttttttgtgttaatgttgatttttcattacgagagtttaaagttgtctggggaaaaaacgcaattttgtgtacttttggccgtttgggtgatatttcgatattgctgtgtaaagttttggggtcttagtaagacagttctaattatttggggctcaaaagataaaaagaaaactttataagttccaaaagtcttcacctaattcagtcgacgacgatgcgctgaaacgttttacagggtgttgtagtttgaaactgttttaaaactaatattgtccaaatgaagtagatggaagaggagttttttgatcttgaggttcatataaaaaagaagaaaatctttgcagttgtttatttctgacaaaatcctcttaactacagtatgtattattgtctatgtatcatgcaaatttaaaaggttttaaatttgagtgaaaaaatgaaactatttttgtttttagggatatagagagtagaaacatccaaaatagagggtttctcatttgtagaagttgaagtcatagacaactcgaccggtccaaggggtgctaatagggacactcaaggggtcataatggggacaatcgacctagtcagtagtcatagtcccaatggccccgaagatataacaagcactaatgaattttgatgatttaatgtgaaaaggctgaaactttggtctgaatctttttttataaatcatgcatgaaaacaacccctctatggaaccgcgtacaaataaatgctatggaagtcaacaactatatagatcaaagaagaagctaaaccagaacaactaaagacttgtttcgttgacttttttggtcccatttctccacaaccacaactatggtgtatgtaactatcctattagagattatgagcattttaatagaccaagacttgtctattttctttacacatatcataatctttatctacacaatatccataaaaaaaatttaaaaaaaacaaatttcaattgtagacttgctttaaacttcaagatttacaaatctatggcttaacagattcttaataatccaatccagtgagcttcagaggttccaaatacaagaccaagattcttcttcatcagctaagctgtgtaacgactgcagaaaagaacaaaaccatgtcagagaagttaaaactaagaatcaaatccctaagaagcttttcgatttgccaggtgatgcaagtaattaaatcttgagctgctttgaggacagaaaaaaagaacaaatatggttataaagatgctaaaaacatgatcgagattccaagaagcgatgcaaaaccacgaaagagtttgttgatggtcatctaaaccaatcgatcaacacaaggatgatcaacatgtgtagatatcaatcaacaaacacattcaagggttgcaagagagaaagaaaaaaacctataacgtttcatggaagttaaagatgtacaaaaacaagtttaaggttgtgcaagtacaaacaagaacatgaatccagacaagaatattctatggatattcttaagcatatgctttggaataaagcctttttttcttagttagcttattctgaattgacaggattcctactggctagcatgatgatatgggatgtaggaatagacaacaagtatcgtaaatttgagtaaaatctgaatggtgaagagtaaagaaatctttgaatatagtctgtagataacttcttcatcatcagagagtaacacctctccctatatgccaaaagcagagtaaacactcaacatgtggtttcatagcctgttccttcaatagatgatccaatagatgatcttaattaaaactcatcaacagaacaaataaaaggaaatctttaagtgaccgttactggtgattacagaaaaaaaggaaatcttaatgtgaccgtaattaattgtgattgtcagttttccttttatttttggacctctctttgcttataaataaagactctctcaaccctaattcttattcttccttgtgacagaatcaaagctctctatttctcacttcttctcttctcgagcgaatgtctttatacaaagactgtgattttcctttttcttctgaccatctcacgcagtctctcaacgcttcttctaattctccttgacggagaagaatcaaaactctctatttctcgcttcttcttcttcttcttcttcttcttcttcttcttctcgagcgaagtctttatacagagactctgtgaattccgatgatcccaagtagacattgatgaagtaaaatccgaggatgcatgatgatctctgcatatatcatatcgtttcattgattgaatgatgatctccatcaatcctctgtctaaatcaagatcgatttaccaaataagcaaccaacgggcttaaaccttaaaatctcgtgatgcttcatcaagacataacctaagccgtgctcatctcatcgagcctacaaagaaacttaatcccaattgcatgtaagcatactctcctaattttgacctagagaaaccggttctctaactctctaagtaagccaagacagggatcagatgcttacgcacactgctcgaaagtcgaaactctcccactcctcggagactatgtctaaaacccttgaggtcagattttgacaaaaaggtatatcgtactctgagaacttggaagattggtttctgcatattcagcaatctggaaaacagaattaggaattgtggaggtaacaaaagctgagtttaacatagtgaggctctgttttttcgatcaaagctaaaagcttccttctcttgagataagatcccgaagaaagacgactataatcgaaaagaaatgacaattttctcaggaattttgcaaatccgaaaagagaaacagagaagccataaaaagacaaaaccctacaaagaaatgaagaaccaaagcacatttaacttggcatgacatttttttatatagagtttcatatactcttctttactagccactgcagcttggggtttgttcaacgcatgtttccctctctcaagacatcaatcatgttatagatcctcttctctgctttagaccggatctacaattcatgaaagtgttttttaccagatcagattaagaaccgcaatatcttttgagacagtttcgaaggatgtctaacctttttggcaaggaatagcactgcatcaacagtaccctcagcatatattgatcttccgcaaacattgtgctggaactcaaaggacacactacaaaacaaaacagatgacattgatgttgcagacaatgagaacaaatcagtttccagcaatcagagaggactaaaacagaatcatcgaaagtttaaaatcttgcattacgttttatctggtgatgtcaagtgataaagatggaaagcatgacccgagacatgctcctctggaacacccaccacctcaatctgctgcttaggatctcgaattaattgtatctgatttcaaaagtacgcaaaaacggtcttacagatgatgatcttactagagaacgatagatctagagaacaaagtacgatataaacacctggtccatgtcgtaagacacgcctaatttctgaaagcaagaaataacagcttttgcagtaccagatgcatccaatttgctagcttgatgagactccatcacctatagagattacagccaattagccgtaatatgatacaagcacttaaatgaatatctcaaagtaaaagacgtacctctaaggaataaccagcaaatgcaccaggaaactgctcagacatgatctccattgctgcaagaaacgcaacaacctagtggacaaagaaaagatattatgggtcacaaggatgagagtttacagacataatttctagcttgtatgacacactggtaagtacctgtttacccatctgtggagaaatcacagcataaatctttgattcctcgacagttttatacaatcttgtcctgtctcctccagttgttcccattacgaacggaactcctactttgccatacagctctgcattatctacattttgcaaaacaacacacattggaaagattctaaagatgtggtgttgtcacattcacataaatcaggatcatttataatagtgaaaaaaatcaaatttcaacacacatctaatcataatgatgtcattaaatgaaatttcttcagattacaggaataggagttgctagacttaccatttactgcagagggaattgtgtagtccacaacaattagttcaggatacttctcaaacactgaagacagcaccttttctctttcagtaggaccatgcacaagaatctcctttccacagacctcaacagtctggccagcctcttcaacagacccaaatgatgtaggaacaatattcactccagcagaatctgccgctttgatgacagctttccccattttaccactgcatccattcacctaaagtataaagattaaaaagagtgaacgaatggcttataacttgatcctacaattacactctagcaaagatctatgtaacttaccctaaaatatttctgttgctagaaaaaaaaaaaaaggcaacagctttccatctataaatttccgggaaaatcacaatcatcaatggaaatgctaaatgtcacaactcaagagtgttagggaagtaatcagataccatgatcgatatgccgttaccaggcgcaacggaatttccagcttcctcgaaagtctccgactttcccattgacaataccaccggaaaacagcgtttcacattgccgatgaaactaacacggcctttgaagccgagtggaaccatttgattcgttctagaagagaacgagaaatggggatgtacaggacggtggagaaacacactagatgccgccattagcctgtgatcaaatcccagacaagaacaacaacaaaaatgacaactttaaagatcaattcatcaaaccaatgtcggaagagagtgaatccagtttagaaactgtacccattcgccgccattttcggtttccacttggtccgagattgctgtcgagcaacgaaattagaatttatgttcaaaccttgtctgaaaaattcgaaccggcgaacggtagggttttagacattttccctttacgtcagatccaaagcttctggttaaggttggggtgtttcaaccaaaaccggaaaggttactaaaattgaaaaccggaatttctcttcattttaatggtcaaaccggaatttctatttaattaatttatcaaaccggagtttctctactttttccttaattaatggtcagagtccggatttcactttaattaagaggtcatgaatcatcttttgtttttttgacaacgaaaatgtacggaaacattgtttttgttggagctagctaaaaatataaaattgaatatgaaccataaatttggtatattaggatcaatgcaatgaacccaatgaccgacctcaggtaagcagcagatacattgtttttttctcgtcattcgtttaatttccctttcaatctgtgatttttaattaattaaagcttgataaaatgaaaaggtttaacccataaaagtaagtatacctattcttgtctttgtcactaagacatacaaacttatgatactctgaacctaatcatactcctaaattttggaaaccaaattatgaacacttttcaattaacttgtttcatgataacatcactcacgaaaacgaccattaatcctattagaccaaccacaataagagatgcttgtcggggaaagaatttcaaataatttgggttaaatttccacaataacaaaataatttgtatcaaaggggattaaaaaaaacaaaaaaaaaaacaacaaacaaaataatttgtaatctttttttttaagcaaacaaaaaaggggattaaagagtcgtacgaggaatattaattaggcaagttggtttggtcgagactcgagagatcatgcattgaatcaaaggcaaagagccacgtgacgtttacatgtggttcgatcctcagtgtctcatcgatcgcctttctccttacaaatcaaccaaattatactgtagtaatctttttctcaaattatactgtagtaatctttttctcaaattatacttagtataataatggaataatatttcacaagataataatcgaataatattatcaaatctaaaaaagctgaccaaaacaaaaatctttaaaattcgcgaacgttatgaaactgagcatatggaccttgttattgagattattgtaatgcatcaagtgtctaagaattagaccaaaacatatgtctatgcatattgactgtcgaaaatcaattaaattagaagtagggtatataaaacaagaagaagcaatatttaaacatgactgacttattagtaagacagagggaataatattatgataatacttttttttcttgaactttttgatacaggtccactggacaccaatctaaatgtgtgcggtgttcaaggcaataatcatgcatgggttgccatatatacacacctacatcttaactttccaccattatttactcatctagtcttcaataaacaaattccattactaattaaaaacgtacaaatagagatgtttaatcgtaatactgtatatctatccaagaacaaacacacaagtgaactgaattttaaactgattaattcttttgtttccaaagaacttaaaaggaagtacttttatttaaataaaaaataaatcttaaaccgcaccaaataagttttggttactagtgtatacattcagtgaacatttttatgaacccatattttagtaaaagtattctcttgattgtagagacaaacactaaacacaaataaattgatttttttagttgagcttatgctgagaagatccatttgacaattttctttcctttttttggtcaacgattcaaggagatccattttctcatccctaaatatacgattttcgtatctgtagagtaggagtagaaactagcggatctttcgatataaacattctaaattattaatttagggtttgtcatccatgcaaaaaactttgttggtacacgtcaaatagtttaatatctgaagctgcagtcttcgtatattgttaatttggcctaattaaagtaatgctgcacaattaatgtggataactagtgttgtagtattggtaatctatcaattctcccaaactactcatcggcttttttgtatctaaaggccaggaaaaaaactaataaaaccacttgacgttgtttctaaaggaaatggcctatatgtttctcaattcattgaaccatgaattatatttatgggattaactatatttatatattaaaagtaacaagtgatttccgactgagttactagcgaagtctatttgctttaattcatcattctgtgagaattcatcctctggcgatataaacatcttggctttattaaaaaccatcctctcatcaagacttcacatgcaaagcgtgttgtcacgttactatgtccgatctccatatacacgtaaatatataaaaatagcatcgtgaattaatttgaaaaacattcctagctatttaacttggctttatatatagaaatatgagagcatatacatatattggcccaacatttcctggtagaacaagcgcattcaccatatgaagtgcttcgagaagaacaacactatgggtccttatttatccataaacatcgacaaaattattggtaggtacgttaataaaaataatttcctcatcgcatcaaatatttgattataaaattttaaaaatcaacctgtatattaataactggatgattcaaaataaactagaaaattattttcttaaaaatttatagaatggtaaaaagatggttttaaaactcatttatttaaatactacttacatattcagatcagaggagattgtagcttacgtcatatgttatataagtaaaagaaatggtagaaaaagtaagagaaaagaagaccaggggagaagaaccttgtgattgtggaggaagactaggccacacgaaattcaaatctttcaaattcagcaacttgcttctcctcacatttgtcagcccctttatataataaacgttcctctttttcgtcttttcaacatatcagaaaatccctaaattcactgaaccctcttctctctctttctccccccatatcttctgattctcctccaactcctttattaataaattctcctctttcattgctacttgtcttcctcatttccctactagtacttgtttcacacagtttcttgatccaaccaaaaccaatacacaaagcttctcaaactccttcacctcaaagcttcttcctttacatctgaatcgttgagttaactcggatttgttctgcatcctctgtttctgaatcgtgggccatccttattttgtctcgaattcttcaccaattgcttcgatcaagctgcattggttaaccagttgccctaaagatcagatctttgagcaaaattttgtcactgatcttctaaatccaaaccagacacagcaaaacaacctctgtagatgattcgagaaatctcaaacttacaaaaagatattataaacattcaagacagttattcgaacaaccgagtcatggacgtcggaagaaacaaccggaaaaacatgagctttcgaagttcgccggagaaaagcaagcaagagttacggcggagtttctcggcgcagaaaaggatgatgatcccggcgaattatttcagtttagagtctctgttcctattggttggtctaacggcatctctgttaatacttccgttagttttgccgccgttacctccgcctccgtttatgctgctattggttcccattgggattatggttttactcgtcgttcttgccttcatgccttcttctcattctaatgctaatacagatgtaacttgcaatttcatgtaaatctgaaatttattatatgatgatcttaattaatcttagggttcttaatccaatgaaattgatatacaatataaatgtaagttataaatattacattaaattatcataatatatatatgtgagaatacttcaacgcacaataagagaaatggaggagaagagactgacataatatagaagcatcataagaagaaattatacaaaaaaaaaaaaaaaacctcacttcgtcatctcaaacccaaatcccaatatccgttaatttaaatcgtagtatttatttgcttattttcaactattcgtagaaattagaaaaccagtgaagcccaaaagcagaatccatttgtttcaatcgaaaatggcggtaaggtgatgctccaaaaccgccataaggttacgagtctggcttacttccacaactgcaacagcacagccttgaagctgtctcactgcttctacaagctgtcctcttagcctctgagacagtaaccgaccgtccgctttcatgcactctctgtacagcggcatgtacgctattgctactcttagcggtgcaggaaggtctcttaaggatatcgctgactccccttttttcaaaactctcatgaaattcatgaaatcgtcatggctttctctcattcctttctcaaaagctgactccgaccagtgttcttggagaaacgattttagatctgaaggaacggattcgtcttctgatgaccttgcgatgctgtctgccactgagtatgtagccgtggaatctcctaagaagtctgatttgagaagaaactctactccttggagagaccctccgcttctttctcctgctgctttgaggatttcgatgctgagagcggttaagacaggtggtggaacacgagggaggagataagcagctacctcgacttggcaacttgaagtggccgctgttagagccaagcaaagctccatgtcacggcaacctcttttcacaaaccattgaacaacttgcatgcaacctctctctgctgctctcattaagggacccaagaaggcaatggcattaccttcttccactaggcacttcattgttccgattttacaataatgcgaggcaaaaccaagagctaagtccacatcaacatctaagctgttcctttgggcaatctgctccaggaaatacaatatttgagcacgaaaagagaccttctataagtctagaagcaatcaaaagaatggaagcttacctgcaataagacgcggacaagttctgtactaccaaaacgtgaagcttcaaggaaacattggttcacattatctgcgccaccttcaacaagcataccgagcagtccctgtataacagtagctgacatcccagatgcccagccaggatcaaacgagttggagaacagagtgagcgggaaacaagctgcatcaaaggcctcagtgaagtctcttcctgagagatggtttcctgctagatctaagaacatcttgaaagcagaaagttgtagttcaatttcagcagccgaattttggctaactctatcctttgccccctggcatcgggagtggaaacctatacatttgagagcccattcagtgaacttctgaactttggcaccagcctctgcttttagaatctcatccccgttgcactcttggagacgctcatgcaacctatacatcatgtacaaaccaaatatgaactcacatgttaaacaaactgatttaaagttttcttaagcggaattgttttgtctatgacatttagtaacatcagcgcccacaaatactagcagtgtcatttgattatcctgacaaccaattacatacagatataaccaaacactataaccagtaaggaaaaatttgtgcagctacaaatatacctaaggttcccgtgagtgaagcaaaataaaaagaaacagggaaaaatagaaacagccaaccagtctaagcaccccaaatctgctttagaattatacttaaagagaaattaaaagattgcatgattacctttgagccataacagttactgtatcagaaagactcattgtccggctctggcaagcagagacacaagaagcgagaaacgaagtcctaagagtagctctagtaaagtcatgagcaccatgacatatgatcttcttaatcaatccggtgatcccctgaaactcaggctttgtactcaagaaccaaactgaatctagaccaacacacaacaaatcatttaaagtctgaggatcagccaactgaatcaatctctcagcaagttcccaatccagtgaggtaacagcgccttggaagagccgtcccaactcaattctttcttgcctattaagctttttctgctgctcaatattttccttctcaacgagatcatcatcccctttaaaatttagtttcttagcactacaaccacagcattctcccgaattagttccagctgaatcctttcctattaaaggtgcctctctcgaaaaaaccactttactcccctcgcctccttcaaatttctgagatgaagcaatggtttcagttttcatctcggaacagaaaggctcatcagggtacatctgatcacttaaattaatggtatcacacacaccttctttctccatccttgtcaagtctgtgactttccaaatcaaactaaaaaaagaagcacacaaagcttattcatccaaaagctatccgcacaacagaccacacactaaacaaagtatatagcaaatccaatccttgcatcatcgaaatctacaaaaccaaaggccaaaactcaaaacccggaactgatccctatcaaaatccaccaacacagttcattctaatcagcgtaaatcctcgatgccttctcttaaacgcactatctcttgaccatgggcataggaaatcaacaacaaaccctaaaaatgaaacaataaatcatcatcatcagcaaacggaaatctatcaattcgattaacagtgaacacgaaatcggacacccgatcagaaaaaaacgaatcgagcatcagaaaagagcgaagaacaacgaaattagcgttatacaaaagaagcagcacatgaaccatagaagagaaaaagagagagagaaaatggtgaaacctggacaagagttccattgagacagagagagagaaagagaaagagaggctgagaaaaaccctgtgcatcgggttctgtttttttatttttatttgacaaaagtactgctttttaatacaaaaatattctcttgatttattaacatttgtcgaatctttagttgattaaattctaattatagattctctcttctttctgtcgctgttaatctcccattgtaattcagaatctatgggaggggaactcaaactaatgactacaaatcatatggaggagacaaaaagacttggaattatttttaggaatcattcaacttataagtgttctcatttttttgttgtccctttagaaattagattttaaataagttgcgtcaactatacaaaaacatttcttatttttattctatctatattgcatcactaacatttttttcctttctatttctgtagtttaaaagactcgggtctttttacttctttgtttagtggttattattacattaagaaggaaaaagtaaaacaaatcatcatataaataagaggacgataaggatcggtcttcagctataaacaagtaaagaaagttgagattcgaagactctttataagtcattggatttgtagtaaataacaaattaacaacacaacaaattaacaacacatatactacaaattcgagttaaaaaccccaatataatatatgcatcgactactaaacgcgtttcaatgactggtaaacatatgtaactatctctgttacatattgaatgaatgatgatgtaatagtagatgctaacataagctcacaattatttgaataattaaagtcataaataaaaatcatctataatgcgtgtaagcttgcataaaaatacagtatataacttttatttaaaactattaagtatcaacatcaatcggaaaatgatttgcttttgaagttattacaactagtttattaaaaaaattgttatcatcatctcgattttaataatgctatatatacttagtcttttatttattgttattgtaatatgcgaaaatgacttgcaactgagttgcttacgggcaaacctgaccaagatgtgggaagttcgaaactgcaaatatgtataattcttaataaaaaaaaaatatatcctacatttcttcattttttttttaaaatactaatatttgcatactttgttgattgagtttctgaaaaatcataattgagtttttaaattagttggtttgtatgcatttgacaacttccaatttcttttaaatatatcacttttcatatattcttgtagagctataattttacaacaataattgaaatgtcgacccaaaaatatacatttaaaggcatttcgctgataaaaatccagtttagatgtatttgtattataggggaaaacaattatattattggttaatatttattagtcgatattgggtacatatgtatgttcttttacgattatgccatcaaaaaatttattagccattcgagaaacaaggcatctctatttttttgcttcttctaatagacttcttcgtcactgatctcccacgacgatctcccaaactcatttctctacgttcatcgatctctctctttctcgtttgctctacgaaaatcagccatggatgaagagtacgaggttattgttctcggcaccggtctcaaggagtgtatcctcagcggtctcctttccgtcgatggtgtcaaggtctccttcctctctttccccgattcgtttttcgtttttcttctctcttattttcaattgaacctttgaattcatgattgaatttcgcataattgctttgatccggattcaaaaaaacggatctcggtgagattagattagatctccccgattgtatgatctgagctcaggttttcgatcttgataatgatgatgagatttgattgtctagtttgagcatggagatgattgaaaatgttttggggcttttacatatgtacattgacctcttagtgttcccgcgatctgattattggttttgtggatgtgacgagtaggtgcttcacatggacaggaatgactactatggtggagaatcaacttcccttaatctcaatcagctttggaagaagttcaggggagaagagaaggctcctgagcatttaggcgctagccgggattacaatgttgacatgatgcctaaggtattatagctagctgccatttgttttgtttttatgctaatcttatcaatgtcacttactaactcttgtctctcaatgccattgaccagtttatgatgggaaatggcaagcttgttcgtacccttattcatacagatgttacaaagtatttgtccttcaaagctgttgatggaagctatgttttcgtcaaaggaaaggtacaaacttctcatttgatgtatttgttgctgacattttaaaatatcattttgctgataactcttaaattgttgatgaaaattttcctgcaggttcaaaaggtgccagctactcctatggaggccctgaaatcttctctcatgggcatatttgagaaacgtcgagccggcaagtttttcagttttgttcaagaatacgatgagaaggacccaaaaacacacgatggaatggatttgaccagagttacaacaaaggaactgattgcgtaagcttgatgttctaatgccttctagagtttatggtgttactgactttcaagtgaggatatacgtggctaaccatttatgtgacacttttgcaggaaatatggtcttgatggcaacactattgactttattggtcacgcagtggcacttcacacgaatgaccaacatctcgaccaacccgcctttgatactgtaatgagaatgaaggtgaaattttgtcagacttatctttcttgttataacagttgtacatttagttctgaagcagctaagttgatattcttgctttaaatggctggctagctctatgcggaatctcttgcacgtttccaaggaacatctccatatatttatcctctctatgggttgggagaactaccccaggtttttctgtcattctgacctttgccttctgtatgacttttcaagttttatatgattacatttttgattcttctgtgacttctctctctctcttctccttgttcaggcatttgcacgacttagtgctgtctatggtggcacatatatgttgaacaaacctgagtgcaaggtattttctctttgtcttcatgacaactctttgttttctttcttgttgtgcaagtctgcaagaggggaatgcaccgtaagattgtattggaggaacgctgtactcatatatagcaatgttaatcttatgccaggtagagtttgacgagggaggtaaggttattggtgtaacatctgagggagagactgctaaatgcaaaaagattgtgtgtgacccttcatacctgccgaacaaggtaatattgcagttcttagcatgtttaaattttcaattactgtgtccatacttatccacgtcaggaggatcgttataaagttgctgttcatgaaacttgtgacttttgccgttggcctgttcattatgttggttgattgccatagtttttatattcattcacacacttagttcttctcttcttgtaatgactagactgtggtcttgttcaggatttttggaaaaatctattcctttttgttgttttttatatgatgattaatcacattcaaacaggttaggaagattggcagggttgctcgggccatcgccattatgagccacccgattccgaacaccaatgattctcactcagtgcaggtcatcataccccagaaacagttggcccgcaaatcggatatgtaagtttttaaactttaactttgataagccagtggctgaaaggacttgaaaagttgaaatacctagtgcatttttctttttctttttctgtgttacataagctccatctcaatcattttgagatacgtttttaagcgtgctataagattttccttggtacatgtagccggaaaatgaaagtaatattattcaggaaccccctttagtccatagcttgaattgcacatacacagaataatttcgccgtagtgatgtttgttttgtcatatgtaatcactactctctctcttttttgttggatctgatgttgtgaaacctctacactctgacaggtatgtcttctgttgttcgtactcccacaacgttgctcccaagggaaaattcattgcatttgtgtctacagatgcagagactgataaccctcaaaccgaactaaagcctggaactgatcttttgggtcctgttgatgagatattcttcgacatgtatgatagatacgagcctgtcaacgagccagagttggacaactgctttatttcaacggtgagcgagatctctttagattttattgctgcctactttaagtttgatgggttttaagtgtctaaccctgtccttggtccttacagagctatgatgctacaacacactttgagacaactgttgcggatgtgttgaacatgtataccctaatcaccggaaaggtaaagtttgtgaaattcgctacggatatttgttgatgcggtggaaagacatctcaggtttcctcgacatttttcacaacaagttttgtttcttcttatgttgcagcaactggacctaagtgttgacctgagtgccgcaagtgctgcagaggaatgaagaatcatcaccagatcgctccctctctagttgattttctaaaagcttgttttgctcatttctctgtttccgactcttgctttcgtgttcttttttggtttgaactttgaatacaaaatcagaatgatccttcatgttttagaaactaacaaccatgtgtctccgtttgatgttggattcctcggttaaagacttataaatgctctttaaaactcaactatttttcagctccttacttttgtttctctttggagattttagattgatcttgaatatgatttaccaacgaaattttcagctaaccttgtgttgttttcttttatatgaacaagttattttaactttgcggttgtgtcagttaaacaaaataataattgattcatctaaattcgttttgatttaagctctccatgtggagatggtattggtagcagccagacaactcaccaagtcggtaataattagttattaataaaactttattttattaaatgaacaaaaggtttcgtggtgtagttggttatcacgtcagtctaacacactgaaggtctccggttcgaacccgggcgaagccattatttgctttttcttataatggaattttaaattgttaaaataaaaaaagcgccgttgccggggatcgaacccgggtcacccgcgtgacaggcgggaatacttaccactatactacaacgactctgttgattaactcaaacaactcatgaaaaataactattttaatcaccgaacaattctatagcagacgaagtcaacagtaaaaggaacacaattttctacttttacttttttttttttggtgagtatttcctatttttactagactagatggttttttgacaaaaaaaaaaaaaaaaaaaacacgacactagatggctaaaaataattattatcttcggaaacggatgttgacgtaaggaattgtagttatctttccaggtaagatatgttttatctttctaaggacactaatccaaacatagttcatgctagtcatttatagttgtttgaaacatgttgatttcggaataaaatttgcaggtgtgatcaatacaaatgaaagaatattatacatataaaccgtaagtcgtggttcaggtgtgggtacatgttgcgattttaatgaatttccaactcaaaacttattttaaatagatagattagcccatgttttcttatgacatgataatcatctatactcttttgagcaggcaacatacatgtttaaatccgattttactatccaataaatggtcaatatttgtagataatttgtagtgacagaaatttgaatatagttgggaatgaaatgaggaacacaaaacgagtttattattcagaacgaaacaaaagtgaacacaacatgagcttacatttattaggggaagcagtgaagctttgcccttgatgttttatttggaagcaaaagaaacttacacttgaacctctttacgatttggaagcaaaagtgaacacacacatgtaatgtccttatcacaccgaatgaaaagaaaagttacactttaacctctttacgatttgtagcaatggcagtgagccgggactccctcaacacgtccagcacaaactggtggactcttgtagagagctacacaacacgctaagcaatcagcatttgaacctgtaaacggctccggcccgcactcgcctaagaacgtgaagcatgcagcatcgctcttcaggatttctacatttttacatttcattaaattcatcagcaaaagattattatgtaagtgtaactttttgcatatacatatacacacaaagtataatagagattagagaatatattcgtaccggtggaagccaccaaaagaaccagcaagagaacggtgaagctaacggagttgaggttctttgccatttctttaatgctttgcgtttagtaagacttctttttttgctctttcaatttaataaactttacttcgatgagacaaatccacatgtgtagtgatctatttatagtcaaaagtttggtagatttgttgtaattgtttaatctctccctcttttctttaaagttttcccttattgagcaagttcataatgtcgccacaattgtgtattgccgccagtttttataacattttattttccattagtgggatcttcttcttatcacggacttgttttaaataatcaaacaaagggaaagtcgttgttgtctttatcgttgtaactcattttgtatacccatttttagtttagtttaatcaactattgtttgaaaaatgataaagttgttgtctttgacagagtgagcacgaatcttggcaactttttaatcataaaataaaaatgatttggcttcattagttcattaataaagttgagggtttcagcagcattgcagttatcatggcgacactatctcgtttttttagcatttccgtagtatgtgttaacttctatgcatgtcaaaacgaaatagaaagggatttgtcttcacagaacctaaaaaatctcgtctgccttttatcttaagtttcacattaattttatttagttgtctggcaaggtaaactaatcacctattttatcttttttggaggaatacttacgtttctaaaaattcttattttgttggattaattgctactaccattgttttgtttgctaaatagtatgtataatcttaattgggaaaagccaaaaggcatgaaagatttgaggcgtaggagtacgccttcgtttgtttccagccttaaagacgaaaaatacgaaaaagagatatcgatgttcttctagaaagcacagctcatttctcgtttatttatttattattctatttttgaatacaatcattttcttataatacgttcatattccgaatgataacaaagatctcttgtcatgctagactccttaaaaaaaggaagaaggtaaaactgaaatttatcagtgttaaacactataacaacatgtgcacgttttcatttcttttttcgatttagtaatatttcgagaaataaatccagtttcttcaacgaactaaaatagaaatatactactaatttgggttatgttctttcaaaatgttatgaatatcaactgttttcctcatccgtcttaaacaacgagataaagacaagacctgattttccctctaacgttgatataacattttttcttatatgtcaaacatatatcaaataaattagggaattaatttactaataaatgttaacacactaaacaattgcgaaaaaatactagtcataaacagaaaagcgaatgaaatgataaactaatatataaatcggaaaacataatgtaagcttaatttgttaataagcttggaaaataataagtaattgtacatgaaccatgtttaaaacagggcacgaaaccgtttcaatttacgtttgtaaatctttatcagaaaaacaaaaaaaaagatacgtacgtttgtaataagcacgtttataagagacgtacgtatcgtaatggaatagatcatcagggaggagaaataaagaacaggttggcagatggtaggagttagggattggctgaaaaggatcatgtcttttaatgttgtcacaccttatgatcccaccacactcgttattcaattgcattattttggacattattcattgcattttggataatgttcattgccacttcatccccgcatcgtttgggtttgtttcgttttggctcaatcagttttcttagagcaaagttatacttaaatgaagtggtatgtgtgccctaatataatataaaaagataaaacctcgaggatacctgaattttaaaaggcttgctcttcttacaaatgagaattacgtcactgtaaaactgtattgttaattcgttaaatggtaatgatatttacttggatatttggatcatacataacattattgaagtagatgatgatatttatttaggggaaattgagggggacgtaacgacgacggtgcatggtccatgtgtcaccgtactgatagttcggataagaaagaagataagtcatcgtatccacatggactttcttctagaacctatttttattatccaatagttatctttaaattgaaatattataacatgatagttctcttctcgtacgagtttgagtgaatcaaatccctcacggcaatttttacataattgaatgcctttttacttaaatctgaaaatacaaatctattaacttgaagaaatatttttatgtggtccttcaattaagatttatatgaataattttactagtcattcaaaagatttattcaagagagattatcgatccatacaaaataaaatttgccatattcgccgactaattaaatgcgtttacatttgtcgttttctgtaagtgcaaatttttaaacattgtccattttggattgtccgccctatcctgtagttttttgtgtgatccaaattgaacaatactagcatttttaaattatgtgtagactacttgtcgagtgtctagatcacactattggtttgaattcgtaattttactgtattcttgtttgtttgttttcggaaaatatctataacaaaataagtgataataatagaagaagaaaagacgataattatctagggaccgttttgttcagtgtcttctttatcttctttgttataaaagcctctttgccacttctcttaccaatagcatctccttcagtgtctcttacagtttccgatctatccaaatcatagattcttttatcttcacaatctgttagtgtctcgtagctctaattaggtaataactaatgggagtgtcaaagaagaaatcaggtgagattagaggagatttaatcccagggttaccagaggaattagcaattgagtgtttggttagagttccttttcagtttcattcttccatcaaatctgtttgccgatcatggaaatgcgttatctccagtcgttcttttatcaaggaacggataggttttggtaaagctgaatctcttctctgccttgttcaacctctgacttcaccaccgtctccggcgatgatggaaggtggtgagatgagtcagaagaagaaagaggaagaagaaggcgagtctcagatgacgcagcagctgctacaaccgcgtattactggaacgccactttacggtttaagcgtttataacgcaacgctggacacgtggcaccgagtcgcgattcctgaacggattcctttgttctgcgaatgcgttgcgattcaggacgcggggaaagtgttgttaatcggcggttgggatccggagacgttgcagcctgtgcgagatgtttttgttctggatttcttcgccggagaaggaagcggaagaaggttcagaagaggcaggccgatgtcggcggcgagatcgtttttcgcctgtgcttctgttggttcgacgaaggtttacgtcgccggaggacatgatgatcagaagaacgctctccgatcggcggaagtgtacgatgtagagaaagacgagtggtcgatgcttcctccgatgacggaaggaagagacgagtgtcacggattctcgatggcgacggatcctggattttgtgttttgagcggttatggaacggagacgcaaggccaattccgatctgacggcgagatttacgatccgattacgaattcatggtcgacaatcgagaatgtctggccgtttcccgatttgagtccgagaggtcgcaccgccgcggctgctgctgaattccccggagattttagaggttgtcggttatggtgttttattgatagcgagagacagagtcagcctcattgggaagttgaagacgattcgatgaaatggaaggtaattatggatacgattcggcttccggtgacgacgatgacttcggtttttgctggaagtttgagtggccaagcggtggcaatgattggcggtggtggtgaagaaagtggaacgatgatggtgaagacgacggcggagaagaatggcgggaagtggagccacgtcaacactccctctggtttttcgagtcttcctttctcgtgttcttcaatctacgtttgaagaatctctgttgtagaacactttgacttaagtcaacgttaatagttaatacttaatacataaatcaagtgagagtgggtgatactttaatctgggtttttctttatttatacaacatcaaatcttagtatcgatgtaaaaagaatggtattttgataattgaacaaagtcacacaatgaaaagaatggctaggagaagtgttcaaagtaattgccagtcatcttcatgttcctcaccagagatctctgtagatgtctctgtactgctgctggtttctgcaatcccgcagtcatttcttctgtgagattgagtcacagtgaagagaggagcaccattagagtctccggctagctttgttgctcggatacagaaatcatcaaaatcatctgttacaaagtaggattgaccacgttatgaaaaaagaagtaaccgaatcaaaccgataacttgtttatcccaaaaccaaagccaaatcgtaaataggattgaccaccactcttataaactggtaatacctttgtgctggcaatagaatccgagagctagtgacgggtcgagtgactcaagtggaacataacggagggtactgtagcagatttagtaggattactaagaacaagtatgaaccatgtagagacagagaactaaatgaggcaaaaagatcaatcaaactcacttgcaatggtaagacgatgtgtcaacatcttgattttctttcttgactgtcactacctaccaaccattaccgataaggctcaatcagtgagactgaaatatgatatgaagcacatggactgagtaatatcagtccccaaaccaattagacaatagataaatgaatgtgatggagacaatataaggaaaatatatatggaccaccttatatgtctcaaacttcagatcgaagtgttaagttttttcttggaactacaataattctagtttgattctaaaataaagatttataaggagtgatcaagaaaacctgttgaacatcatgcggatcaaggtagaaacctttgtcttcttgaactccaactatgtaagttgatgcacctggtttgccgcccaaaatgccgaggctttgagggaacgtgaaagtggctatcagagatggaatgtacctgagaacaaatttagtctctttcttcagaaagattttgataattgcatagccaaattcaataagaagtcactcaaagtttgctatcattatataccctccaatctgtagatttgtgtgtgcatgaaactaaaagcaatcaattttcttttaagactgataaaatatcttatgaagaaaaagaaaagctaaattcttgacgtctatagcacttatcgtctagaaatcgttttgataaagtcacaaacctggggttcactctgtcaagcccgagaaccagagggaccaagagaagaattggcggccactcagtttctccttctgaaaattccaaacaagttttggtgacatcttcaatacagagaattggagctccacctctctctccgtcttcactgccagaaacgatatgaacagccatggaaaacgacttgtgcttatcatcagtttcttctttgttcttccgagctaatgattcccatgatcgacaaacagcatatggtcctacccatgacccagcagccaggccataagattctccagctagtataagattgtgaatcgagaatgctgaagcctcagtatcaccaaaaagttctaagatctctaagtatttctcatccgcgggctgcatttccaaaccaaagaagctcattttaagtggcttggattcatgaccaaccagatttatgatcctagttgttatatattcagttactagaacatatattggataacaaagctaacctcggaatcctttttcctccaagaccttcccagcctttgaaatagcaacgcctgttaaagatacataattttagaccatgcattaagaaatctgaagcctccagcaaaatgataataataactacctgtgcgaagagcatctggccgcttcgaagcatgcaaccccagtttacatcactagtataagttgtgtctccaataggctcaaaacctggaaatgccacagtgagtattctgtcaacagttttatgctggtttgagtttgaggggggggagcatacaaacctctacgatatgtcatcagtattaaggatgaaaaatcttgtctgaatgcggccaatacacggccagcatctgcttcttctgaggattcaccctctgagattttataacagacacccaggagccatatctcactagtactgctggaaatacccgtcctactcggccctaatacacggtcttgaaatctcctaattgccccgctagccatagaagctgtttttaaaataactgtccaactactatgtgtggtgcaaactgggttatgccctgaagttgaagcttccctacacagttgagaaactggggaggaagaggcaaccacatccgagcataacgtcaagtttgacttgttatcactagacgcggaatctgaaactagagatgtcggggatgatatatcacgcttttcacttgtgcttgatgaagaacattttgaaggaacaaatctatcacatatagccttcattacctagtcattaagcaccaaatacaacatgtctgtctcatagaagaaaactcatacccagagaatcaacctttgtctgcaataataaagcataagagataaaaatagatcaggctaaaattgaacagagatacctctaataattacttctcaaagtgagctaatgcattatcttctataatctcactattacactccatttcaatatgccccaaaaatcgaatttaggaatcaaagatgatctaatgaacacaacgagtaagataaaggtactcgaatccgatatgcacaatctcgaaaatgaagaaatccacagcagcaatagaaattcgagacacaatcatgcaataagtaaaagaactccgacgcaatttctccagggcggatctctacagtaatctcaaatgatcaatcagtcaactataaaattggcaactaaaatctcgtatatatacaccagaaagcataagaatcaaaaggaacaagagtaagagctcgattaatcactaaacaaacgcagagagtttcataatccgatccgaggaacgaaattttcacaacttttggaatttctagcagaatataaagatagatcacctgaaaaaacaaatcggatcgttgaggctgacttgatacgacctccggcgacgaagacgagaacgagagtgcgaattaacggagacgaagtttgaattgcggaagatcgatttcgtgtaaccttacgaaataaaagtttcgtgttctctctctctctcttctctattttacgtaattatatcttttaagcttcgaatatggatcattacattttatattagcttcgaatatgtttttccattggcagtataattttgtcactagttcgtatttgtcaaatgtatcagtgttaaactaaattaaaccggcgacttaaaccaaataaattttaccggcgacttaaaccaagtaaagcaaatcgaatatattgttcaaaaaaattccttgtgcgttgaatatcttgatatacagaatatcaattttacggtaaaaaggagtaattatttagttaccaattgtgaatgatataactgtctggaataaatgcaaatgactagtaataaattaattattttgttaccaaaaacaaaatgggtttgattgtattgggccagtccaaaaatctgaagcccatttatgtctttaaacggatgaatggaaataaatcgatattactcttttacccttttaagccgatttattgccttttgcgcagaaggatttcaaaatcctcaaaaggaaaaacagcaactgccgctctttctccgttacgtcttttcactctctgcaaatcggatccgccactacaaattcatcatcatcctcgtcttcttcttctcttcaaatattaggctttgaaaagtttcaacatcaaatttagatctttcccaattaatccggtctattgccatgtcttcctcgaagaaggttacgttcgattcacaatcttcatttcttctctttatgaaattatttctcgtatgatcttagtttttctctgatttcagggttccgatcggaatcaaatcaggaagtcgttgaggaagttaaaaaagcagattggggaattggagaaacttgaatctccggatcggttgaataatgtgaagcctatcttcatcaagcgcagtatccttttctgttgtcacaagatgctatttttttttgtcatacaaaactgtggaatattatttgttttcacatgacgagcttggttttaagatatatacttgaagaagaaactcaagaagaaagttaaggatcatggcatattctgttcttgctccttggatcctggttcttcaactctttgtggcagcgattgcaattgtgggtatgttccatatctgatcacaagtacttgtctgactaaatattcgtggcggcattggttctgattgttgatgtattgttggttttttccttgatgtataggattctactctcaagctgttcgtctagttgcaaatgcagtagtgaatgcaccaacaagccgttccaacaacgacatatcaagaagatgaagttagttcaggttggtttattacaatttgttgtcttatataaagaatgcattttcaacgttagttgaataagttgttgcttgcagacagagaaatgtggatatgggattgtagcagatgaagatatcaactcaggagagtttatcattgaatatgtgggagaaggtgatgttattacctttggtttctcatatatagttagagtactgttgtgattactctgcttactcttatcaatcttcttatatccatttcttattgtagttattgacgacaagatttgtgaagaaaggctttggaagctgaatcataaggtcgagacaaatttctatttgtgtcagataaactggaacatggtgattgatgctactcacaagggtaataaatcaagatacatcaatcacagctgcagtcctaacacagagatgcagaaatggttcgtttgtaacttattatccatcttctcacttttcttctgttcaaaacaattgagcaaagttatagatcatgaacctttttgttcccatttaggataattgatggcgagacaagaatcggcatttttgctacccgtttcataaacaaaggcgagcagttgacttacgattaccagtaagaacatttccttgcatcacaacaataaagtatttgaatgtaaatgtttagttgtgtgatactaataaatatagcaggtttgttcagtttggtgcagatcaagattgctactgtggtgcagtgtgttgcagaaaaaagctaggtgcaaaaccttgcaaaactaagaacacaaccttagaagaagctgtgaagccagtggcatgtaaagtgacctggaaaacgcccaaggtaaatttgagctttgccttacttttttttagtcatcctgtgattgctaaacagtaacttgtcctttcaaacatatggttagggaaaaactcgagggagacgcattgctggttagtattaattatttggctcgattatcgacaagcttctcaattcagaggtaagagaaaccaatttggatgcgtcaggacaagcttggaacaatcatagccagaggaaaatatgttgccgggactgcattggtgcggtgatctggttagcacgtcccatgaaccaaaagtataactatctttctttttttctcaaaaaccaatttcttccacaccaaagaacagtattacacggctcagatgaaggttttgactctagtagttgacatttttcaggtgttttggaatcattacacaatatgatgagttttaaataagcacttggtatctattcatttgacttattgccaacactgttgttcacattctatctcagtttacgaaatctaaagaatgaacattgactttgtccaggtcatgtatgaggatggtgttaccgagatcatcgacatgtgcagagaagtttggaaggttgtaactgcttgatattgtgactgttccaagtctgatttcattcccttacataggattacacttgaattgtcaagaaattttgtaaccaaccaaaccgtgtcggttggcaaataggtttagactttgttgttgtatgtatccaacttgaatcagtagttcagtagtacattacactgtatgtggaatctttggaccaaataaagaaaagtgtttttggattttaaaccggggttttggttatttaagagacaaaaaatctcatacccggtttgctctgtctataactcgagtttgttaagcacgtgattctccttggcaatgctgctatatcactagcctactgtccgttgtagcggatgatacccacgcgccggtgaccgacagtggatttgccgttaccggtggtaggtaatgtggggtcgtagctcacctacctaactaaattttctttttcttatgtttagttggaaaataagaaaaatataaaaactagttttttgtaaaggaaaaggataaaattactattatggaaaagataaattccaaaagtgaggaaatatgtatttagcacaataaaaagtgatagcaatgtgagaaaaaaaacgtgataacagaaatgctgtgctaaatttggatttctttgttgaaaatatatttacattgataaatattatgtaattagaaaaaggaaaattcaaaatagatgtgtagaaaaacaacaatgttgataatataattttttatctaaagtttttaccggttaccagttaccaccaaagttgttggatctctatcttcatttttagagattagtataaatgagtgagtaaacaaaccagagagaccaaacttgcctctccaccaccacttcctctacctatctaattccgaatctggatttggatttggatctcatttcgattcaacgatgaaggtggttgataagatcaaatccgtgacggagcaaggccaaacagctttctccttcgagtttttcccaccgaagacagaagatggcgtcgagaatctctttgaacgaatggatcgattggtctcttatggacctaccttctgcgatatcacttggggtgctggtggatccacagctgatctcactctcgagattgcttctaggatgcagaatgttatctgcgtcgagactatgatgcatctcacttgtaccaacatgccgattgagaagattgatcacgcgcttgagacgattagatctaatggaattcagaatgtgcttgctcttagaggagatcctcctcatggacaagataagtttgttcaggttgaaggaggatttgcttgtgctttggatctggtgaatcacattcgtagcaagtatggtgattactttggaatcactgttgctggttatcctggtaatcaaaatgctcccttttaatcaatttcattgttggtttcgttgttgtgattttgatctctaattggggatttgtgtgttatgaatcagaggctcatccggatgttattgaagctgatggacttgctactcctgaatcttatcagagtgatcttgcttacttgaagaaaaaggttcagatttgtgtcttggttttgaattttgtgtgttgaattgtttgtgttgtcttgatttgatgggtttagtggattgtggcttgtggtacaggttgatgctggagcagatttgattgtgactcagcttttctatgatactgatatattcctcaagtttgtgaatgattgtcggcaaatcgggattaattgtcccattgttcctggaattatgcctatttccaactacaaggggttcttgcgtatggctggtttctgtaagaccaaggtatgttgtgatctctttcatctgtgtgatgatatggcttgctctgtagacacatgtcgtctttgtgcttaaaggctttaagatgagattgagtttactgcatctatctagttgcttggtgatatatatatagacccttggtgatgatgccttatgactaatgtgttcagatatcatttttctttgatttatattccactcatgattctattattgcatagatacccgctgagctcactgctgccttagagcctattaaggataatgacgaggctgttaaagcctatggaattcactttgcaacagaaatgtgcaaaaagattttggcccatggaatcacttcccttcatctctacacattgaacgtggacaaatcagctattgggatattaatggttttcttctcatttccttctaaattggtttctgtgtagtaatatttaacacatggtattgtgtataccggagaacctaacagtggtgctcaaattgcagaaccttggtctgattgatgagtcaaaaatttctcgttctctaccttggagacgccctgcaaatgttttccgtactaaggaagatgttcgcccaattttctggtaacctgcattttgtttctcttgctcggagtattattacagatctttaactttaagatatatttgcggaggaataatactgttacttcattttttatctttgcagggcaaaccgtccaaagagctacatatctagaacaaagggctggaatgacttcccacatggacgttggggtgattcacacagtgcagcatacagtacactttcggattatcaggtacgtaccacatatttatcagttttctgacatatcgactttatattttgaaaacttgaattctgaaaggcttgttttcagtttgccttctcaatttgcttaaattgtatttgcatattgttatttagccctaccattatcacttgtaagaagctgcttgctttgcttgccatctcttctgcgtttttcattgccaatgagtagtgctgatataaatgcatgtgttgatagtttgcgcgcccaaaaggacgtgacaagaagcttcagcaagaatgggtcgtcccactgaaaagcattgaagatgttcaagaggtaggctttactttacggacactcgtacaaattgtttcgatctctttccctcatactcacttgcacattttcatgtaaaaactgtcacaaatcagaaattcaaagagctctgcattggaaacttaaaaagcagcccatggtctgaattagatggactccagccagagacaaagatcataaatgagcaactcggaaaaatcaactccaacggtttcctgaccattaatagccaaccatcagtcaatgcagccaaatccgattctccagctattggtaagaaaactcaaacttgtgatcacaaagcataccataacgttccaaaaaaaaaaatcttatttgacttgtgattcatctgtcatttcttaaaaacctatttaaaccctctagagcttctgtcttagcttataacataatgtttaaattgcattgggaatatctacttggcttataacaaaaatgtataattgcaattgatactttgcaggatggggtggtcctggtggttacgtctaccagaaagcttatctggagttcttctgttcaaaggataagttagacacacttgtggagaaatccaaagcttttccttctatcacctacatggccgtgaacaaatcagagaattgggtatcaaacaccggtgagtccgatgtgaatgcagttacttggggagtgttcccagctaaggaggttattcaaccgacgatcgtggatccagccagtttcaaagtctggaaagacgaagcgtttgagatttggtcaagaagctgggctaacttgtacccagaagatgacccttctagaaagttgctcgaggaggtaaagaatcttcttcttttttcttctcttcttttcagtgaccagattggtttagctgtaatgatgatggtatgatccaatcgaatatgcaggtgaagaacagctactatttggtaagcttagtggacaacaattacatcaatggtgatatcttctctgtctttgcttgatctccgagaaaaccaccggcgaagaggaaacattcgatttcgagatttgttttgtaccttttaaagttatttttgattcgtaataaccttactttgatgaatcaacaaaaacatcagtttgattgcaatgaaaaaaatcgccttagcggtttgttctttctctcttgtgtcaaaacaacatcacaaaatagcttttaacagaaatcaagaaatgttggcatttcttaaagacttggaagtaacaagaccagaagatgtccgcatcaaatgctccttaagcattgaaacaccagacgcatctgtcttcaaaagtggttgcaccaattcccacatcttcttcttttgaacctgaaacaacaaagaaaacacagaacttgaatatgccatgacttaagtcttgcagtactgaaatgattagtgctttgcaggctaaatgaccttattaggaggtgcaggttcaggaagctgctcgagatcttcttcgttaccaaaccaaactctatctccaggaacagagccttctggtggaacaagaagctcaacattttcatgagctgcgtcagatgcagctaaaagcataccacatgacttaacccctctcatattcctcggcttcagattagccagcaccaccactgatgcaccctgcacagaaccaaagtctcggaaaattgagccaatggtcaaaatctaatggggaaagttccgtacgcttatcacacaaaccgatcccagttctcaggattggaactatagataggaacaatgaagctaacctgaaggagatcaagaggaacatatttgacgagaccactgcagatgattctgggctcagcttcaccgatgtcgacttcttcaacatacagagaatcagcttcttcgtgttgccaagctttcacaattcgtcctacttttatatctaacagattcgccgtctccttcacattctcctcttccttctgagattcgctcttcttctccgattcatccgctgaaaccgtcgtgccggcatctggagccgccgtacagaaagtagcaactcgaggccaagagcttcgattacgctgctgatggttatatacggcggagactcgaagagacgaggagattgccgctactgtcctcctcgaggaagacgacaagtaacgagggaattcgcggcggagaggaagcgatgagatttgaacggcgagaactccagccttcactttcagaccaccggtaaaaacagctatcgtcgccgccatggaaatgcctcgagtagctcaaaagtctattggctaagatctctgtgtgatcccagtgttctctcttctttaccatatctgtatttatatatctttttatatgatcttgtcaaattagtagctttaccaattctccaaagcaaggagctttatcaatcaacttctagtaagattgatgagcaaattcatgttcatggcaaatacatagtttttttttaacagaggcactgaagctttttataaaaggattcaaagcttgtgttaacgacgacaaaagaaacaagcaagtgtacaatctcgacaacagtatgagataataaaggtaaacagagcaaaacagaggatctgaatcagtagtcgtctcccttggagagaacttctttgcaagtaggtcgcagtaaaatggtgtgttcaaactgtgatacatagcttcctttcacatcacacagaggaggatacggctgaaataaaacagagagcaagatttaagtgtatttagatctcaggatagatccgagataaatgaatcatcatctagattgtgcaagaaattacctgaacaatgccagagtcacaaagattctttagagccattaagtatttggtttcaccaatgcggtccaaataacgtctgcagaaggcgagagtcgagaaattcttgttaatggttgcaaggagttgttttgctctaggcaacctcaaggggacgtggccagcgtcaaagttcttcatgtaatggctacattctaggtcttctctcacatatcctttccctgcaatacaacagatacagaggatcaaacattggtgaattccaaagatgcagcggccttttcttttaatagttctatgtccaagtttcttttaccggttgatccaaatgtttcgatggcataaaactcgccctcttccatctttgtctgctcgcctccttttacgataggaacagatttcccagcatgtatctgatagggtccaatgctgtgaccattcaagtttcggatacttttaactgccaaaaggacataacatgttaaggtttattattatattaacgtcaaaatgtgacattgatgtaagagccgtaatctagatgtgacattggataccttggaagacctttccgttgatttcaacctcataagactccatgacctcctgaatagcagcaccgatatcacagagacggacatcgatcccagcttcctgaaccagccaaaaaaaaccaccaaggaggtcaaaagtaataaccaaatagttcctaacaaatcaaagcctaaatgaaatcaatttcacactgaagagtttggaattataaaattccatagagacgaatagaacaaaacactacaacattgctccaccctactggtagttgtacattcataaaggactgcatattagcaaataggtccagaccttgataccggtatacgtagcttcacgagaggctgctaagagaggatcgaacatagggttgaaggcaactgtaaatgcacagtcaataatatgccctgcaaaaagaagacatgttaattttatctgacaatttgcctcaatgaaaaacaaaaacagaaaacagatactgccataccatcaatatgtgttccaaagtccaatttcataacatcgtcgtactgaagtacagtcttatctccagagtttggtgtccaatgagcagcgaccctgaatgttaaaaagtcattagagaaacatgactaaagaagaagaacaaacaattgttgatcgaaagaaatagttaaaggcagatctcataaccaaccaattcaaagagcatcctgtagggaatgcaataccagcttgaagaccattctctgatatcaacttacgaacagtattctctagggtctcacatatatcagtcatcaacattccaggcttcactatgcttctgacatatttacgaacctgaaaaggattgggcaaaacgttctttcaagcggctgcagaaaagagccataaaaaaactctaatcaagaagcaaacctggcgatgaacttctgcagctcggcgaacagagttatatattggcttttcaaaacgctccagctctctcttctcttcagatgttgttctccaaagattactaaaaaaacagagatcaagcagacaagcaccaagatctaaacatgtcggcacaaaaagtgtgataaaggtaacaacgaagagacttgacacaaaaaaaaaggaccgagaatccaatagattcatgagttgagaagataaaagtggtatggactcttccacaaagtcaactacaacatatgaaagatttccctaaaagctgtccacaatggtaaatagaatgctatgaaacttactcatccttatactcttggatttcaccttcaggaaactctcctgatgggaagagctcaacgacaggaattgaaggtggatcagtctgttgagggagttccttcttcttcctacaacataatcacaaaacaatcactaaagcaaacaccaaaagtttgaagtcagaagaaacaaaagaaacaaaagcatctcttacttgcttttatttttcttcttcttcttcttcgttgaagtctcagcttcatatatcaaaaacatatgtctttattaatcaaccattctcagaacaaagaatcaaatcgagaactttgaaatcaccactataacattcctaaactccaaatttttcatcatctactaatcagtaacacaaaaagatcaaataatttctcaatgggtacataaattaaagacgcaaagacaaaaccaagtgatcaatcagaacaccaaaaaaagagctaatcaattaattcacctttgcttccttcttctccatcgttctcctcttgaccatcttctgcaatctcaagcttcttcgaaagctcagattccaattgttcctctttaccattagaggactcagcgccgccattctccaccaccggagctacaacagcaacatcaggactttcgctcgccatcttcaaatcgattttcaccttgataacaaagcactaaccaaaactcgatgagaatcgcaggaaaaagctactcgcacacgaagaagaagtaaaccagtctctcttttgtttaccctttactctctcctccgatacctttgtacggcaaacccttgatagatttttgagaatttgcaaaatgagacaattaaaactatattatttatgttaaaaccccccgtatagtgtttcgttaattaatgggccttaccaaaatttcttaatgggtcgggcttggtttcttgtaaatattctctaaacgattggcggtgcctatatcttattcttatgttaattttcttttttgcttttgaagtttttgttaagttaactttttacttatgttcgctttgattgccaagttgtggagataaggaaattatgaattgtatatatactagtagaaaaccttggtaaaatgacacaagaaagaaaaagaaaaaagagaaagaacaagttttggtgtggtgaataataagatgatgttcactcttccaatgataatcgcattggccgtagttttaggcattatggttgtggtagttttcttggttggtctttttgtttacaaggccaacaagaaagcacgagaggacgcccagtttgttgatgtcagaggcatctaagttgatttgccatttcacaattatttgaattttttccttttgttagtttctttcagatttttggttttgtttctttcatatttaatgatatcctaagtaatagttatattttatcatcattgtgttctgaattctatagatttttttgttactcctctcaatcatgcacatattcacatcacgcaacaaaaccaaaccaatcaagcaaacaaattagactctcgtggttcaacataaattaaccaaacccttgttcttcttcacaaacaacccgaacaaacaaagatcttcataaaaaaaactatcaaacttgagagcctttgcctaaaaaacttcatccgacacataaaacataaaatatagtaatcggatctaagcactaagaacttttttttgttgacttgaacttcaatgttatttttttgttgcttatggtaaatactcgctcaataccaagacttagactaacttctggaccttattgccttgcgccacacgtcaaataagattatcactcccaccagaatcaattgatccaacctttaaaaaagttttcattagattgttcattttgaacttgagattttttgagaatttccagaatgagacaattagactatattaaaccgcctcatatttagcttgccttaccaaaatttatttatgggtcgggcttggtttcttgcacatattctctaaatgatttgcggctaccacacgtttaaaggatttatttgctatgttactgttatgttaaatattcttttttgcttttgatttttttgttaagttaactttttaacttgtgttcacattcattgccaagttgcggagataaggaaattacgacttgtatatatacgaagaacggaagaagcttgttcaaaagacacaagagaaaaaaagatagacaatatggagttcggtctttcaatggtaatcacaacttccgtaatgttaggaattgttattgtcgcatctatctagctttggttttggattttatatacccgcaataaaaatggagaggaccccaataatgtcacatcgctatagacatatagttatttttttatttcataattatgttattttttcgttttttcttgtgatattgtaaccctatgaaatgttttctcagttatttgatcattgtgttctgaaatctacagaattgtttgttactcttctcagtcacattatcacatcacgcaacaaaaccaaaccaataaaaaaaaaacaaattagtcttcttcaaaaacaaaaaaaaacaaaaaaaaaaactgagatcttcaaaatcgttcaacaaacagccttttcattgccttcgaaatcttcacccgacacataaaacataaatatagtaaccagttgcaacaatttcatctctacaaactctttgaaattcctgttcattgtcttcaaagaacgtgttcaatgtactataacaagtttcttaagagcttggttttctattacactaattgacaaattaattaatttaataactatgaaaaaacaaaattaatgtggcgttacagagacaaagagattgtgaccaaaagccaacggctcattttctcaaaaaaaaaaaaaccgtaacgtatcttcttctccgagtgttggcttaaattcaaaaatccaattataatctcttgaagaccgtgacgaatcctcgtggccacttgaatctccgactatttcgaaaaagttatggaggcgaaaaccagcggacctaagcaaattcagccatcaacaccggctcctccgccttcaacgcggcggccaagagttagagaagtaagttccagattcatgtctccggttacttcatcctcttcctccgccggagatctccactctttgacttgtaattctccaaagcagcaccaccttcaacaccaccagattcaacgctctgtttctgctcagagacttagacgtcagttaaaaatggcagacggagatgagaatcgctcatcagagacggcggcgcgtagcctagactcgccttttacactctcacaaagccgaaaatcatcgaaaccaagtcacttgaagccgctcaacgagaattctcaccggctcgaaactcctacaccaatggttcctcctccaccgtctagatcacggctaagccaacaaagattaccaactgcaacgagacttctccaactaagcggcatatcagcctgttatgagaaagaaggaatcatcaacattcaggagaaacctaaatctaacggctcagatcagtttccaacactttcttgtagaactcatcttaaagttttcaacaatcctgtaccttcttctcttaatcgatctgtgagttcaccatcttcaagctgtaacgttcgtgagagcagttcgttttcacgtttaggcttgccattgcctccaatggcacccaaggttccagcggatactaaaaaacagaggaaggttacagagcaattggaagatgtgcattctctgaaactgctccacaatcgttacctccaatggagatttgcaaacgccaatgcacaagtgaagactcaaactcataaaacacaaactgaggttaatttctctgatggtctgcttttatggtaaaatctttgaactaaaggttctgtttatgtttaatggtgttttgttttatcttgtagaccatgatccattcctttggttccaagatatcagaattacatgattctgtgcaaaggaaacgcatagagcttcaacgtttattgaaaactaaagctcttctcgcgattacagaatctcaagtaagcttaaagatactttaaacttccatattattgactctcacataaacgtatatgagacttatgagaaaatgtttcacattatttcagactccatgtttggagcaatggtctgctattgaagaagagtattcgacttcggtgtcacaaacaatccaagctttttccaatgcttcattacggcttccactcgatggggatatcatggtatcttgtgctcatgagtaatatcaactaggaagaatcatctgcatgtacgtatcaactaagagtttgcttgtcaaaaaccaggttgattctaaacagttaggagatggacttgtggctgcttcaaagattgttgacggcattacacaaaatgttggaaactatatgccaaaggttagtagaagaatagtatcaatgtcagggttttattatttctattgaagattgactgtatatcagaatccttgttgataatacattttgcaggcaaaggagatggagagtttgttgtcagaattaacaagagtggctagaagtgaaagatcattgacagaaaattgcgttgtggctcttcttaaaacgcaagcttcacaagtactcaacctttctttacataagttgagaatattttaaacttttatgatcatcgtgcatcctttttttttcctttgtataagagttttaaaagatctttatatatatatatatatatgttttgcagattgaagaatgttctatgagaagtcaacttatccagcaaacaacaaaagaagagtcatcttctaaatgagcacaactcttgttctactgaaagagatttatatcgaatgagtgtagcattaaaatcgattatagattatacagaaataaaataaaaagactttttgacaacatcgttcttaaaaattgctcaagcatataaatctccaaaggaattagaaaagacaataacgaagtcacattgatcaagaaaacacacatacacacaagagaagaaagaacaaaagacactgttcaagagatcggaaacaaactaaagaaaaaagaacacgagacattgatcttgataaagaagatcagaaagcacactaacgtcgaaaaagaaaactaaagaatcattcaaaagcccattgattctccttacgaatctcctcttcctcctccggtgtaaaatcgttctcgatgccaagaagtgcacgaatctcgtctggtttcttgccagtgatcatgtcagcaacagtttggcaaccaaggtcaagcaggtcttttatgtttaggtaattcgcagccagcataacatcaaagagagtcgacgactgttccagggccttcatgaactcagcgtcccacttcttgagttcgtctttgctctcttcggttggtgaatcagaaacgacgtgtttcttgcaatactcgatcaccttcgagaggatgactcctgtaacgtttgcgatagggactccattggcgacgcaatcgtcttcaatcatatgtgctatcgtctgtgactggaccgcgactgcttcttcgacctggaaagattcaccatcggagctcagcaacataaccatcttcgacatcgtttccttcttttttctttttgtggtggcgatttttgtttacaaggttttcgatgatggagagatatcaaaaggtgtgtatttatagagagacctaattgtgagagtcggtataattcttgccttttttcataatggatgaaattactattttaacctaaaaggaaaattcagttgagtaaaccaatcctaaaccgggtttttgatggatctagtcccaattgatctaatttcggtacaaaaaggaaatcagatccgaatctacgtgtcataatgaacggctctaattcaatacaattgtaacaagagtttaacgagtgaaccaacaaaaaagaggtaaaaagaaaaaaaaatggaaactttctaaaacgttacatgtgtatattccatattttaaaaaactccgaaagcaagaaaaatatctacaaattttgtttatgtcattcaaaacaaaagaaaagaagaaaagtaattatggtcacgtaaatttatcatgtgttccctcttgatatagccaaattttaataaatccaaaccatatctgcctctgtttaataccataatgattgcattttgcacctcatatcgaatcatcccatatttttttcttcattaaatccaccaaattgtttctttagactcgaattttatatagttgtaggcttgagtagaggttataacccaaatcaaatttgatgataatctcaaaagtagcaaacgtttaccttattcttaagagaaaatgaaaagaaaacccctgctttgtcgcaaagagaacaaaaactttacagagtaaaactttcacactatttttattttttgattgttcaatcttgaccatttacatcggtctgattacgatacaagaatataaaccaaaataaccaagttgaatatcgaaattgaagtgtcatgtactctgtttcggattagaaaactcaattacagtaagaaaatgagaaaaagatttgacttcacatatattcaagaattgcttcagaaacaaaagaaagactcttaacaacatcgatcttaagatttggttagcataccaaaatccaacaaacgattcgtctctaaagcaaagatacaaacattggttgacttgcacaccaagaaatcaaaagaaacacaccgaacaaacaagagatagacgaagtcttagtcatcaatctacatgaagcataaagaaaactgaaaacacacacacactaaagaagaaaacgatatagacgaagtcaccagctacgtagatttgcatcaacaactttgatgatccgctctctcattgaaaagcccattgattctcctcacgaatcttagctacttcctctgctgttagatcgttctcgatgttgaagtgcgcgcgaatctcatctggagttttccctgagagcaaatcagcctggagcaaatccgagacagttttacatgtgagatcaagaaggctttgaatattgagataattcgcagccatcataacatcaaagagaatggttgtttcgatcgtcttcatgaaatcagcgtcccactccttgagatcttcttcttctttgctcttgacgtgcttctcgcaataatcgatcacaatcttgagaatcttgcttgtgacgtttcgaagcggtattacatcagtggcgcagccgtcctcaaccatatggtttatcgcgattgatttgcgtgccacgtcttcgtcgatctcgaacgatttaccatcggagctcttcaacatgatcttcgtcgacattgttatggagcgatttttctctggaaagcaaggttgatgaaacaagattgaagaagaatttagagagcgatttgaagaaaaatgatgtaacgaacttatgaatctatgcgtctgtgtatttataagctccaactgtcagagtcggtgggatcaacattttcagtggagtaaaccaagctgaaccgggtcgaattttacaattggcccagtttcgtagattcggcccaaaacttgatcgagatggattaaatgtcaaaagaaaaaaaggatttggttggtgttttatgtgatttgttgttattctcactcacttcaagatttgccatcaaagacaaagtacaaaatgtaacaaacacacaaaaacgtagttatacaaattcgggggtttaacatcagataaagctacattacatataatcttgtaaagctgaatgatacatattctagtaaaaataattaaacgttacataaaattacactcgtagatttcacaccaacacatcttctattgagaagattctttttcaatgtctggtatagggaagttttactagcttgttccatactcaagtaattcccacctgaatggctgaaagacatatagcacttccgggcaactcttgaacaaaagagcgacacaaacgcaaaccgctgctatcgctaccatcgaaagcattgctggcctgtaggcaacagacttgtggtgcgttgtgacaaacacacgtttgtgatcacagagcttacattggtttatctgtgttatctccaagcttgaagaatccattggactcctcttttcttgtttgtgctcaatgttgaaagactcaggaatgttgaccaccacgtgttctttggcgattggtttccgactgagtttccgttgcaccagatgaatatacgagaagtgacctcgtaaacgtgcatagtcttctggtgtgaatccggtattgtcccgggaatttttccaggcttgaataccagtctgaaccaaacaagaagattttttatcagacaaaaacagattttgagtttatataagtcaaagagggaaatcaaattcaaatttaccattccaggatcctcagtcagggcatccaacacatcttctgaaccgtctttaccagctgcaatgtgaagcggtgttaaaccgcctggaccagctgcatcgggtctaaacaaaccggctaatgtctgattcttcttcttgggactgaatctaagaagcatctcaaccatgggttttgaatttttcctcacggctctgtgaagaagacacagttctgataacgcagcatcaggagatggatcaacagtgccttcttcgaatagaatattcaataacttcttcatcacacagcaccattcccggtccattgagaactctattagaaacttaaaccgtattaaagaaaacagatcctctggattatgatctgatgctgcaagtcttgacttgagttcacttctgtgtagaagccaaccgatttcgtggatgaaatccattgcttgcattgcagaatcagttccagtaaactctaatgtgctttcgagtcttcggatttcagaacaaatatcttcgtcttcagatactatgaaagggaagaaactactgcttagcccaccttggtcttcaatctagattattggccagcaaaaatctcacgtttagatatcactgcaacaacaggaaacgcagagcacgaaactgaaagtacacttacttccatgaaacctcgaccacttgcaataggcatctcacaggaaaaattgacaaaatcaatctcattattctcctttagatcatctctctcctccatccctccttgtgttgcttcctgaaccaagtgtgttccttcaacagtacaaagtaacctgtaaaaatggcgattagcatcaacagaaaagatatggagggtcaagcttcaacgagtatataaacataccttgtgccaggtcgacggagattgatgccttttactgtaaattgagctttctttgttacagcaagtggtctaacagtaatgatttggctataatcatggcttctcagaggtaaagatgtgtcaagaacaacctgacctgcaccatgatataagaagaatactcagatctcaagaaaaaatatggacactcataaatctaaagattctcaaaactaaccattaaacgcaaatgcgagttggttttgcaccctaagataaagccacccatcagtccataaaggatcatctgaaagatctagaagcctcctcaagctgaaactcagatcacaacaaagctgccggaagaaagaaacgggaagtgattccatgagacagatgacaatggggaaagaatagagaaaagaagtgaagaattggttcttacttcttcccaagaagcttcatcttgacgaagataaatggtcaaaacgatacaaccaggtctaatgtagctctccatatcagttggagtatgcgctaaccagttaagaatctgaaaattcgaatattagaacacatcaatatcactttccaaatcacaaagtgatgcaactaactgtcgaatttatatacctgtcctcgtaaggcaactggaaaatcattcggctctttcccaaagagtttgaacacaatccgatcagtacggctctgtatatgcaaccaaaacataacaagaaccgttacaattacttataagcaacaaaaaatgaatggatgaaagttgagatttgtacctgtgcatctccactggaacttgaaggtgattggtcagaagctgaatctgaattc

SEQ ID NO: 1372 - DNA, 90823 bp, Arabidopsis thaliana
aagcttcacaagtactcaacctttctttacataagttgagaatattttaaacttttatgatcatcgtgcatcctttttttttcctttgtataagagttttaaaagatctttatatatatatatatatatgttttgcagattgaagaatgttctatgagaagtcaacttatccagcaaacaacaaaagaagagtcatcttctaaatgagcacaactcttgttctactgaaagagatttatatcgaatgagtgtagcattaaaatcgattatagattatacagaaataaaataaaaagactttttgacaacatcgttcttaaaaattgctcaagcatataaatctccaaaggaattagaaaagacaataacgaagtcacattgatcaagaaaacacacatacacacaagagaagaaagaacaaaagacactgttcaagagatcggaaacaaactaaagaaaaaagaacacgagacattgatcttgataaagaagatcagaaagcacactaacgtcgaaaaagaaaactaaagaatcattcaaaagcccattgattctccttacgaatctcctcttcctcctccggtgtaaaatcgttctcgatgccaagaagtgcacgaatctcgtctggtttcttgccagtgatcatgtcagcaacagtttggcaaccaaggtcaagcaggtcttttatgtttaggtaattcgcagccagcataacatcaaagagagtcgacgactgttccagggccttcatgaactcagcgtcccacttcttgagttcgtctttgctctcttcggttggtgaatcagaaacgacgtgtttcttgcaatactcgatcaccttcgagaggatgactcctgtaacgtttgcgatagggactccattggcgacgcaatcgtcttcaatcatatgtgctatcgtctgtgactggaccgcgactgcttcttcgacctggaaagattcaccatcggagctcagcaacataaccatcttcgacatcgtttccttcttttttctttttgtggtggcgatttttgtttacaaggttttcgatgatggagagatatcaaaaggtgtgtatttatagagagacctaattgtgagagtcggtataattcttgccttttttcataatggatgaaattactattttaacctaaaaggaaaattcagttgagtaaaccaatcctaaaccgggtttttgatggatctagtcccaattgatctaatttcggtacaaaaaggaaatcagatccgaatctacgtgtcataatgaacggctctaattcaatacaattgtaacaagagtttaacgagtgaaccaacaaaaaagaggtaaaaagaaaaaaaaatggaaactttctaaaacgttacatgtgtatattccatattttaaaaaactccgaaagcaagaaaaatatctacaaattttgtttatgtcattcaaaacaaaagaaaagaagaaaagtaattatggtcacgtaaatttatcatgtgttccctcttgatatagccaaattttaataaatccaaaccatatctgcctctgtttaataccataatgattgcattttgcacctcatatcgaatcatcccatatttttttcttcattaaatccaccaaattgtttctttagactcgaattttatatagttgtaggcttgagtagaggttataacccaaatcaaatttgatgataatctcaaaagtagcaaacgtttaccttattcttaagagaaaatgaaaagaaaacccctgctttgtcgcaaagagaacaaaaactttacagagtaaaactttcacactatttttattttttgattgttcaatcttgaccatttacatcggtctgattacgatacaagaatataaaccaaaataaccaagttgaatatcgaaattgaagtgtcatgtactctgtttcggattagaaaactcaattacagtaagaaaatgagaaaaagatttgacttcacatatattcaagaattgcttcagaaacaaaagaaagactcttaacaacatcgatcttaagatttggttagcataccaaaatccaacaaacgattcgtctctaaagcaaagatacaaacattggttgacttgcacaccaagaaatcaaaagaaacacaccgaacaaacaagagatagacgaagtcttagtcatcaatctacatgaagcataaagaaaactgaaaacacacacacactaaagaagaaaacgatatagacgaagtcaccagctacgtagatttgcatcaacaactttgatgatccgctctctcattgaaaagcccattgattctcctcacgaatcttagctacttcctctgctgttagatcgttctcgatgttgaagtgcgcgcgaatctcatctggagttttccctgagagcaaatcagcctggagcaaatccgagacagttttacatgtgagatcaagaaggctttgaatattgagataattcgcagccatcataacatcaaagagaatggttgtttcgatcgtcttcatgaaatcagcgtcccactccttgagatcttcttcttctttgctcttgacgtgcttctcgcaataatcgatcacaatcttgagaatcttgcttgtgacgtttcgaagcggtattacatcagtggcgcagccgtcctcaaccatatggtttatcgcgattgatttgcgtgccacgtcttcgtcgatctcgaacgatttaccatcggagctcttcaacatgatcttcgtcgacattgttatggagcgatttttctctggaaagcaaggttgatgaaacaagattgaagaagaatttagagagcgatttgaagaaaaatgatgtaacgaacttatgaatctatgcgtctgtgtatttataagctccaactgtcagagtcggtgggatcaacattttcagtggagtaaaccaagctgaaccgggtcgaattttacaattggcccagtttcgtagattcggcccaaaacttgatcgagatggattaaatgtcaaaagaaaaaaaggatttggttggtgttttatgtgatttgttgttattctcactcacttcaagatttgccatcaaagacaaagtacaaaatgtaacaaacacacaaaaacgtagttatacaaattcgggggtttaacatcagataaagctacattacatataatcttgtaaagctgaatgatacatattctagtaaaaataattaaacgttacataaaattacactcgtagatttcacaccaacacatcttctattgagaagattctttttcaatgtctggtatagggaagttttactagcttgttccatactcaagtaattcccacctgaatggctgaaagacatatagcacttccgggcaactcttgaacaaaagagcgacacaaacgcaaaccgctgctatcgctaccatcgaaagcattgctggcctgtaggcaacagacttgtggtgcgttgtgacaaacacacgtttgtgatcacagagcttacattggtttatctgtgttatctccaagcttgaagaatccattggactcctcttttcttgtttgtgctcaatgttgaaagactcaggaatgttgaccaccacgtgttctttggcgattggtttccgactgagtttccgttgcaccagatgaatatacgagaagtgacctcgtaaacgtgcatagtcttctggtgtgaatccggtattgtcccgggaatttttccaggcttgaataccagtctgaaccaaacaagaagattttttatcagacaaaaacagattttgagtttatataagtcaaagagggaaatcaaattcaaatttaccattccaggatcctcagtcagggcatccaacacatcttctgaaccgtctttaccagctgcaatgtgaagcggtgttaaaccgcctggaccagctgcatcgggtctaaacaaaccggctaatgtctgattcttcttcttgggactgaatctaagaagcatctcaaccatgggttttgaatttttcctcacggctctgtgaagaagacacagttctgataacgcagcatcaggagatggatcaacagtgccttcttcgaatagaatattcaataacttcttcatcacacagcaccattcccggtccattgagaactctattagaaacttaaaccgtattaaagaaaacagatcctctggattatgatctgatgctgcaagtcttgacttgagttcacttctgtgtagaagccaaccgatttcgtggatgaaatccattgcttgcattgcagaatcagttccagtaaactctaatgtgctttcgagtcttcggatttcagaacaaatatcttcgtcttcagatactatgaaagggaagaaactactgcttagcccaccttggtcttcaatctagattattggccagcaaaaatctcacgtttagatatcactgcaacaacaggaaacgcagagcacgaaactgaaagtacacttacttccatgaaacctcgaccacttgcaataggcatctcacaggaaaaattgacaaaatcaatctcattattctcctttagatcatctctctcctccatccctccttgtgttgcttcctgaaccaagtgtgttccttcaacagtacaaagtaacctgtaaaaatggcgattagcatcaacagaaaagatatggagggtcaagcttcaacgagtatataaacataccttgtgccaggtcgacggagattgatgccttttactgtaaattgagctttctttgttacagcaagtggtctaacagtaatgatttggctataatcatggcttctcagaggtaaagatgtgtcaagaacaacctgacctgcaccatgatataagaagaatactcagatctcaagaaaaaatatggacactcataaatctaaagattctcaaaactaaccattaaacgcaaatgcgagttggttttgcaccctaagataaagccacccatcagtccataaaggatcatctgaaagatctagaagcctcctcaagctgaaactcagatcacaacaaagctgccggaagaaagaaacgggaagtgattccatgagacagatgacaatggggaaagaatagagaaaagaagtgaagaattggttcttacttcttcccaagaagcttcatcttgacgaagataaatggtcaaaacgatacaaccaggtctaatgtagctctccatatcagttggagtatgcgctaaccagttaagaatctgaaaattcgaatattagaacacatcaatatcactttccaaatcacaaagtgatgcaactaactgtcgaatttatatacctgtcctcgtaaggcaactggaaaatcattcggctctttcccaaagagtttgaacacaatccgatcagtacggctctgtatatgcaaccaaaacataacaagaaccgttacaattacttataagcaacaaaaaatgaatggatgaaagttgagatttgtacctgtgcatctccactggaacttgaaggtgattggtcagaagctgaatctgaattcctcctactagtttgaggtggactagactgacgcgagtcttgatgataatcaagagaactagtagctggatttgtcggaggaggtgatgatctctctatatctgtggtatcatctgagtctatgtagatgtcattcaaatcaaaatcattcactttgacttgtttctcggacctatccggggcaactctctcttgagcactattggcatacacttcttgccaaggcgtttcagacactgaatgatgttttatatcctctcgaggggcttgctcgagtgagagcaaagcggataagtttccaatattttgagaagcctggagtcctcctccaccctgtagaagcccaactaaattcctccctatatgttcaccagcttggcttacaaggctctttagaagatgagacagtagatcctgatcacccgtttgatccgactgattcgctgcaaaccgaacacgaaacagaagacagaataagagctggtctcagcgttcttctaggactaaaatttggatatcttaactgaaactttcatgaacaacttacaatgaatattggagagtatcttcaagagagtaatcaacatataattgcttgtttgatcatcactcatagaagtcccattgcctatagtatcaggatttgcttttcttctacgcttattatgcccagccaaacgtctacggcaacttctctttccctcatcaaactcttcaagcacatgaaacctgcagacaaatatttttctcaattggattaaaccaaatctcattactaagacccgatactaaagttgaatccttttataacccttacctactacattgctgacaaaaccgctgcataattcctccaacaagtgcagtagtagctttagaatgaatctcacagaccttatgacgtctatgataatccttaactttgcttaaatcagctccacagttgtctacctgacaacaaatcgcccgactcggaatccctcctccaagtttcgtctttttcacaccattcccctcaatattattaccaccaagattcagagtaagtctatgagcatcatcatctttcaagttatcttcttccattgctaccacagtaacagctcttcttttcttcttcttctccatctctatcctccttctctccatgatttcaacatttccttcatcagagcacgtagaagagctgttggatgagccgtgattcagctgtgtagcaacgaagagatcaccattccatttccaatcattcaaatcccactctacactccttttaccactaaacccgtattctaaactgtgaccttctacttcaccttcaattctagcttccatcacaaacccagttacaacaaccacagagatgagactaaaattggagaactcaaaaccaaacccaaatcataacttatagatcggagcttgaataaaagactaagacacgtgcctttgtccaaaatcaagcccctttctctatcggaagaaacctaattccaccttgttttataaatgaaaatccaagcagacaaaactgacttataactaactttaaaaggaattaaaaaaaatatctcccaaaaaaaaaaacagctggcaacacctggaatcagaaaaagaacggtcaccggagattaaaaaaaaacagccgttaacggtaacggaacatgaagggacggagataaaatgatgatgatgatgattaaaggagaagcgtttggtagcggtaaggatatggttttatagtgcccaaacaaaaaaaagaagttagatttaaagcatcttcatttcgacacagaaagagaaacagagaagaagaagaagaagaaataaaaaaatggaaataatggtggggaccacttccccatatttcgtgtctcactcgatttcgcctttttaaataagaaaaaattaccccaatcttcgtaggttatgatactgtgcttcgcgtaccatttgtgttctggtgtgcgctcgtagatagaatttcctacggtgagatgtacgttaaccgcagtatctactgtaactggatgttgtggcaatattcgttagctgacaaagcaataaggccaaaaggaagaaaaactcaaaaaagtgtcggcggtgtgaaatcgctttgactttgactgtttaggaaataataggattacgtgggtccaactaagtcaaaacaaccttgataggcccatttctagatccacttactcaaaattaattttactgtatacttgaattaatctagaaataatgaatttgtatccctttagaaattatttagtatactgatacgtgaccaaaaaaaatatgaaaatctttggctgtttacttatttctcgatcggttttgcgtgtgtaaacacactgatattaactttatgacaaaacaaagttatattccaaattaaagtaagaattttgggaatttttatatatgtgacaaaaaaatccgagatctcaacgtacaacataatgatagaatatgaaataataatatataatagagttacaatatcattaatctaaaaaaaaaaattgatcactaaatggcgtaactattgatatgctatagagtattattcaacatactaaaatcttcatcgttgaagaacatataaaaaaaaaacaacggatacatgataatagctactcattagaatcgggcgtgactcgtattcggtcggcggcgatacagtaattccagaacacaagaaagataattatggccgcgaaagaaccaaatatcacacaactatatattacacccaaaggaagcatattgtttcttatttctccaccccaccaaaactttgtttttttcgtgtctccttaacaaagttactagacaaaagttgttttttccctttcttatttgacaaaaccctagacaaaaggttactttgcaaaaagttagtttgtatatctatctcataagatgagtatatatataagtcctaattgccttatctctacaacttgggaatcaaaattaacatagaatagaagaagaaaacaaaaacgaaaaagaaaagttaacataacacaataagatgcaaatatacggttctttaatgtgctaggcaccgccaatcagttatttagtatatatactatcttactaaatattaatacttcccgtaggtaagtcaaaatagggtttttactgtctactttcctaacttaaacgtcaaaagaattggtcgttttcctttggattccaaaagagattcatccaatgatatgaatatgatgattagtaaagataagtcaaatcgtctatatggggaaaaatcacaaaggtcaaaagataaataataaaaactactatagctcttgatacattttatgtgactttgatctggcacttgggtgaaaccgaagctccaagaagcatcattagctccttttttatgtcatcatccaccaatgcttcgacaacattcacttgcaccatttaaagtgtttcaattctagactagttccttgaaaaccaagtatatgcaacaccttcacatggttgagcggcatgaagacatcgcctgtgtaaccaccattcaaaccctgaagaagcataaatcaagaagatgtatgcaaaggatcaaccactaaatatatatctattcttcttcttcttcttcttcttcttcgtgtgcgtagctttactatgagtctatgaccaacttacaaaacaccgcgttctactgcgttacatatccagcggcagagacaagccatctcccctttcttgttctctccaatgtgacatttcagagataatttcttgatagaagaattacattgcaaatccagtgttcggtccacaaagttcttgtcttcttgaagttctatactgtatatacttagaacgttagaagctcaaaaatacctgaatgtgagagaacgtgagcactcgtaagaaagaggaagatcgaatgatctgagcttagggtttaggaatatggaatttcgtttatagttcaagttctgtttcaattgtagtctaaaaagacacaattttttctatgaattggtatgtgtatgtgatctaaaagtgatctcacatttatctacttattatatgtcttaagaggaaaagttcccaactttaattaacaaaaaaaaatgaaatcaagataactttgcatcctgaaaagggcaatgtgacatgaaacaattaatataagtctctaagttttgcatataatttatgaacaaactaaacgaaacgtgagaccttgatgtggcacttggattaattggaagaacttgatggagagtgaatatcttgatgtggaaccttgcgtacgaagatttaacactaatgctcttgttggtatacatgtatggatgacaaactagtacaaatcagtcatagatttcgtatgcattgcggacggggataaaatggccatgaaggcctattctcaatattttggtataactcgaatgaaacgatgtacctcggattatccattaatcacgctaagaatattggcataagtataaattcctgtttctttttaatgaaactcttcttataatttcaaacaaaaaacatacagtatatagaaattagaaaacaatgagaaattctaaaataaaaaaaaagaattcagagatagtaatcatgattattattattactttgttctttcgatcagttttgattttctcattctacaaattattatattcttatttttctctaccatcttccttagaaaatcgttcactctcttgcaaattaaaagagtataattagcctacatttatactattatttgtgcaatgttgttagcaaaattaccaaatgttatgtggaatattacaagatatatcattgaaaatattccagctagcatttaattacttttatttaaaatgacgaaaatcatatcatccatatattcaaattcattatttaattttccaaactatggaagcaaacgagatcccatgtataatgagataagataacaaatatcaattacgttcttttaaccataattgatatccagaaatagtacttaatcattaataaaaaatcgtactaataccacaattaaacataatatatcatgtcttctgttaattctccaaatttgctattattagtttttatgaatttatgaatttctctgggtatcaacatgtctcactcttaatttgtggcactccattttcatttagttatctctgcacactttaatattattaatatttaaacaataatttctgtatatttttggtagagatttgagttttatgtgaaatattaaatattcagcatctatatatgataaattcgaaaatgcatgttgttatattaaagaaactatttagtgaaataaaattattgtttagtttgaaatttattatattaaagatgtcacactattttctaaaacaatatcaactaaattatatgaaaatcgttttcaatatattttacattcaataatttgtactaaaattgttttgcaagaatttttcatattttgaagatttaaaattgaaacctaaacctaacaacaatatatatttaaaaatttttagcactacttgcatgtgtatactgttttatatggatatttattgttgttttttaaactaattcagtatttcatttgttttttatttttaagaaaaaacaagaacatcaatcgttatagtggatgaaatcgatattactgagtaagaggggatctctcgaccctcaattgccatgaaatattactgggtaagatatcatgtaccgcctaagcttgccgttggctgtaccctcaattgccaataaatcctttccatacccgagactgtcttagtatgatattcaccttcagttattagagtcttttcatatcacatgatatctttcccacacatttgatgggggcagtactgtctcagagataaatgcataggccacacaatgggtcttccagactgcacaagtacactagagtagattatgatggagccatattatggatggcttatagtggactaggtttgtggaatcagagcaacaacaaagcagtgactgtagtaaatacgaatgaacgagatcataaggtgaatgatggccattatccgtcactcgggctcaaagaaagaaaccttgaagtagaaaaaccaggctgcagctaccaacttggagtaaaggtaaattagatcccaatattcaatacattggtgctgaaataattaaaggtgcaagcttttcatatgaagaagtgaaagcaaatagatacaaacatgatcatggataaggtcgagaacagatctagagaatgatggcgttggtcgtctcgattcgaaattatatcggagtcacgattttttgggttatctatctatctatatagagagaaaaatataaaaggaaaattactaaaaaaacacacagataatttccattaacattaataaaggaaacaaacccagaaagtcaaaacgacaatggaacttgtcgttttgagttcatccaatgacactgctaaatcttggtaggcattgatgctgctatgtatgttgacatcattgtagatatcagcaacgttgttccacattcaaaacaagagctgagaaaatggaaggataaagagtggtgataatggagtgaacatatagaaaattcacgtaagaagctttcaagggtcgaaggagaaagaagccgagtctaacagagtcataaggaacgggaaacaaacccaatcccatagtcacatataagtgagtttgatatgaccaagttaataaaggaaattacataaactagatgaccaagtttgatatctcaaaattttcgtcaatgaagattacaagtacatgactttcagcaaccaactacaagattaaccggaattgaaattgtttcaggaaacaaaagatggtcagagacggccgataaactaaaggttcaagctttctcaaaattttggattggttaaaaggtttgtgctttacgctcgaataattcaactgctggattacacagaatgttacaaacacaaaattgaatggaagcaagagaagcagagagagagagagaggaaaaaaatatatagatttgagcaaagcacacaggcattaaggataattcagagagagatttagaacattcaaagacaaatacgaacccgtgcgtgcgtgatggcgaagggcaaaaacaggtacagactgattcgggatttagatcggagtctccgatggattcagaactaagtttttggacttctgttcccgtcaattagagataatatatacagataatttctttttcgatgtaaaaaaaaaagaaatacagtttccttttttatttaagacaatggatagtaattaggaaaatttgtatctataacatacaaaataatattttttttttaaaaaaaaatccccaaaaaattatatttataaaaggatttgtaatcgtctacagttaaactatattcgtgtattgaaaaaataatattccctctgtttagttcaagagttttttttttcagaatgagacattctcttttcccttagataagatttgccactacttcattttttcccatttatactttacaatttaaatcaattttggtcaaaaattgtaataaaagatggaagatgaaattattttggaattttagtgtacttctaattagaaacagagggtttatatttttgcgattcggtaagacgcaacaacgcacactgcatcggagaacaaaagtttaaatacgagtcgttttgatatcaaagaaaaattcttcatctatcaaaagcccctactaatattctccttttttaggaaatgaacaagaatttaagttacaaaaatgggtaaagaagagaacaaacaacctaaattatcatctcctatatttcatcatctttgaaactaaatgaacataatgtcctttcttcaccatctcttttattaccttgcgagcctctgaaagcttccctgcctttcttaaatagcccaccaatgtactatacactacgaaattcgggttacaccctctagattccatttcctttaacaaccaacacgcctctctgaactctcccgccatacacaacccgcgaatcattgagttgtatgtgaatacattcggtaattgccctttcactgtcatctctctaaacatctcctttgccttgtcgagctctccagatacaacataccctgttatcacggtgtaacacacaacatccggtctggacccagctttcaccatttcatctagaagcctccagattccctgcacggctcagaccgtctatcaaagtagtgtagtggaggacactcgggtcgattcctacttccttcatatggttcaacgtagtaagagcagcgagcggtttattccctttccccaaaatgtgcagcaaaatgataagaagtaactgtgtgcctgaaacactcttgttctccagaccacacaaagagtctataagctagcttcgcacatcttgtcttattatcgtaattcaagttccttaagataccatcaagaacccctatcactaaaatccctgagactcgaacattcaattcatctagaactgactttgtattaaatccagatttatatgagttttaatgttacatagtattatgaatgaagtagataacttatgtgactttgaactggcacttggatggaagtgaaactccaagcagcatcattagatcccttttgctttgcaatattttgccattatcctctgcagcttctgcaacatccacttgaaccagttcaagacattcgaattcccctataaagctcttcaattgtttaacctcatccgcagttcctcgataaccaagaatatgcagcgacgtcactttgttcagaggcatggagacatcgccagtgtaaccatttagatcctgaacaagcatcaatcaaaaagatatgtgcaaatgatcaaccaccaagtccgtgttacataactgttcatcagttttgcgtattgaagataccttgacaattagagtttcaagcttcgtagactgcttaagcagatttgccagtaatctccaacctcgcttattcttactcccaaaagatagattaacaagattcttaaacaccgggagcccatgtctacagtatgaataaatcacctgaaacatacaaacacagttcaagaatgaatgtccaaggtttctaatacgaaagaaagaaagaaaatgggaatacttacatgaacagaatcaggagaaagatgcaggctctggacgtttcttatccctataatgagatccgttacatccatccttaggacctttctttccagaccaaggtccagcttagcttcgacaagggactccagattaatttgccaatactcacccaaggcgcagtgagaatactcaaggtagacaagttttgggaggtcaaatgacatatgactagcactatcaacatcatcaggacaatggtaatcaactgatagtctcttaagggttggactcgatatggtgtgaggcgttgctataaagtcatggtgatgaactgataactcctcaagcacggggcaaccagcaagtagcacacaacacaaatcttcaatgtcgtagaaaactatcgtatcaatgaagagagacttaagagatggaagtgacacatatgaaggaagctgtccaagacagagctgtgtgcctagcgtcagcttaaccagtgttttgcttgcgacgagatgaggaggcagaaagtgtatacctggatctttcatccttaggtccagttcaaaaacaccgcgccctacgacattagatatccagcggccaacacaagctttctgacgctcatcgtacttgctaacgtggcattttagagagaaattcttgatcggataatcacattgcaaagccagagttcgatccacaaaaatcttgaagtcctccgtaaacacaaacctcacatgtttacggagacctggtgtttggtcctttacggcttgcagcgagaaagagtcatctaactcgagatgatccaccaatctaaagatagtcctccactttttagcaaggagagatgttgaaacagcctgtttggtggggattaaagacaatattttacccagaacctcgtcagggagccagctgatcgcatctctcgagcagattgtgtcaaacattttggcatccatagagataaaagtgcctgaaactgctggattaatcacaaagatttgagcaatcaactacatgatgcagcggaattgacattgtagcaggaaacaataattcaataatggccaaagacagcaaagaaactaaaggttcaagctttttttggtatggattaaagggtcgtgctttcacgctcgaatagtttcaacctctgggttaccagactgcaacaagcacaaaaaattgaatgaggatgctaaagatggcagagagtatcagagaagatccacagtccagaaaaacaataacatccacttttcgcaagtatatagatatgagcatgctaagcggaattaaggagaattcagagaggaaaaaaaaaggaaacttcaaagaccgtatagaaaacaaaaggttgaagcttttttgttttttgatgctgaattaattaaaggtgcaagcttttcatatgaagaagtgaaagcaaatagatacaaacctgaatcgtggagaagggcgaaaacagatccagagaatgatggcgttgtcccctcgattcgaaatttgatcggagtctctctgatatcaaaggatttttgggttatttctctatctatatatagagaaaaatataaaaggaaaattactcaaaaaaaaatggtagagattttccattaaccttaataaggaaacaaacccagaacgtcaaaacgacaatgaaacttgttgttttgagttcatccaatgaccctgctaaatcttggaaggcattgatgctgctaatattgttgacatcattgtagatatcagttacgtaattacgttgtttcacattcaaaacaagagctgagaaaatggaaggatataaagagtggtgataatagtggagtgaacatatagaaaattcatggaagaagcttttaagggtcgaaggagaaagaagccgagtctaatgagtcataaggaaacgggaaacaaacccaatcccatagtcacatataagtgagtttgatatgaccaagttaataaaggaaattacataaactagatgaccaagtttgatatgaatatttttttttttttttgtcgtcaaactattttattacgtgaactgtcaaatacaagatgaagtccaacaaattacatagtcaagaccattacatcgagcctgttttgctaacctatctgctatatcatttgcgtcacgagaaatatgaataaagttaaagctgcaaagctttgagattttaagaacgtcagctagataggttgcaatatggaggtacttccatgatgcattgtttccccgtagtgcacatctttgcagcgtatcatatatgagcttgagatctccgcagaatgtgacatgtgaataacccagtcgacgaagatcaagaactgcaagacgaagggcctccgcttcggcttctgttggactttgggttgggtgtatagcacccgaaccatgaagtatctgtgttccatccctattatgcagggaccagccaattcccatattctcagttggtgaactccatgaggcatcaacaaaacaacaaactgaccaagtttgatatgaataaactagatgacttgtgcgactttggaaattggaatggcaatttatatgagcttttttaaaaatttattctccttcttctagataagatttgccactacttcatttttaccccttcatgctttaaatcaattttagtcaaaaattggaatacaagatggaggatgagattattttggaatttttatgtacttaaaaaaatattgtgcaaaaactttaaactacatctaattagaaacagacggactatatttttgtaatttggtatacgcactgcatctgagaacaaaagtctaaatacgagtcgttgtgatatcgaagagaaattcttcatctgtcaaaagcccctactaatattctctctttttttttcttttgtaaaagagaagaattaaagttccagaagagaacaaacaacctaaattaacaaaacaaaagtctatctcctatatttcatcatctttggaactaaatgaacataatgtcctttcttcaccatctctcttattaccttgcgagcttctgaaagcttccctgcctttcttaaatagctcaccaatgtactatacactacgaaattcgggttacaccctctagattccatttcctttaacaaccaacacgcctctctgaactctcccgccatacacaacccgcgaatcattgagttgtatgtgaatacattcggtaattgccctttcactgtcatctctctaaacatctcctttgccttgtcgagctctccagatacaacataccctgttatcatcactgtgtaacaaacaacatccggtctgcacccagctttcaccatttcatctagaaagtacttgcacgcctccagattccctgcacggctcagaccgtctatcaaagtagtgtagtggaggacactcgggtcgattcctacttccttcatatggttcaacgtagtaagagcagcgagaggtttattccctttccccaaaatgtgcagcaaaatgttgtatgtgtaagaatccggagagaacccatctcgagccatctcatcaaacagcctgtcgaatctatccattttccctaacctatagtttgtccacaagagaatgttataagtcagaacatctggcgaaaacccgtcttctaacatctgcttgtaaacccactcaatcaatttatactgttttacacctagcaaagaattcaaaatcgcgttataagagtgtttgaaaggtcggtaattaaaagtcttggacttcatgaactgcacaacagcttgtttcgctaaacctgcttcaccacaactacaaatcaacagattaaacgtcctcgctgttgtcgggaatccgtcttgaaccatctcatcaactaacctccacattgccttgtactctccacactctgcaaatatcttcataagcaaatgataagaattcactgtgtgcctaaaacactcttgttctccagaccacaggaagaatctataagctagtttcgcacatcttgccttattatcatagctcaagttccttaagatccctacaagaacctccctcactagaagccctgagactctaacattcaattcatctaaaactgactttgaattgaatccagattcatctagctgcaatgtcacgagaacacgagacgcactatgattggcactctccaaaaacctactccgaacagagatcacttctcgatcgatgcttctgagctcactgatattggagtcctcgtcaaatccacaatccaaatcagggaaaccattatcgatttcattaccaccaaagttcccattgcagaattttctggagatgaagagaaagcgataagctttacgaactacatttgtgcctaaaacaagtgccaagttcatatctgatctcaatccccattattctctgcgatctttcctgcaataatcaaatatttaatttccaatttcactttcaagatatcaatgtttagactgtgtttcttattacctggataatagtcaaaaccgcagaagacaaaaatgcttatcttgctcgtcgagaagaagacctcatcggattcatcgatgacgatggctccagggccgaatctgagagtgcgactaattgcacagtccccaaaaattagggtttctagcagaagaagaagaacttaattcactactgaagaaaaaataaatttgttttttgcagataattttaaattatcatattacattattagttagactagatccgacccgacccggcctaacccaattatgtcttacatgatacgaagcccacacaaaaaaaaaaaagatgtggatttgatgggcctgatttaaaaccttctctggcattagtttaacaagccaacttactgagcctggtctaacaattacattgacttggtttggtttgcttatgctttttgcttagattagtccagccaatgaataaacatgtctgttttctcaacattattcacactttcagtttttgtttctcagaccaaaagctttgtttggtactaacaatggctaccgtcgatctcggtagcgttagacttttcagtttttgttttcttgcaagggaaaggctattcgtcaccggtgcaacatgatttcttgccaaaggtaaggaaccagtcttcttctcctccatcctttttgcaagccaattatcttacgtacgtcttgcaaaactgacttttgacttgaaagttgtgcaggttttattgagaagttgttgagggaagatcgtccttgtaattaaagccaatgatcaagaagcagccaagaagagactctatttccaattccatccttcaattcttgtatacatctccctcactagttttcccaacagatcataagctcggatctattcaagcttctgaagcaaaggcatggaaagtcatatgatactttcttgaagagcaagttacttccagtagttgaagacattgcagaagataatcttggggtggactctgaaacatcactcaagattagtgaggagattgatatcattatcagttctgctgctaccacaacctttgacgacaggttcctatgtttcttttgctctgttgttttgttctgttttttttttatttttgtgcgagttgatggacaacgataataaagcctatggaatttcaccggtccttggaggatttattcagatgcatgtcaaagagggaacaacttgcgagaaagggagtcagatattacattgagtatcaaaggaaagaagaagctaaagtattttgtggccatggccaaattgtatgagccttacgcgttctttcaagctccgtaaaacatacagatagctatcagattactgactccttattatcaggtttgatgacactaatacaaggagaatgataaaggagatgtctatggaataaagagacatgacttctcatcagtggaaaataaggtttaagtgtttttcagtaattctagtacatgtgaatatgtgattgtgttcacaatgtgataatctgtgtcctaccagacaaatatacttcagtatgtgttacattgtcaaaaatatgaatattttgtgtatattacaaatggtaaaacccaaacaatcaaacccgaggtctcacatttagattcagtttttttttttctgatacaagtaagtgatgtcacattgtgatctatccttatgtacaaaaccgtcgtctaaagaatctggcaaattttgtatatagtaaaatattagtgaaccagaaatcaaacatattcaaaagaaacaatcgagcatttagtgtttttaacctcagaagactattttgtcattctagtaacggtcacgcagcagaggcttcgataatgatccagcagcttcgagctccataaagaacgttacagcgacaccaacaaacgagcacaatgctggaacaagacctaaaccgtatcttgtaactgaaaggtaaacactttgttggttgttgtttagttggcctctaggtgaagtagctgtaaaccaaaaacagtttcagcacaaaaccgctaatctcacggtgaaaaatgaatggttataaactttatagggccatgttccagtcatcagattatttgacttactttggtgtgactgaagaacatatagagcaagtccacaagacatcttgtctaagaagctcaacgagccgcaaacaaatgcgcaaccaccgacttctgcaccaaccaacacactctgcatactgattgctgttacctgtagaattgtatagccaatgaatatataagcatggcttataaccgacaatgatatcaaactgagcggtagagaacattataccatcattaatgcattcgcgatgccgataaagacagatatcgcatacatgaaagaacttatgtctctaggcaatagaagaattgctgcaccacagaatatccaaattataccaccagctgtataatacgccttcaagcgtttcccgttccatggaatctcctaacatgattacacacaaagaatagttgtaattacttagcaaaaacaaaggaaaaagagaagctgacaacatatgtatgagaatttcgaacctgaagcagaaccgatacaacaaagctgcagatatagataattgcaggaacctgaaatatataacatttagtcaagagtatattatataaagctaaaatgatcatatgtaagagaaagaaaaagcttattgaaaatattaccaaagctttagcggattgatccatttgcaaatcatcgataacaaagaacgcaagatatgcctgagaaggatggaatgaaacacttggtgtgagaatttaccccaatatgaacatagacagaagcaacaaagaaagcagaaaccgacctgagaaacattcaatactaatcgagtgaggaggtaaaccatggcaacttgatagtacagaattttccggaaccaatagacccacggtattctcgctcggctagtttctttcaaatctatcctcagcctttaaacattaaaatccatataactatacaactctaatgttaaaatcaagaatgcagagaattgagcatatacaacataccttggctcttttgtccccataagaaatatgaccacaaagcagcatccaattgtgatagatgaatatgcaatccagcgatactgcagaatttcacgagaaagcatgcaatcaatattgaaacacacttacttcaatataaacatactggagaagaacacacacaaaatatgaaacctgagtttcggtatcttcttttgaaccagccttaataacaccgaatactactaaagcaatcgcatataagccaagattagcaacctgaaaaccaaatcaagacgtcattatgtaaagaagcatattcaggtactaaacaaagatcagtgaaagagcttgaccatagtaaacgcgttacgagagcttgttaaagcaactctgcttgttgagttcaatgaaatacaattaaccatagccctgaagtgtaattacgtaaagagacagtcacacacacacagagcaaaaaacaatggatatggctaaagatgaagaagtaaaagagatgagattacatatgggaaacttgagtagcagcccatccaatgttaaatatagctgcaaacatactgtaggagaaggtttcaagtgttaaagagtcgttatggaggatcgaacaaggcagacaacctccaaaaacggaggaaaacgagattgcaaccagtaatgatcctgcagcatgccaaatcttgaaatgtccaaacctatcaatctgccataacagaagaccatattcatctacctcaaactgaattagcaccactagtaagaaacaacaagctaaagactaaatcagaaacagagaagtagagtaccaattcaccagtgaagatagtagcaaatgcatcagcaacttggccagagagcataacaatggctgcatctctacagaagaagaaaacttgattatggttgaattattacatatcaagggtcagaattatatgaaaatttagataaaattgcacctaggggagagaccaatttgggtcaagaataggaggaggtaagtgaaccaacaagaagcagtaatgtcattaagcatatgccctactccatagaagaagacagaccatcttccaatgggttttgtgaatggatcctcctcacttcctccggtcattttctcaaccgcttcgaaattttccccggaataaagtgaggatttttaatcaatctggacctgggaaacccctagcaataaattatcaaactcctcaataagatctaattgagctaatcagaaacaaaagagatgaaaattgagctatcaaaccctaaatcaggaaaaaaataggaactttcagacctagaaaacagaggaaggggaaattttcaaacccatgaaggagtaaaaatcaaaggaaggagctttcacatacccagaatcaacttcaaatgaaagcccttgtgatgagagattgatctataagaaacctcaaaagcaacaatttctcccccaaaggagggaaaaagaaggagtaaagaagacagagaaaaacttgtttcatattgagcactctctccactaaccctaactaatacctttcttccaacgtcattatgtgagtcattctatgaacataagaccttttcttttaccttgaaaaaatagtattataaaatattggaaattgaagtgatcagagagtgaatgagagaggcaggatagtctgagaaatcatgcggtcatgtcggtttcattttccagatttggttatggcttttatgggtgacttttggaattttgtttgcaagggatcagttaatggatagaatcttgatagcaatttgtcagagattcttttaaaaaagttgtaatttttttgcaggcaactggaatctactactaaacgcttgtaacgcccatactttcattagataagaaaacaaacaattaaaagctcaaatctttatgattgtgattttctcactttccttattttattgcttgcttacacgagaaggcacgttgttgcagcatcaacatttaaaatgccactaaaaaaataaatacgtcgcctgacagattcgaactctcgcggggaaaccccatgtacttagcaggaacacgccttaaccactcggccaaagcgacttttgatgtttttacacgttattagatatttaaatgtgactactttgctatacatttgtttgtcaactgccctcatatatcaaagattagaatacatcatacgagattacaataaacaaatgtaccgtatataacttatatagtatcgcagattcgatgtttggcaattacttggtgactacatccaacgttgttcgtttgaatatcacgatgatcaatgatagaaaaaaagattacgttttaaaatatggtaattaagagcgaccgctagaaaacgaacaatagaaaatgttgtatataatttgattacttgttgcagttgtcaaacgaacaaatctgtgatttttttgatctaatagaggtatagcaaagtagttatcattcacacatatgcatacttattataatcaaacaatattatcactagcaaagtccaattagtaagtgcaaagacttgtaataaacttcaaagaatagagagacccactaccaaaccttccgaataaagccaagtaaaatggtaggccctttataaaccaactttaatccattttaacttttatatattaaaaaagggccttgaaaggctttgaaaccaatcataaacccattatcactagtactcaaccacaaccactaacttttgtttctcctttcctttttttcttctttcacattttctctttctttctctcacaaccaccaccaccacttctcaatgtcgtcttccaccaccacaacaaccaccgtccacggcgagcctgaacgacgaacttactggtgtcatgaatgcgatatgagtttatccctcctctcctcctccgattccgattccgattcctctcctctgttatgtccccaatgccgtgtcgatttcctcgaacgtatggatcacgattcttcttcttctaatctctttgacgttaccatcggtgattttgaagaacaagacggagaaaacgatgatgaagacgacgaagaagattggtgtttcgttgatccagctgttaattccgatgataatttcctcctcgatagtccttaccttcaccgtcttcttcgtcatctcgcttccgataattcaggatcgtcttcttcttcctcgtcttcatcttcttcttcgttattgaaatcttcagatatcgattcgatccccacgattcagatctcgtcttctttgctctgttccaccgatgattcagatccagattccgttttactctgcgccgtttgcaaagaggatttcatcatcggagaatctgctcggagattaccgtgtagtcatatataccactccgattgcatcgtcccttggctctcggatcataactcgtgtccgctttgtagatttgagctccctacgacggcgaaggtgggaatcggtggctcagaggctgagatgagaatcagattatcggatctggctacgattgctgcagatggtgatgatgtggaagatgattggcttggaatcagaaacgcgttgagaagactggctcgtcgtcatgagcagatgagattgggagtgggagagatggagaggaatttggctaggactgtttcaggtcttggaattggtatgagaagaagagaagagattgaagcagacagaagcaacgtcacaacgacgcctttgtaagaacgatttcgaaattcaaatatgagttttttttttgtttgcttcaaattctcagctctctgtttattttaccgatcggcgttttaatcgattattgattatagttacaataacgagagttttttttttttcttcatgttcaattgtttttactttttagacaaatgttgatgatctctttgcttttgagttttgtctactttcgatacaataattgatgaaataaacgtaagtgtaatgatttgttctacgtttttcatttctcgactttctgatacggtgagtggtgactgtagtctgttgatctggttgactctaataaaaataaaagtgaatacaaggcccaccaacaaagacaaaattgggctgagaatcttgggctataagatgattaaaacttgatttttaaccaatttttgtttttggaccttttcgcatgtatctgtcttttgattttcagttttgatgatttgattttgcttcttacaaaagaatcccaattgttcgactaattgtggttttaaactagtactacaaattaataataataatagctctactatatagttgtcattaacaaaactcttcacccttgatgatgtcttctaaccagacctgcttgaatcaaaacaccatcacctaaaaaataggatggtaggagccagtggttttggtgaaatccttctaccaatgcactctaaaacatctaattgtatgaattatgcaatgattgagacactagtgattctaagcaattttctgcccttttagtttaggtttaggatcaaatgatattttggttagcaacaattaatagttacattagataaataatacgaaaaacatctccctgttagacaacaacaaactgaaaataaaggatttgacgtaaaacaagttagtttatcatgatgtgaaaaacaaattgatcgagtagaaactcaaagcatccaaagaaagttggatcaacggttgtataattcaacacatggtagttagtatagggagatttgtttcactagttttaaggagagtaagtcaacaatcccgcgtatcaacattaaataatgaccaaaacaatacgatttgttcttacaaaaatatcatacagctattgttaactacaaatgtcaaattcttgaaattttatataaccgaaacacgctaatgtcaaactatgatctatttaaattaaatagataactttgacctttaaatcagttgatgcaacattcaagtagtgaacaaaaaaaaatcgattgatgtaactaattatacttattttactagtttggataaacgaaattgtctgacctagtgacctctccatatgattagtggccgctttttttttggataattaattaatctttttttttgggtcaaacaattttggatttttgatccaaggaatcaaaacatcaaaacaaaaagctttgcacgtgtacagatgagtcacatatcacgtccgacgagtatctgtcgtgtttattaagttattagtatagggcacacggaatttgtttttctttttgtcggtttatctaatctcttaattccgaaacaaatgtaatttttttactattaacgatgtttaccatagacaataaataattacatttcacatatgctccgtgaaaattactaagacgaatttcacatatgtagtgaaagattgttttaaaatatatgtacaactccaagaaaccctatctccataagccatgtaacaaattattattattattattttggtaaaggacattttaacaaattcgtaaataaaacaaagtcaaattcacctccaaaggttaagtcgacgacctatattatatagtcaaccacatatattaaataaaacatcgctcacgccatctactcatatgtatgtttttacttaattatatagctaattgattatatgatatatcatcagttggaaaattaaaaaccattttattccgatagcgtaaaagaaacagatcattctttttgtttaaattacaatttatttaactcaagttgttgaaaagtgtgtaatggaaggcaggtccatagctatttcgtcttatatttttaactattttcattttgtttgtctttaagaaatagtattttattaatgtttttttacaaaccaacaataaaactgtatattcacattttgttttttttgtgtatatatatagagacatataatccacaacatatgcatatcatttcccaaaacaatacaagaaacctgaaatccaaaaaagaaaaacccaaaatcttcgcttcttcatcttctttttacgtttatatggtgagaaattctatgaaggctgagtacgatatagatcatcttcctcatcaaaccttttatggtgattattcaaaaactttggttcccatgaacaagaactcccaaataataaccaagatcaagcctaagatccgtatcatccatatatttgctcccgagatcatcaacaccgatgtcaagaacttccgcacactcgtccaaagtctaaccgggaaaccggagatcaccaaaaccggttctaagaaaaagataaccaacacaaattttcctgcgccaccgggtttgcctcaagattccggccaagaacatacggctgaactggacaacagaataatagggagccacgtggtgaaggaagaatggggatcaagttcaaacacaaatacttactttgattttgacggtttgatcgatcttgatgaagacgacaacatattctcaagtcgatggtttgatcttcaacaacaataattagtttggtcacaccttaccctaatatgtagggtttctactaatcgtaagtcctgttggttttgatgatgatttgatcatttattcgatatggagcataacaagacatgggtcaagacaagaccaaggttgagacgatgatcatctatataggtaggaacatacataacttgtatatatgtacaaatgtttggattttttgggcttgggtgccctttgatttaatttgttagactgacttaatttaccaagaaagagtgtagtgatgagtttgtagactgattttgccaagaaaaagtaagtttgtgttttgatctccgatcatgtgaaaactctacttaaaaatggtgtaacgttgtactcacgcgtgcgtgtgcaagttttatatatagaaaagcgagaatgatattgtgattgaattttttagattgttcattttttttcgtcaaattattttgtttgttaattcatatataagtcatgttacttacaacaaattgtttgataaaacaaaaatgaattccattaaactgaattaacgaaatactataatgataaatgattcttacatgactctaaaagagtttcgatttgaatatataaatgaataaagttctgttttattggcgatgttcttgatatataccttcaaaactttatggctaaattacattttaacttctcaaaacgttagattatgaaaggtggactcacatttcataaacattaaaatgatatggtaatatgattataatgagttgtaatggatatatgtcatatttttccaatctcattcattgaaatatcagtttattttttggatgacataacgatcaatagtgtcatataatatgatatccaatgttttaatattaactagctatagctatatccatcattgttaatagttgtgttacatcattaaatagtatttcaaaagaatataaaaatttctgataactaatggagaatgaagaatatcaaaccgcccattcgaccaagaaattataataacgaagtttataactttttttttcaattgtgaaatgtcatttttactttatttatttccaacaaaataaaattatgttttatctaaacccttggactttaccaagaagctacttttttatttagcaacagcaaaagctacataccatttgttctttatttattaatgaccgtttttttaggcattagaatcgttacggctgcttcgaatcttgcgtctcacggaccgacggaactaaccaatctcaaccgaacccgaacataacctgttcgtttggttttctaaatggtaatcaattggttcattataccggtttggtaagaagaatccgtgtgtttggtttacatatgttgtaatttgacgcttgttcatcacgttgcagatatatctcaacatctctcaatttttctctctacgttgaagaaactttcgaatttcccgttagttcttctccacgctttctctttccctttatctcttatctggttaagccaatcttgattgtttggattcgtaaccgatcagtgttgtgaggtttgaaagaatggtgttttttcgcagcgtatcagccatttcaagactacggtctcgagcagtgagtagatttagctttcatcctttttgtgttttgtttgatgtgatacaatttgatgatcagatctaatataagaagcacaggtgcaacaatcctcacttagtaactccgtcagatggctccactcttctgaattggtactttcttaggttttcatgttctcgtgatcatgcggttcagtttgagaaccaaaaatttggaattttaccttctaggttttgtgttgatgttgcttaaaatgatggtaatgcaggacttgaagtcgcagatgcaagagatcattccagaacaacaggtttagtttctacttcgttgtgattgagattgtttctaattttagggcagatttcatgtagagatcaagctcttctctctgttttagttgatgtcatttctcatacacaaacacaactttcaactttcaggaccgtttgaagaaactgaaatcagaacaaggaaaggttccagtggggaacatcaccgttgatatggtacggattctaatgatatttgtgattacacaaaggctttatcttttaaacatactcgtatatatagttttacatgtggtatttgtgaaggtacttggtggaatgagagggatgactggattactctgggaaacctcattgcttgatgcagatgaggtatggttataattttgatcacatagataattttcaggtcagatcttgaattagaattatataacatatgatattatcttttgtatcagggaatacggtttagaggcatgtcgattcctgaatgtcagaaaatattaccttcagctgagtctggagaagagcccttgcctgagagtcttctgtggcttctattaactggaaaggtgtgataatcttaaaacattttatacatacaataagtttcaactttatatatgaatgatctaaagtatagttttccctcctttcggtataggtgccaactaaagagcaagctaatgctttgtcaacagagttggctcatcgtgcggctgtgccaggtttgtagttcacctctaggctctgtttgtttatgacctcagtttcatgactcatcaaaacttagcaaaatacaagctgatgataattataaactggatattatgatgttgcaaatataacaactctccattgcagattatatatacaaagctatagatgctttgccttcaacagctcatccaatgactcaatttgctagtggtgttatggcccttcaggtggattgctctgttatgtactattttttttttctatgcattctcttagaatttgtttattttcaggagcatcttatcttgttgattgttattcaggttcaaagtgagtttcaaaaggcgtatgagcagggtgatatttctaagtcaaagtataaactttcaatagttctatactttgtttcttgattggcttatagtagtaggcatcatagaaactgaggtttcttgtcaggtactgggaaccaaccttcgaagatgccctaaacttgattgctcgtgttcctgttgtagcttcatacgtttatcggaggttaaattttaggatcttttccaatgcttttagcttcctggactagttaattttcttagattttcctttcttcagagtgttatttttcaatgtccattctaattcacattgcaggatgtacaaggatggtagcatcattccattagatgattctttggattatggtgcaaatttttcacacatgctgggatttgatagtcctcagatgaaagagctcatgaggctttatgtcactatccacaggttagtcctggttctcttcgtttcaacatgtctcattaattagaatacataagctaaagttttcttgtatataatgatgatcttcctttattttaccaactcttaccaaatttctatagcatgatcaaggtttttttttcccttgtctactggtttctgttttagtgatcatgaaggtggaaatgttagtgctcacgctggtcacctggtatgtatttgccacatgatcttgatgcatgataatgttttgaacttatagacatttctgatggttctgtttttggctaatgatgtttcttcacttaggttgggagtgcactttcagatccatatctttcatttgctgctgcattgaatggtttagctgggccactccatggtttggctaatcaggtatttatatccttaatgagtcttatattgttcgaatctacaagtgtatataacttgaactctaagattgactcttaattataagcttaaacttggaatcttactctgttttttttcgttgtcttgttgtaggaagttttgctgtggatcaaattagttgttgaggaatgtggagaaagtatatcaaaggaacagctaaaagattatgtctggaaaacgttaaacagtggcaaggttgacaaaattatgctctgctttgccttttgaaactatccatatgtattgcatgctaatcatgacaggccataacttgaattattgtataaataatgaataaaagcttcggattatgttttgattatggggtttgcctgtgaatgttgtcaggaaacttaaataaacatttgtcttgcaggttgttccaggatatggccatggtgttttgcgtaaaacggatccaagatatatatgccaaagagagtttgccttgaagcatctacctgatgatcctctttttcagctggtaactttttttccccctcaaatctttggtcatgctttaaaattttactggctcacaaattatgcaagtctataggtctcaaaactttatgaagtggtgcctcctattctaaccgagctgggaaaggtactacttatactcattcatttcatgtgctaccagattttctgattttctctggttttatgaatcttgaaattgctgtatcaggtcaagaacccgtggcctaacgttgatgctcatagcggagtgcttctgaactactatggtctaaccgaagcaaggtaggaactacttgtgtatcgaggctttgaccttgttttgctgaatcttggttattatagagtgacattcctttcaaatatagatactacacggtgctttttggcgtctcaagaagtcttggaatctgctcgcaggtacatacatacattcatgccatcgacaattcgattttagtacgtatcgccatatccttcacaataaagtcagactaatcttttattccttttctgtttcagctgatatgggacagggcacttggactgccacttgagagaccaaagagtgtaaacatggactggctcgataacttcacgcgcttgaaccgctaagttaatccctgactgatgttggtcaaggttctctcttttatcacttcagccttctcttccatttgattgggtagcttttagagataaaaaaaaaacgatttttcgtcgaaattttgttctacagagttttcattttggttcttctgcaaaaacaataaagtcaaacaagtaaagaaacagtctttctcagattgagacaccatattattgttcctcaactttgatagacaaatgatgaccattgatatgtattgattagtctttggtgaattatcgcataataaacaatactcatgcaaccagtcccgctcaaacagagtgtttgaagtgaacagaagcagagtcaagaaattcaaagcctcgggatcaaacagaagcttcctcctatcttaagaagctccctacgaagctttatgatgattctacaaaacacatttgctatcttcagtgaacagtaagatgcaacgtgttctcttctaaaccttcagatatttggctaagtataagactcttcgtaatcacaaaaagccagaaatgcgaaattgattttgagtcttcttcctcacaagttttctctaactttcagaggagtcgctggatcctgttaccgagaattattagaaaccgagagcagaggtttctagctaggacaggaaatatattattagaacatatcctagtcttccttgtcatggccagtccagtggtgcaagagaaacatacaattccaactcaagtatgtgatggacttgacttgcttaagccgtacggcatcctcggaaaaccaaaaccatgtcggaaaaaggaacttgacttccttgaggcttacggtttcctgggctcgaacccaactacccaagtcaagtgacagagagtcttgacatagattaggcacctccttactaaagccagacaactatacaagattattggttcaaatattagtcaatcctttcgcgttttctggcttgacccgtctcgtcatgcaagggttggtcacgagtttcttattcttctaaagtttaccaaaattaatcccctttctttatctttgcgtgtgagtgtgaattaaagtattgatttatttaatgatgggtttaacttaaaaagtttaaaattgtgtcatcaaaacccatcaagacgtgtcttgtaactctgtatcacacaaacattcgtgtgtactaataaatgcaaatattttagtcacaccttttcgtaattatttatttatcatttaaataagtgacaaatctgggtccaatctccattagaggcccatttacaacgaattaaagcccatgtctttttgaagtggataaattccatgcccaagttactcacattaaccaacatcgatataaaaggaacattctatttctagtaacccatgagggtcattcctgtaaatagatctgccttccttcctcctctccgtagacggttgttgcacacaaagcgaggttggtttgacccgaacctacccgacccgttactatatatataaacacaaaatgggtaaagcaaaggtgaaaatcttatacgtaggtctatatcatttccatatgaagtggagatatatatatatagctaacgagaccctaaatatttttttctttcttataacatatagtttcatttcatatatttaaaggcttcataatacgaaacaaggtgataagaaaaaaaaaaagaaaaaaaaaaagcaaattaaaaattaaatccctaaaaacaaacgagcgtattgttatgaaggaggacgaagaagaagaagcagtgatatcgaacggcatgaacgacgacgacgatactaacaatattaacaacagttccactgaatttgataacaatcgtatcggagacggagacgataacagtaatctgaatcagatcaaacaagtatggggaacgtgggaggagttggtgttaacatgcgccgttaaacgtcatgctttttccgattgggactccgtcgctaaggaggttcaggctcgttcccggagttctctcatcgtttccgccgtcaattgcaggcttaagtatcaagatctcaaacgtaggttccaagattccgtcgacgtcggagacgaaaataccgaagcggcggcgaacgaggaggatgaagtcggtgaaatctcttggctcgagcagttacggagtcttcatatggcggactccgccgtgaggttcaacgatgtgacgactcgatactgtacggagaagtctctatttctccgccgctggatctgagtttttcatttttattttagttcatttttgaatattttttttggtgtttttgattaggtcgcttcagttaaaagttaagaaactagaggaggagaaagacggagatgatggggacaataaaccagatctgaaaaacgacgaaactaaaccggtgagagttaaccgggaaacgacggagtctgaccgggatgataataggtcgatgaacgagtccaactcaactgcctccgtcgataaaatcgccgatcacgaccgattagacggagataaaatggttaaggctaacgagaattcgagaaatccagatcccgatccggttaataaggcggagacgccggaggaggaagaaagaacggttagtaaaagatcggaaatgagtaactcaggcgagttggatgaatcgggaacgtccaattgtcttggaaagaggaaaggacagaaatacagaagcggcggaggcggcggtggtgtcaaatcggccggcgataaatcacagccgttgatagatatcattaagcttattcggtctcatccccgtggttccgtgttcgaatcccggcttaggagccaggtaagcaaattgccttattttctttcgactttctttttaaaagtaaaattttctaatcaacaattaattacacaattatatcttgttttccaacgattttttttgtcgtcgttttccaacgttacgatcatttgcaacatgcgtcaaaactataaaatctttttgataaacttttacaacaattattctaaaatatctcgcgttcaatgttattaatatgttgcattccattactataatattgttttcttaataagacttaatcaagtatttagattgatagtttatagttagccatatatattcaggtctatatatagccaacctaatgttttttgttttttaaactccaattctccgactcaaatagtagtgttactttcagaactttattaactatctcgccaaataaatgcaaaacttattttgtttacgaatgatttggctttgcaacttaattttaaactctcattatatctttatgttttaatggtagattttgttgtttccattctcttctttcccttgaaagaatttccaaggaagaccaataaaattatgagaaattatccacacattgtccaatttggtcgggaccactccttattttatagtgttaaaactcttttctctcttctttttttcgatcaacaccttttccattttccgaattacgctttattgtttcttattgttattagtatgaaacgtatataacttttcatatggtagcaaatatctttacgatatatatactatatagtattgaatatcgatgtttccttgtgtgtttgctctgtaaatttcacttccatatccgattatgattttcgtacagttggtaattttcttatggaatcccattttgtttataacgtttttcttgttaccaacacacaaggtttttcgttgaagaaatttgtttttttcgactcatttaccattttgatcacccaacactggacacctggcagcttccggttgaatcgtggttttgtcgtgtctttcaagatatggtcaacttattgacttttcagccgcctttaagcgagacaagtttttgggctttagttgggcttctagaaatccattacttatgacgtttttatggtggtctcatactttctcatctctgtcatctcgcaggacactaaggattacaagaggttgataaggcagcatttggacatgaagacaatagagaagaagatggagaaaggatcttatgtttcttcaagcctctctttttacagagacctcaagcttctcttcacaaacgccattgtcttctttcctacatcttcctctgaatccatagctgctcaagagctaagaacactcgtctcaaacgagatgaagaaacgaacgggaaaattgggtcactgtgtcatcaaatcagaggctgaatcttcggtttctagacagaaatcctctgttctttctcttgttccctgtaaaaagaagagctctgctttgaaaaagacgtctccttcttcaagctctagacaaaaagatgagaagaaatctcaggaagtttcggaggagaagattgtgactactactgctactactagtgcaagaagctcgaggagaacgagcaaagagattgctgttgttgctaaagatactaaaacgggaagagccaagaataatattaagaaacaaacggatacgaaaacagaatcatctgacgatgatgatgatgagaaggaagagaattctaaaacagagaagaagacagtagcggataagaagaagagcgtggctgatttcttgaagaggataaagaagaactctccacagaaaggaaaagaaacaacgagtaaaaatcagaagaagaatgatggaaacgttaagaaagagaacgatcatcagaagaagagtgatggaaacgttaagaaagagaacagtaaagtgaaaccgagggaattgaggagtagtacgggtaaaaagaaggttgaggtagagaataataatagtaagagctcatcgaaacgaaaacaaacgaaagaaacagcagaggtggctactggaaaacgaggtagggaatcgggaaaagacgataaacagccaaggaaaagaagcagaagatgaaactgaactagcctgtggttaagcatttgtacatttgatgtgccagaagtattcatcattcctcttaacatcactgtttcggagggaatcataggtcttgttaggtatttattctcatagttaccagtttagtttttttttttgtttaaactgtgttttccttgttagagggtataactatagtggttataaactgtgtcttcatttatttgtctagtttgatcgattcatgttcacaaaacctgaaacccggtttttactttggcaataaaatcaaatctcaaagaacatcaatatatacagagcacttaaggcccataaagccaatatttatcattgttgttttgccctttttccaatatgtcccctaataatattgggccagagctcatcttttgccagagaaaatctacaaaaaaaatgcaaatgctctacttttttttttcaccaaaaagactcccattttttatgttttaaaaaaaatagttattatcagtttttaaaaaactgggatggggtttctaacttttcttggatgatttattttagtttatgatttggttaagaaaatttagagctcttttctctattatatttgttttgacgatgtaatgatctcttattctcgttatccacttatcctaatcctggtattcgaagaattatatacatcagaattgatagtatcaacattctgatgcaacattacatttgtataacacttgtgcttttaggaagatattaatttgtgatatgagaagtttgtttgttttgttttgaaatatcctaagatagaaacaataacaaattgaaaattgttccttaagttaagtgtatatggctattcgctactcgctagtagctatctcgtacctacctatctcttcgactatgttatacaaagtcgagttttttcaatctagttagatccatgactttatatgttataatttataatttaatcatatcaatgagttagagatatactcgataaagcaaatgactggtttaaggcttgagcttaaaaacggtataatcacctcttcgactttgtatagttttttcaatctagttagatccatgactttatatgttataacttataattcaatcatatctatgagttagagatatagttaatgaagcaaatgactggtttaaggcttgagcttaaaaacggtttaatcaccattgtgttgcatgcatacccgatttcattacttatgtgtgtaacgtttgtttttcaatccttataaacagccagagaatcataagttaattatcaaagcccaatactaatttgtttagagaatgactaaaaagtctaaaataccctctaccataaaaaagaaattaataataaaagtagaaaattccacatgccaagttagaaaccactactactattggccactggaaaattcaaaagattgtaatttggggtttcttgtaatttgaatgttaaataaatgtttaaatatgtatgaccgccaagttatttttttattaagtaaagtccaaaagttttgggaaattctgtgaaatatcccattttattaggcatctcacgaaataatgcacatttgcgggatttttttggaagaagacaatttgtgatggtgtggccgtgtgggcagtgttcaaagttgctccacggactaagcatcactttccttgaatgtttcgatgttttctattcaacacagtaacacacaatagtacttaatccattttatgttttcccattcaagatggtgtgctatattatgcacctctgttaattaaacacaaattaatgcattcgttttgtaatatattgaatcaaaattcaaaaattaacaatctactcaccagaaggggaaagttgaaatgattagtgtgacatttatatcttcatattatgaaatagatacattgtctgacaaatttttataaatgacctaataaatgctcatatatatcactttttttttgttatttgttgtgtactcgttaattagttatattaaataacatttgattaatcaaaaatggcatgctcatattttgtttaatttgtaaaatacaaacagtctttcaaattattcttgctaatgaagggccttcactagaaatttcagtcgttattaatttcctcgtagtttcctttaattttattatagccagtcaattttataatataactcgatgtacatataatataaccctgtgcatgcatgcgtacgcaatgaacaacaatcaaaatgagttatttgtttcctttttattaattggtatatgtagcttgttttatacgaccgttgatttaacctaataaaatgcatgagagtataagaataacaaatgaattatttgtttttttcctaaattaagatatatttatacatatgtatagatacataatatatagcttttcaacgaggctgttttaaaatgtagcgttgatttttttcagaaattttgcgggccctttatttttgccgaaataatcacatggccttagttctaacaaaataaacgaaaactacatgcctttttctgttggttgattaaggaacgtgtctaataatcatcaacgtacgtcctaaactcttaatgatacttacagttttgatataaattacttgtaaactagtctttttatctgagtttttttttggagatgaataagtaaataactaatgtaggagttatttacttagcacaccgttagaggcagaaacaaaggctttattagcagcacttcagcaaatttggatccgaggctatacacatgtcatcatggaaagagattgccaaactttgatacaacttgttactaattctgcttcacattgctctttagcgaatttactcacagatattcagttttgggctggaaaattcagaagcattcaaattaaattcgtcaagagggagggtaacatgatcgcacacgatctggcgaaatttagttgtaattcatcttgtttttattcagattctggacttttacctagttggcttcaaaaacatcattgtaacaacactatttaattaatgaaattgttttgacgtaaaaaaaaaaaaaactaatgtaggagttattaatatcaaaaaaatatcttaggagttcatatatagttgtatacttgtattcattatttttaaacatgtacggacaaatttgaaacggaagagtgcatacttttccacctttgtgcatttggactttaaggatagtatgacacgtggtgaaagtcctcgttacgatttactagagacctccagactccagagttggtgaaatgactaatgatatgtattttatttttgctaaggggttatacattaatcataatcatatcaatgagtcagtatattgactgaaaaggtcaaagtctttgctatctttttgacaaactaatttagagactcaggttaagatataaaataaatttcttaacatgcatgtagtcgtttttttataaagatgatcgcatgttcacatgcagacaactgatacagctagaactcgttctttaatttctacatagacagatcgcgtaacttgtctttaaccaaatgacggataaatagcgtttcagcactattgcatattcttttgttccccaaatattgatgtttaggagtttttatacaaaaactatgattactaattttaaatacaatattattttctttcaccagaaaatatactatttaattatggagtaataataattcataaattcaaatattttcaatttattttttgaagattgaaaattattaacattaattaattaaaaatgtataaaaagtcaatttttgtggaacatgaaaaaaactcaaaaaattaattttttaggaatagaatgaataattttaagaacatagggagcatatgggcaagagattgtagatcacatatacgtcctaattttctctacttatttaattctaaaaaagataatggtttcgtaaaaaagatgaggattaataagctacagcaactccccaattcagaatgggtgttaacactttcatcaagttcattatttgtaaccatctcaatccagtatttgggactaaattatttctctccttaaactattcattgttcattatcttttttagtaaatataaaatttattcaaaaaaaacttatttacattatatgtatattttgtaaggtgctgaaagttgaaattatgcttgaattggaaaaacagtagatattgaatcaaaaaaatattagaaaatctttatctagttatcttaatggatgcaatgagctgttttatattaatcataattataaacgatgggaaattggccttctggttatcgctaattatattgtccattggactaatatgaaaatggcggaccaaaaaaaaaaattactcaaaagaaaagatcactctagcaaagggatctcgccggcactgtattaaataattgataattctctgtgttgattttagtagaagtcaacataggagtaatctatttggttcaacatcacacagcgcaagaccacatagcgaatctatttggttcaacatcacacagcgcaagaccacacaacgacttactattattaaattcatctcatgttttttacattaaattcatttcatgctttgaccaaaaaagagaggaagaaataaacgttcgggatacgtagatgtaacgagttggactaaatgatgtatgaattttccacgtccctttgcctatatataccttcacatatctcatcacttctttcacaactcaaccatctccacaatattctttcgtttgagaaagaagattaaattaattcgtttatttattttgcaagaagagagaaagcaaataatttgtttcattatttcatatttgaaaatttaatcagcttcattcgatattaagaaacaaataaaaaatatctttaaattggtacattttcttctcttatatatcaaagttatgttataatgattttagaaattctcttgtgatcaattggctcagattatataatcttgtttatatcttatgtagatttataagttttctgcaaaagcccttataaaccattttcaacaatgacgcagtaagtgagcaaactccaacaaacaaacacttctctacaaatctttataaaatagtttctgacaattttgtgtgttaattaatatttacagaaggaagaatatgtactcgaagaaaaactcgttcggccgatcagatttcccagagggtttccttttcggtacagcttcatcggcttaccaatatgaaggagccagaaacgaagctcctcgaggagagagtgtttgggacacatttgttcgcaaatatccaggtttgtatataactaaaaacctactttttgcaatatttaggtttatatattttcatattgttattcttctttttttttttttttttttttttttttttttttttgtcaaggtcatattgttattcaatcatgatattcatcaaagtaactttaattaatgaaatgaacattttgtagagagaaattgctactctaatgcggaccaagcaatcgagttctataaccattacaaggacgatatccagagaatgaaggatattaacatggatgctttcagattctctatctcttggcctaggatttttcctcgtaagttcttagctcataagtttatgtataccactattttcttcgattaaagatattgatcagtgctcttcatacaattcaatagatttaaccttttgttttgttcatatccctaaaaatatagttggaaagaaaagcaaaggagtgaacaaagaaggaatacaattctataacgatctcatcgatgaactcctcgctaacggtagttatttaactattttaacttacatatataacctaaccttatggattgacatattctaatatgttccatattatgtatgaacaggaataacacctctcgccactttatttcactgggatactcctcaagcacttgaagatgaatacagtggatttttaagcgaagaagctgtgtaagtgattattaacaatcaatatattagtttttgactacttttcggataaattaatgttcctaacatatatgcatataaatatactatcttgcagtgatgacttcaaggattttgcggccttatgttttgaggagtttggcgaccgtgtaaaattgtgggtcacactaaacgaaccatgggtgtacagtattggtggctatgacacgggaagaaaagcccccggacgtgcctccaaatacatgaacgaagcagccgtggcaggagaatctggtctcgaggtttacactgttagtcacaatctacttctggctcacgccgaagctgttgaggtcttcaggaacaatcccaaagtacggaaaaggataattaatttcactttaacgagcatttttgtctttaaaaacatacttattgagatatacgacgtttattgtttggattacagtgtaaagatggcaagatcggtatcgctcattgtcccgtatggttcgagccttatgactcgaactgccctaaagacatagaagcatgcgaacgagctatggagtttatgtttggatggtgagtggttttatatcttaattaaaggttacatatttcaaaataaaactagtacatatgttttgttaagtttctaattatttttgtttgggtgctttctttaattaacaggcacatggatcctacggtgtatggagattaccctgcagtcatgaaaaaatcgatcggaaaaagattaccatcatttaccgcagcacaatccaagaagcttagaggatcttttgatttcgttggggtgaattattacagtgctttctacgtcaaaaatattgatgaagtgaatcatgacaagcccaattggagatcagacgcacgcatcgaatggagaagtaagtggagttgtatataatatttatatcattttagggtttcttggctccaagctttttgttactgttttcttgtctcacaagttttcaatttctattggtacagaagaaaacaacgcagggcaaacattaggtgtaagaggtggttcggaatgggactttctatatccacaaggccttagaaagtttctaaattatgccaagaataaatatgaaagcccgaaatttatgattaccgaaaacggtaataattttataagaagttctttaattagtcttactcaatttaatccgggatatagtttactaactcttgttttgttaaaattgttcaggacactgtgatatagattatgagaaaaagcctaaactttctaacttgatggatctccaaaggacagagtaccacaagaaacatctccaaagcatccaacaagccatccagtaagtgtctcttctaaacatctccattataagtttcttgtgggacaagaaactttactgtgttgaaaccatatactttgtttcatactgacgatgaaaattgttttggtcagggaggatggggttgtagttgaaggatactttgcgtggtcattactagacaattgtgaatggaacgccggttatggagttcgatatggactattctacgtcgattataacaatggactaaaacgtttcccgaaaatgtcggcgatgtggttcaaagaattcttgaagagagaagaagaaattgaagattcagaagaagaagagtacgtgttgaagtcaacaatgaacaagaagagattcttattagcaactggttcatcagcttcatgctttattcctaagatgtctgaatcttctaaagccctcgaactattattctaggtttaattttgttttccttattaaaatttgatttgtcaaaaaaaatttgatttgtcaaaaagcaaagcaaagtacttcaataaagaaggcttaatgcagggtgctttgcggctttaaactttcttccttttttggtctcctttgtacactatcagttgttgatttcaaaatttcaaatcaatcattaaaataagataatcgttcgttggtttataaaaagcatcacgcgccggagttagcacacacgatctacgcgcgattgatgcgcgtgggttaaaaagtagaagagtgtcccgatgataacgtgtgggctcaaaatcatttatttggactttgacggacccaatcccatagcccataaacccgtgatggagtattgtcattcaattaaaaacattaatatgtagtaactatgggcgtatgctttactttttaaaatgggcctatgctataattgaatgacaaggattaaacaactaataaaagtgtagatgggttaagatgacttatttttttacttaccaatttataaatgggcttcgatgtactgaaatatatcgcgcctattaacgaggccattcaacgaatgttttaagggccctatttcgacattttaaagaacacctaggtcatcattccagaaatggatattataggatttagataatttcccacgtttggtttatttatctattttttgacgttgaccaacataatcgtgcccaaccgtttcacgcaacgaatttatatacgaaatatatatatttttcaaattaagataccacaatcaaaacagctgttgattaacaaagagattttttttttttggttttgagttacaataacgttagaggataaggtttcttgcaacgattaggaaatcgtataaaataaaatatgttataattaagtgttttattttataatgagtattaatataaataaaacctgcaaaaggatagggatattgaataataaagagaaacgaaagagcaattttacttctttataattgaaattatgtgaatgttatgtttacaatgaatgattcatcgttctatatattgaagtaaagaatgagtttattgtgcttgcataatgacgttaacttcacatatacacttattacataacatttatcacatgtgcgtctttttttttttttactttgtaaaatttcctcactttaaagacttttataacaattactagtaaaataaagttgcttggggctacaccctttctccctccaacaactctatttatagataacattatatcaaaatcaaaacatagtccctttcttctataaaggttttttcacaaccaaatttccattataaatcaaaaaataaaaacttaattagtttttacagaagaaaagaaaacaatgagaggtaaatttctaagtttactgttgctcattactttggcctgcattggagtttccgccaagaagcattccacaaggcctagattaagaagaaatgatttcccacaagatttcgtttttggatctgctacttctgcttatcaggtttagttcttattcttttgtccattggttcttttttgtatgtatgttaacatttttcgattttgcagtgtgaaggagctgcacatgaagatggtagaggtccaagtatctgggactccttctctgaaaaattcccaggtttttttcctaattagaaaccccaaaagctttagatctctataaagatttaagcctcaaaatgttggagtttggttcatatatgtgaatctggttttgtcttgtgttcataacaaaaatgggttgatgatgatgaaccttcttgatacttctttctttttcttggtattaaatttaaagataaatatttttgtcattttcattttcagaaaagataatggatggtagtaatgggtccattgcagatgattcttacaatctttacaaggtcttatttgctttcttcacccaaaaaagaaataaagtcaattatacatcaagcattacattttgcttcatgatttttttttggaaaatcaggaagatgtgaatttgctgcatcaaattggcttcgatgcttaccgattttcgatctcatggtcacggattttgcctcgtaagatatcgatattatcggattagatctttgtaacttgtaagcgttgttatatattcttgatgtaactcttctcaattgtttattaggtgggactctaaagggaggaatcaaccaggctggaattgaatattataacaacttgattaatcaacttatatctaaaggtaatgtttctctgtttctcagtctatttgattttaatgcacatagaggaaatcttggtgatgtttaggatattgccaaaacccttgtaatttttttttttttttcttgtaatgttgtaaatgtgtcaggagtgaagccatttgtcacactctttcactgggacttaccagatgcactcgaaaatgcttacggtggcctccttggagatgaatttgtgtaagttcattcataagatctctatatggtaagattacgacactgcgaagatttgttgttgatattttggtaatgaaacaggaacgatttccgagactatgcagaactttgtttccagaagtttggagatagagtgaagcagtggacgacactaaacgagccatatacaatggtacatgaaggttatataacaggtcaaaaggcacctggaagatgttccaatttctataaacctgattgcttaggtggcgatgcagccacggagccttacatcgtcggccataacctcctccttgctcatggagttgccgtaaaagtatatagagaaaagtaccaggtatgtttgttctatttttttatctagagtagaattgtttgtttgtgtttgaacttagatttgatgtgtactctttccaaatgatctcatagtaattttttatcatactaataaaatccttttgtttgtaaaataaaaatgtttacattgtcctttagagtcccttactctgtttttgctttaactctgttttactcttgtttccggtctgctctgttttcgctctgtttcttgtctgctctgtttttactctgcttaccatttgctctgttttactttatttccgctctactctagttctactatgctctgtttatgctctagtatgtttctttaccgtaacagtactgggattggcttgatcaatctcgtatcgaatcttaattttggttaccaaatcctcataaaaggtagactgttgtaaattgtgacaacattttcctcctaatatgatgtccataggcaactcagaaaggtgaaattggtattgccttaaacacagcatggcactacccttattcagattcatatgctgaccggttagctgcgactcgagcgactgccttcaccttcgactacttcatggagccaatcgtgtacggtagatatccaattgaaatggtcagccacgttaaagacggtcgtcttcctaccttcacaccagaagagtccgaaatgctcaaaggatcatatgatttcataggcgttaactattactcatctctttacgcaaaagacgtgccgtgtgcaactgaaaacatcaccatgaccaccgattcttgcgtcagcctcgtaggtccgtcaaccatatggctttttcttaacctataatttaacctttttctcttagacattcgtcaactaattaattgttattaattgtattaggtgaacgaaatggagtgcctatcggtccagcggtacgattatttattctattcagctttgtttagttaagaattagatcaatctcctgatcatatcaaagttatcattgatagactgatagtttaggtaaaattgtgatagaatttgattttgtacgcagtttttttctctctgttttagtagtacttgaagtagaattttacaagttaaaaatgcatgatttatccgaaataattgttaacattgtgtgatgcgtatattataatctatgattcgtttcactaattcaggctggatcggattggcttttgatatatcccaagggtattcgtgatctcctactacatgcaaaattcagatacaatgatcccgtcttgtacattacagagaatggtaaatcatagcattcaatagactttttattacttatatttctgaatttaaaaactagttcagactaatcattttatatcgcgtctctttcttcaaatcatgtaggagtggatgaagcaaatattggcaaaatatttcttaacgacgatttgagaattgattactatgctcatcacctcaagatggttagcgatgctatctcgtaagtcctcctttacaatcttttatattgaaatttctttctttcgtaaaccaaagcattcgaagccaaaattagattggccatgtctataatgtatgtatgtatgtatttgagacgccaacggaggcttaaaagaaggtttctgaaaagtgaaaaccatatattacataaaatgcaggatcggggtgaatgtgaagggatatttcgcgtggtcattgatggataatttcgagtggtcggaaggatacacggtccggttcgggctagtgtttgtggactttgaagatggacgtaagaggtatctgaagaaatcagctaagtggtttaggagattgttgaagggagcgcatggtgggacgaatgagcaggtggctgttatttaataaaccacgagtcattggtcaatttagtctactgtttcttttgctctatgtacagaaagaaaataaactttccaaaataagaggtggctttgtttggactttggatgttactatatatattggtaattcttggcgtttgttagtttccaaaccaaacattaataaataaataaataaaagagttgaggttagatttagtctgtaaatgttcgaaatattacgtaagagtttgactgtaacaaaatattatagtctatatgtatatactagttacgattaaaacataactattaaaaaattgcaaaagtttgtacttggtaatatgattacttatacggttataccattaaacatttctcttgaaaccgcttcaaaacagtgccatataaacttaagcagcacctattttagtatatcttaaaattaattcttaaaaacataattcgtgttggtaaatattaataactgaacaagtttctggatattctaaaaagtataagccattatgaacagttttgggcttgggccatgttagaaaagccactcaaaaatatcatatactaattcgtcagctaaaacaagaaatttcatacgcagaaatttgtgttgaaaataccatagttcaaatgtttaataaaaatatgtaaaattagtttgattgttttgactttttcgcgtctaattagtttgattgatttgattgcttctgttcccagtacatgcaatatagtgatatattagaggtaaaacatccgtgttgacaacagattaaaaaaaaaaaagtaagacagtgcatagttcaatttctagtagttgttctcatcttgtttttggcaactggacgtgtcataaaatttgtttcttaaacatgaattgtattttcgtagggaaattaattcaacgtttagtgaaaagaatcaaaatcaatccagaactagtataatacatttttctaaaactattatgatttttttataaaaaacatttttttaatagcataaagtttttggccaaagcccataatccttttagatctgaaatcatagcatgtaatattagttttgtcccaaacgttaaaccggtgacctttaaactttgcttaagatcttttaccaattgagctaataatactcgattaaaaagatattttttgactttctcacgaaggatatttttccttttcatataaatgataagttcttttgtattaatctttttgtttcctgcattatttttttcgttttcgttgttagacattgtttcgttcttgaaaatgatagtaggtaacaaatgaaaaaaataaaaaatacaccttttctcctaatttcttatatgttttattaaattttattattaaatcataaatatagaaatgtataatttactaaaagggagggacaagacaaaaaaaagaagaagaagaatatataagcccatctccttgtgttggaaaattagttgctcctttacaatatacaatttcttaataggaaaacatgtcactgccagttgattgttctcatctctttttttccttagtggaatccgataaggacaattgctcatatctgtttttttttttttaattgaagatgtacattttctcttctctgattatcttccatacaaaatctgcactcagtaaaaagaaattatgtattgctgttttaataccactagatgatcacccgtactacgccgcagtttttttggattattttatattatttaatttaaatttaatttttatttgtctaatcattcactcatacaataagcaattactttagtattaaaaatatttttttctaacaatattctcaacaatgcatcatacatataattcataaacaacatttatcttaaattaatttaacagagggtagtattggattctagaaacctaagaatatgatgataaagctccttacgtattcttcagcgtcagtgatttattctataaatatcataagagaatataaatatcaatttaagagaataacttactcaaatcattaagtaatctacgactattatacattcatactttgaatttggattacaaaaaaaaatcttcgagtatgagaaaactattaaaatagttttattgaaaaatcatataaaataaaaataaatttagtaatagtataattaaatatgtaaaataaaattaaataagaaatatatcattaacctataaattagaagttgaagagcttacattaattatttaatagacacatgtcaaatgctaaagtgatgatgtgtcaatcatatgaagagagttggccaactttcatatatatgattcttagtttcgtaccaattagtttctcaattcagtgcatgtgtagtcaaatgtccaaaagattgtttctaagcaattaaaatcttatcaaaacttcattgcccaaaatattacgaaagcttgtttctgtgtatgatatacccggtaaaattaaaatgatcattatacagaacaaatcagcatgattttcggataaagatgacacacatttgaaatcgtagccgtactacgcgaaatacatgcactcttcgttatgttaacactttaacagtgaacgtagccataatgttgaccacattcaacagtcaacacaaacattactttacacacaaatatatgattatatatacatatgtacatgtaagtgaatgtgagcaataatgacgggaatattcagagaagacgatggtgaatgttagcagtgatcacgggcacattcaaaactgactgtggacaaaaaaagctcctggccttaaatatgattgtgccaaaaatagtacaaaactaagaacccaaaatggaattcgagacctatataataatatatatgtatatagtctttccttggaaagaaatcttatgttattaagaaaaatactataagttatctctctatctagatatgatatatatgtccaaacatttccacgtagatgacgtatattaccgaggataatcctctatataaggaagagaagctcgagtaataaatctcatcactttgaaatctcaaaagacaccaagcaaaaaaacaaagacagacaaaaaaaaaagagagagagagagagagaaaaatggctaagggatcgtggttcttcattatcctttttatcatctcaatgttagaaaatatgatcaattctctagaattagatcggcatagttttcctgatgatttcatctttgggacagctgcctcggcgtttcaggtaatttctttgatttgtaatatgtaaaatagcaaaatagctttgtgattctacaatttttattagtcacagagttaaaatcattatttaaattcaattattctgttgttttcttttgattatgttactttgaatgttgaaacaatcatgaaactctgcaatatcactcttttttttgggatcaaattcacaattaaattaaaaaaataatttgcttaataatcttatcttcattatgcattcatattttttttttctaaaatacaattttaccattttgcagtattatggtcatattatataagtcatagtagaataaaataactagttcagaaattaactgttgaaaagttatttaatttacgtttaaaaatgttgcaaaagaattttcatgtggatcctcttgtctaatatccacttctttttttgcttgcgggttctcacttaggtgtttttaaacagttttaattacaaaacatgctctctttttttttcttgaaaacaaaaaaagtgagccgtaaacttaaacacatctgggcagctggacttcaaagtggaaaaggctgctcgactttcaatttaattaactaggagaaaatatcaaatactatattatttgctgacgtctacagatgctaacgttccttttttcatttccccctcaaatgttctcttcttgtcatataaagttgcttgcatcatcataataaaactgtaatgttttgatttggggacaaaaagaatatctgctttacaaattagctctgcgatcaaaatatgtttttaaaaagtatatatttatgcagtacgaaggtgcaacaagtgaaggtggcaagtctccaactatatgggatcacttcagcctcacgtatccaggtctgtccgattacaaaaatcaacggaccgattttattgacacttctataccaacaaaaccatatttgtgagatgtgactaaaaactgatggttattttattaattctttgactgcagaaaggaccaaaatgcataatgcagatgtagcaattgatttttatcatcgttacaaggtactatccaatatttataatcaagctatttacttaaatcatacatgtttataattaatcttattatcaaaagaaaaaaaaaagcaaaaaatcaaattttctttgtaaatgagttatatcaaaaatcaggttatctctaaattttgtaaataaaacatcaaatttaaaacaactttcgaaataagtcaatttactttcttgaaaagttggtgcactgaacctggagtcttggacttatatatagatgtcatttttgttttggttatcaagatttttatttatttatcttttgattaacgaatcctttttaatccgacaaaaataaaacaggatgacataaaattgatgaaggagctaaacatggacgctttccgattttcaatctcgtggtcaagattaatacccagtaagtttttttactctctctctctttttgttgatttttttttttttattaacacttatttatacgaattcgttatgtggtgaatttttaattactataggtggaaagctaaaggatggagtaaacaaagaaggtgtacaattctacaaggatctcatagacgaacttcttgctaatggtaagattattaattcattagttaagttaaagttctctaattaaattaaaggtgcggttataactcaaataatcaaaataaaatcatactaattacatgcagacatacaaccttcgatgacgctctatcattgggaccacccacaatctttggaggacgaatatggtggctttctaagccctaaaatcgtgtaagccaaattaacacatatataatatttcaaacgcaaaaaagttttgttattgtatacattaatatactgttgttaatttattttttactttttttgaaaacagagaagattttcgagattttgcaagaatttgttttgaagagtttggagataaagttaagatgtggacaacaatcaacgaaccttatataatgactgttgcgggttatgatcaaggtaacaaggcggctggacgatgctcaaaatgggtaaacgaaaagtgtcaggctggagattcgagtaccgagccttacattgtttcacatcacactcttcttgcccatgccgctgcagtggaagaatttcgaaaatgtgaaaaaacttcgcatgatggccaaattgggatagtactatcaccaagatggttcgagccttatcattccgattcaactgacgataaagaagcagctgaacgagctcttgcctttgaaattggatggtaagttatataagcaaaaaaatttaacgattttgcttctcatcatatttatttgtaatcttgatattcattctatatgtgtataggcatcttgatccagtcattcacggagattatccagagattgtaaaaaagtacgcgggaaataaattaccttcatttactgttgaacaatcaaagatgttacaaaattcatcagatttcgttggaattaattactacacggctcgcttcgctgctcatcttcctcacatagaccctgaaaaacctcgtttcaaaactgaccaccatgtggaatggaaacgtaagtaatgctaattaattactaaagattgatccatacgcatatatataaattaagcttacatggtaaaactaaacaagatttataaattgttttggaacagtgactaatcacagtggtcacatcatcggacctggggtacgtatttacgtctttttttcataactatcaatttcaaaagctacatgtaatcattctaagatattttaaattttgtattatatatcctcaggaagaaaggggcttcttattttcacacccggaaggcttacgaaaagttcttaactatattaaagagagatacaataacatgccagtctacatcaaagaaaatggtcagaaactctttccttttcttttttttgctaaagcagaaagtttttttttgttaactagaaattcagaaaactttttagtacgtagttatttaactaaagatttttttatttttttattttttaactctaccacacattaataatatcctagcagtgaattgaaactgaagtttgatttaaatatatttccctaaccagttcaacaaactgatttaaaaaaaaaaaaaaatggtgtgactattaataatttacgttgattactgaattacaggaattaatgacaacgacgacggtacaaaaccaagagaagaaattgtgaaggacacatttaggattgaataccataagacacatttcgaagaacttcacaaagctatagtgttagttcttgatctgtttctggtttagtctctgatctttctgacaatatttaatcaaattcggtcgagttttttttaactaataaatttatgatatgtttatagggaagatgggtgtgacgtaagaggatattacgcatggtcattgatggacaattttgaatgggagcatggatacactgcaagatttggtctatactatgttgattttgtcaatggtctcaaacgttatccaaaagattcggtcaaatggtttaagcggttccttaagaaatcggtcgtcggagagagtaacaaagaggaggtagaggagatgtcacgcgcggaagggaataagacttttaagggtttcgaagaatcggcgggtttctttgcatctttcatggcaatgaaccaatcgaggagagatgaggagaataatcgttgctcctttgattttcctcatactcattttggtgttttgcaaggcatagagaacccatcttcattttattgatttcaaatcccttatgtttttaaattccttatggttggacatgtagttaattagaatttagctcatgttaatatatgaacattttcatggtaatattttcttcttggaatctaatgggtggcatactggcatgatgggttctggctttgtgtgacaatatacatatattattttaaagctgttaattaatccgacgcttcaaatgagttcaacagccaattaaaaaatttcataatataaacaatattatatatcgttaatcaacatatatatgattttttttttttaaactaagtttatataaatgtttattcgcggcaaggcgatgtatattataaactattcttaaactgttatctcatggttatttgttatttcttacaacaatattttacttctttaactgttttttttctttttctacagtttataataatattggatgaggatcaccttctttgacatcgttaacaaattgttgatcgcaccacaatctctttcatcacgtcaccaaaaatatgctggatctttatctgacaagtgtcaaattgtggctttcttaaacattttagcagccaaaaacgacacaattacatacagtacccagtcagagatcaaaacttgtgctagctttcttcttcgtcagcaacacttatcgctggcataaaacattggagcaaagtcaaaaacgtaacaaccggtccgatgtaaaataaaactactatagttacaccagaaaatatccgaagcttatatatagttttcaggagatttttgttatctttggtgaaaatagagtcaaactcggtgtcgctccatttctcgaagcagactggtccctgagtcgtggtgaagtgtctctcgttctaagatgtggactccagttttgtttttcttcttttcactgtagacctagattgaagaaaattaaaaaaaactcataacgtttggcttttgcgtttttgttattgaaagatgaatatattcatttatattttttatcccgtaagattgccttctgatttgacgtcattaatatgaaaaatctaaaccaaaacaaaccgaatagttaaaaatcgatttaaaattatgaaatggttttgcattagtcaaattaaacggttttacattccttaaaatttagtatcaaaccaatctactgtatacattcggttttaaattggtaaacagaaaataaataaaaaactcttaaccgaaacgtaaacggaataatcaatctgtttagtaagtagtgtatctgacttaccaaaaaaagaaagaagtaagtagtgtatcggaatggttgcaattaaatagtgcaaaccgatttggatcattggtttctggttagaaaccgaaaccaataaaccgctttggttcaagagtcttcccttgggaacagtttagacttgagagcgcggagaagttggagacggtgaagatggcagtgagacaaaaagcaatggcgacgttgccgaaactgattcaaagcatgagaaacgaagttacgaagcagcccagtcttgtcttaccatctctcagaagagctttctctctctacgatcagatcaatctcatcgataacgttcctgaggatcagctccgatttcaggagtattcatctctctcagtcatgttcctaatttgactatgtagcaagggaatttggattttcgggtatgaaatgaatcaattaatggtgctttttgcaggtttgatgagacgagtttcactgtgaatggggttaaatacgaaggaagcttgctctgtgttgggaatttgctaatgtcatggagccctcgttacttctccgacatcacaacggataggtaccagtaccaccttctcccttctcttcagcttacttatacaggactagagctagagttaagagattgcgtaaagttataatcttttcattgttcatgaccctctctaatgaatgtttagttaagtccttttcagcgaaagttgaagtctgtctagtgtggcctctcttgtacgtactagtatctgtttgctgtgtttgatctaactttgtaatatctatctactctttctactttgaagttaatgtgtcattgctaaacactttacatgtctaattcatggatgcagcttgtcaatcttccagacggttcgaccaattccaggtactatacattttagcattttgtaagttgatttcttccacattccttatacaatagtctttgttccaggatcgttggaaactgtatgatacgtttgcgtacgccatatttttagtggctaaaaagtaaaaaccttttgcacatattgaagtgtatcatcagtggtttttgactctcctttttctgtttttttcttttcaaaacaatctctagagctcttgattgtcgggtgtggaagatacaaccacccactgaatccccaagtccgtcagttcgtaaagtcaatcggcatgaagctagaaactgttgattctgtatgtcctttgttctattcaagtatttgttctgttggtttggagtatttttctgtgcttattgattaacgctctgatctatccagagaaatgctgcatcaacttacaacatactcaatgaggaaggcaggatcgtggctgctgcattgcttccttatggagttacatcgtaagaaactcaacacctctggaatactgtagaacaaacttcgaacagcttgactcgatctttatagttgaaacaccaacatggtcttcttgtctactgtaaatgatatatttcactctatttgtaaaacttttgcaaaaaaatcgaaatttacaggattaccaccttgttacgtagctttaatttgattgagctttatctgaaaaaatagaagatatagattcctgctttattccattggttacatggatagttctccaagaacacactgaaaactcagtatagaacctaaaacacaagtactgattaaaatgttgaactgaattttcttcgatgcgccatgcttctaaccatggtgctctctccatttctatgttcaacttatgtagtactaaataactagttagactttcaacttaagcttaactgtggaattcatatttcgttttctctgcaaaagatcatccatcttttagtggtgtttagctgagaagatcattcgagccggcaaagtgattagatctcagcgaatactcttttatgagtttggagaagaaagaatcttctctctgtagcagtttggcaggtgaatcaaactctgcgattcgtcctgctcatagaaaagtgacttagacctcataattatgtgtgtgaatgtatatgaaaacacatgtatattgttcttaccatcactcagaaccagaacaagatcactctctatcactgtgtggattctgtgtgcaatagtcaccactgtccgatctttaaactcttgattgatgatcttttgtattacaccatcagttgcagaatcaacagaagcagtggcttcatcaagcaccagaatgttgcttttcttcaacaacaccctcccaagacaaactaactgtctctgccctacgctccagttttctccattttcaaccactgttacatacattcaagaatcttagttttcattgtccaaaaaacattaacttaaaaacgtttcctgataatgatttcagaaacctcacctgtagcatccagcctctcatcctttgcacgaataacatctcccaattggcatttatcaatggcctaagtatcacattgtattagatagagtatttgtcaaaagtaaatcaaacaagaactacagagaaaattttgcaggtttcttacttcccatatttcgtgatcagtgtactgagctagagggtctagattcaatctgattgttccatcaaatagtgcaggatcttgaggaataatcccaagccttgatctcaggtcatgtagacctatcttggttatatccacattatcaataactatggttccttgacttggctctacaatcctaaacaatgcctgaattaaagttgatttgccgcttcctgttcttcctactactccaatcttttttcctcctggaaactcacaagtgatgttcttcaagacagctgggaaatgttctgcataacggacctggaacaaagacatctcaggattgagaatcttgattacaacttgtttctgaatgtattgacatctactatgttatttacctgtaggtctctgaagacgattgatcctacatttggccagttatcaagaggtctgtgaccatcaattactagaggtgcttcactggggattttggagtactgaagaattctttctacagaaatcatcttgttttctgcattgcatatattccatatcactgtggcttgtagaacattcagacttaagccatatgtgaccccaagaccagcaatacctgtaaggaaaagtgaaaatgaagtttaatttctgatcccattagacaatgtattttatggtttatgatgtatgagacttacttggattgatgacaccttcagggagagtcacaagtaacaccaaagaaaaagcaaagacgaaatgagacagcaaattcaacctgaaggaaagccactccattgctgatgcaacatggaaccatggccttgaatggctatctattagaacaaggtttgagctaatgaagcgatctcgttgatcaaaagcacgtattgttgttgcaccagcaagcgattcagcgaaatggtggagaattggagctctttctactcctgacatgcgtgacagttctcttgctgttggtgtgtaatatctctaaagacaacacgagtaaacaaaaaagtaagcaagatttgttgtatcattgtcaagaaattggatttgttttctctcttgcctggtaaaacacgcaggctactgctactggaatgaagatgacacaaacttgccaagcaacttgcgacatgacgaagatggttccaacaatctgaatgatcgaaaaagcacaccaacctagtttgactgccatttccaaatccaggacactttgatctgtggatgcctattacaaaacatgaaaaaaccaaaggtattttcagtcttgattataaaaaacaaaaccatgtttttttgttggattgattctggtacttcaccctgttcaagattcttcctgttggagttgaatcgaaaaatgacattggagctctgaaaatgctgcagagcatccttgagaagaacgtctctgctgttgaaagtccacctatggcgactagaatagtccgtgctaaaacacaaagtgaacttcctgcagcaagaagtgcataaacaagtaaaatccgacccattcctaactttggtatggattcagcagttggaggagcagtccatgccatccagtaattgctagcaatctgtagcatttggaagcaagactgagccaatattatgaatggcacaagcaatccgcctttcaccgttgttaaatatgccaagtaaacttctttgccaattactcctttctctgtttcttcatcttgcactagctttgcttctttctttttattctctgttgaaatgttatgctctgagtcacaatgtgtctggagactctctgcaattgatgctgtgtcatcttttgatccctctttgaagtttctgcttgacttttcaattgatagaattgagtccagcgcttcgttatgagctcctacaagaacttcaaaacctatgttttgctttagaagctcttcaaacttgcctgcttgcatcactcttccgttttgcatcacctagtatacaaagtacacacactaatgttaatggaaaaactaacagcctcttttgcatttgcttattatcaacggctgtttctcttaccaggattagatctgctgctggaagaaactcaacttgatgtgtgacgtaaagtacagttttgtctttcagtatccccattaagcaatcctgcaaaacaagtaaaaacaaaacatagtcaagtgtggagtttaaagagagaaaggatcaaacgaacaaattgtcatgaacattattatacttcaaagagttctcttcctgtatgagcatcaacggcgctaaaaggatcatcaagtagatatatatcagcattctgataaaccgctcgagcaatctgtatcctttgcttctgacctccactcatgtttatccctctctctccaatctctgtcaagtctccattcgagaaaagctcaaagtcctttatcaaagcacatgctttaacagttctctcatacttctcactttcatacatacttccaaacaaaatgttatctcttatagtcccgcttagtatccatggtgattgtggaacataagcttgtttaccactgactctgactgttcccttcagcttctgaatctcccctaggattgaagagagtaagcttgattttcctgatcctacagctccacaaaccgccactttcattccgctttttactttcagttcgatgtcatcaagagtcggtctgcttgactcaggttcccaactaaatgctccattttctatttcaacacttaattctgtatgatcctttgagcaatactcaactgcatctttctgagtctcactttgttgaaggtaagaagctattctatctgcagaaaccttgctctgaacaagtgctgagaggagatcaggtaaaccgaaaatcggactttgtaacatttgaaacgttgcaagagcagataagactgctccagctgttagcttcactcccattaacatacaagtaacaaaagtcaccacagagatcaatgaaggagctccccaaaggataaaagttgtgaaagcttgtaacctcaaagacttccataaacaatcatactctttctttcttaatgttttaaccttgttgagaaactggttatcccatgcttgaagcttcagaatcttcatgtttttaagaatctctgaagttgctttcattctatcatctttggcattcatgatatctgattggtagtttctctgaagccttgtcagggggtagttgcaagccatcaccattaaagttgtgaccaatgcagctaaagctccaagtcccagatgtttttgcaagatataaatcgccgagaaaatctgtattggtaacatccatatgttgtttacataccaaatgaagtcagtgattctctgaacatctacactcatgtagttgatgatctctccgctcgtgtggctttgccgagattgacttgataaaactaaacctttctggtagatatgtgatatcaaagctgctcgaagacgtagtcctagctgacgagctccaaagatccattgtctttgagtaactgtctcgacgattttcgcagttagaaacccgagtgcaagaaggtaaccatggtttaagctctgggattgtttctcacttagaaactctacaaagtcattgatgagatatggtccgatgtaagctgtgctcgcgtttacaactgcgaataccgcgttgattgcggctttcctccacacatagcgaagaaccgagttatagaagaaagcatttccaggtccttctttttctttggtggttttcagtttctggtcaaaggcatgagagcaaaatcgagcggagtctttcacatcgatatctggtacatcatctttttctagaggtctcttgtatccaagggagaacaaagggttgatccatgagaaagtgatgcgttggaagagagtagcgtttccatatggggaagaagaagaataagaatctttcttgttctgctctgtttggtcaccaagtagtaatggctctgtgttaccgctggattcaagaagatgaaaaccggttttgcctctgattgaaacagccaacaggaacaaggatgcaagaagaccagtcaagtcggcataatcttgaaactcgagaggctcgtgtttcgcggtaatgaaatgagcatcaaaggaaaaggataagatgaaactacagagccaccatgaccttaacatccaaggaaacttgacaagcctcctttctctgatcttcaccacaacaacagaaacaaacaaccacgagaaagactgcgaaacctcagcggagaagacagaaacagaggaatcacaccgtgagaccacgctgtctcgaaacagcaaaagcaagataaagcaatgagtccctaagatagaaacagagcagagaagagatatgttgtaagagaagctctgcttcacagttatgctctgcttcttcaagtcttcttctacatcattagatcctctgtttcttactacaccaaaccatttaagtgccaaatgaataagaaagaaagcgaggaaagtcacttgcatagcgatgcttatacgttccttcaagcaaagtgagtttcctagttgcaaccattgcgtcgtcaggagatgagaaccagtttctgctgctcatatcaaagcaaacacaatcaggtaaaacgaaaaaaaatatcattttttcgagtgaaagagtaacaactttacctgcgaaaccaaagggcttgaacatagcttctttcttgggttgagaagacacgtgtcttcgtaccgagagtctaagtgagaagcactagagatgattggagacgatgaagtttctgttttgttttcagatggagttgcaggagccggagagagtgtgagacaagttttgagtttatagagaaaagtgatgccagctacaaaacaaaacaaaaaccctattgaatatatgattgataagtttggggacattggagaaaaacaaattgaattctcttaaatatacgttaggccgaccaaaaatttaatttagaaatacgtatatatatctaaaaggaatgtctttcttagaattactttcttgttttgaagtatttaaacttttcaaaattaattttgtataatctgaaagtaaaaagaattatcaacaagacaacaacatgcatgatatatagtgagtgagtgacgatattcgcactaatacttaatttttaataattacgtactatgtattatcataacgaacgaacgagcataagaatattaatttaaacctgtgaaattgttttgagacaaatatatttgggatctagttagaaaatggagaaaatcacatgatgatgagctcaggtccaaatttattgaaacatgaagcaataaaagagacttgcagaagttaggacctgaataataatgatgacttgcagagtcactggtcactcttattattgatagtaataaacgtggacaatgtcaatgtaattactgttaatgatgtggtccttgaaaaacattaatattggaacgccgaaagctcttgatttccctgccttatgcaaaggaatgcaatgcaagtcgtatgttctttcacttcgtgattaaaaccttagatgatccggcttttcattaatagttaaatagtttatgtctagactaacttgatttttatggaaatgtgactaccgtacgtaatcgattaatcgctgactcggatttatttgtttagtaactcgttactcacggaagtaaaaacacacacacagtaattacaaatataacaagctcacgtgtaaataaccgtattgacgaagagtatatacgaaataatcaaaaataataaaatcgttgaactaaatacatatgtttcttcgtagaactttgattagacttggtagtactgagagttctgttgtttagcgtaattaaggatgaacgtgtgaggttcgtagaaaacgacttccttatatgaaagttaggctcgacacttttggaaaagagtgaatgggagagattccaatccgatttgattctattgtatcctgtccttttccactgaattgtagttggctgggaccatatatactcgactgcgatattattacatcgtatcttcgagtactgtataaaccaataaatagtatctgacaaagttgatctggccgtatggtctcaaatcatcatcaaagtcagtaagtcaccataaaacccagttagggttcgaactcctttgagaaagttgaaaggaaaagtggtacagaaccaccaaactagctagatgacccgaaagacaaaaacctatagtaatagtattgtttcttctacttattacgtgattagttctctttttttcattgattttttgttgttatagttctacttgccctaatttttccttgaattgctaatttcaatgccgacaaaaaaaaaaactgtagtatttttttaggtttgatcaaagtgataatattccaatagtcacggtctagtaattaaagcaaagttaattccttaataaaatagtttgactttctaagaatcgttcttttcttttctttttgtgctttaagggtcgttattccacaagataattaaattaaagtataagaatatacgtgtacggtgtgccacaacatcaaagtgaagaagcacgttgaaaattaaggtcgaaacaaaactgtagtatatgattatttaagtcgatgtcctttttttgcttttgtttttgtcttcttataacgagaaacagaggacaaaagggtatgggattatataagtcgatgtcttttggcccataattgagtcgagatgttgctgaccttaataaaaagggtatgggattattcatttcatctaagtaagtaccaacatagattttcttaataaaagcatctttaatctttattagtattaattattatacagaaaatcaatgtattttaccatattttgaatctaaatagatacatatttcttcacaatatccgaagaaaaaaactagactaaataactcaaaggatgagtggatgactaaaaaaccaagccggttcacagagtttagtcatcatcttaaaataaatatctgatatatatatgtgttaaattgacaaacaaaaatattataaaaagttgtatgaattatgtcttgtcatgtacgcatgtgttagtgatttccacgtgagtttcttggctgtttcggtcctttttcttcatatgtttagctgcgtcatcaacttgccttttcttaactttggaaaaatgcaaaaaaatagtacattagaaaaagaccccacctcaattcaaatgctaaagtctgtgaattgtcaacgttcattgcacagattacttatcctatgaatttaagaatatagtacatctgaatacactgtaatcttaaatgcatatatttagtagtctatgcatttaatgtggatagcagataaacatagggatcacacacactgattgttacgttacgtataagatcttgggcctgcctttgtataagtgaacaagtcagatatcacatgaaggcccattaactttagggagaattaagaaacagagagaattcgaagctagagagctacgcgtcgagattctttcttgctgaataaatcaatcacacccgccggaaaaaacagtaagagcataggacttgccggcggtaacggaggaatctgagctctacacaacggacacttggacatttcactgagccatgtatctatgttggtgtttgaaaaagtctttggttgttagtcgttggtttgcttctggagtcaattatgtccgagtcttatggaggagtctaagtagtggagttgtggaattgagtcagttcgtgtagtggagtcatggagtctgttcctattttttagttgttctgttgtttctttcgagtctttgtaaggctatttaaagccatcttttctcgttaatgaagtatcacttttagtcaaacaattcacatttggtatcagagcttgcaaacaagaaacaacctgtgtgagagagtgatcgagagagaaagataaaagagagagagaaaagtgagaaaaagagagatgtcgtcatctgagaaatttgtgcagccagctatcccgagatttgatggctattacgatttctggtcaatgacaatggagaattttctccgtagcagagaactgtggagattggtggaggaaggaattccggcaattgtcgttggaacaacaccggtcagtgaagcgcaaagaagcgcagtggaagaggctaagctaaaagacttgaaggtcaagaattttttgtttcaggctatcgatagagagattctggaaacaattcttgacaagagcacctctaaggcgatctgggaatcgatgaagaaaaagtatcaaggttctacgaaggtgaagagggcacagctacaagcattaagaaaggagtttgaattgctggccatgaaagaaggagagaagatcgatacttttctgggaagaactttgacggtggtgaacaagatgaaaaccaatggtgaggtgatggaacaaagcacaattgtaagcaaaatactcagatccttgactccaaaatttaactacgtggtttgttcgattgaggaatcaaacgatctgagtacattgagtattgatgagctccatgggagtctacttgttcacgagcagaggctgaatgggcatgtacaagaagagcaggcgttaaaggtgactcacgaggaaagaccaagtcaaggaaggggtcgtggagtgttccgaggaagtcgtggtagaggaagaggaagaggaagaagtggtactaatcgtgccattgtggagtgctacaagtgtcataatttggggcattttcagtatgagtgcccagaatgggaaaagaatgcaaattatgcggagttagaagaagaagaggaactgttattgatggcgtatgtggagcagaatcaggcaaacagagatgaagtatggttccttgattcagggtgcagcaaccacatgactgggagtaaggagtggttttcagagttagaagaagggttcaaccgtactgtgaagcttggaaatgatacgagaatgtctgtggtggggaaagggagtgtgaaagttaaagttaatggtgttactcaagtcatacctgaagtttattatgttccagagcttaggaacaacttgttgagtcttggacagctacaagagaggggcttagcaattctaattcgtgatggaacttgcaaggtgtatcatccgagtaaaggtgcgattatggaaaccaacatgagtggtaatcggatgttctttcttctagcttccaaaccgcagaagaattctttatgcttacaaacagaagaggtgatggataaggagaaccacttgtggcattgccggtttggacatctgaatcaagaaggattaaagcttctcgcacacaaaaagatggtcattggactgcctatactgaaagctaccaaggagatttgtgctatttgtttgaccggaaaacagcatagagagtcaatgtcgaagaaaacttcatggaaatcatcgacacagcttcaattggtgcattcagacatatgtgggcctatcacaccaatttcacacagtggcaagaggtacattttaagcttcatcgatgattttactcggaaaacatgggtctattttcttcatgaaaagtctgaagcgtttgccacattcaagatcttcaaagctagtgtagaaaaggagattggtgcgtttctaacttgcttaaggacagatcgaggtggagagtttacttcgaatgaatttggagaattttgtcgatctcatggcatctctaggcagttgacagcagcgtttacaccacaacaaaacggagtggccgagagaaagaataggacgattatgaacgcagttcgatctatgctaagcgagaggcaagttcccaaaatgttttggtctgaagcgaccaaatggagtgtgcacattcagaaccggtctcccacggcggcagtagaaggaatgacacccgaagaggcttggagcggtagaaaaccagtggtagagtattttcgcgtgtttgggtgcataggatatgtgcacataccagatcagaaaaggagtaagttggatgataaaagcaagaaatgtgtttttttgggagttagtgaggagtcaaaagcatggaggctttatgatccagtgatgaagaaaattgtgataagtaaagatgtagtcttcgatgaagacaaaagttgggactgggatcaagctgatgtagaagcaaaggaagtaacattggagtgcggagatgaagatgatgagaaaaattcagaggtagttgagccaatagctgtggcatctccaaatcatgtgggtagcgacaacaatgtgtcatcgtcaccaatcttagctccgtcgagtcctgctccgagtcctgttgctgcaaaagtaacacgagaaaggagaccaccgggttggatggctgactatgaaactggagaaggagaagagattgaagaaaatttatctgtcatgttgttaatgatgatgacggaagctgatcccattcagtttgatgatgcagtgaaagataaaatctggagagaagcaatggagcatgagatcgaatcaattgtgaagaataacacatgggagctaaccacattgcctaaaggttttacaccaattggcgtaaaatgggtgtataaaaccaagctgaatgaagatggagaagtcgataaatacaaggcgaggttagtagctaaaggatatgcacagtgttatggtatagactacaccgaagtgttcgctccagtcgcaaggcttgatacagttcgcaccattcttgccatctcatctcaattcaattgggagatctttcaattagatgtcaagagtgcctttttacatggcgagctcaaggaggaagtgtacgtaagacaaccggaaggattcataagggaaggagaggaagaaaaagtttataagctaaggaaggcattgtacgggctgaagcaggcaccacgagcttggtacagccggattgaggcttatttcttgaaagaagagtttgaaaggtgtcctagtgagcatacgctttttacaaagacaagagtaggtaatattttaattgtcagcttatacgttgatgatttaatatttactggaagtgataaagctatgtgtgatgagtttaagaaatcaatgatgctggaatttgaaatgtcggatttgggaaagatgaagcatttccttgggatagaagtgaaacagagtgatggtgggatttttatttgtcaaagaagatacgctcgggaggttttagcaaggtttggaatggatgagagcaatgctgtgaaaaatccaattgttccgggaacaaagcttacgaaggatgaaaatggcgagaaagttgatgaaaccatgttcaagcagttggttggaagtctcatgtatttaacagtgacaaggcctgacttaatgtatggagtatgtttgataagtcgattcatgtctaatccaaggatgtcacattggctcgctgcaaaaaggatcttaaggtatctaaaaggtacggttgagcttggtatattttacaggagaagaaagaataggagcctgaagcttatggcatttacggacagtgactatgccggagacttgaatgatcggaggagcacgtcgggtttcgtttttttgatggcgtccggagcgatctgctgggcttcaaaaaaacaaccggtggtggctctttctacgaccgaggccgaatacatagctgcagcattctgtgcgtgtcaatgtgtttggcttagaaaagtgttagagaagcttggagcagaagaaaaatctgcaactgtgattaactgtgacaacagctcaaccattcaattgtcaaagcatccagttcttcatgggaaaagtaagcacattgaggtgagatttcattatctcagagacttggtgaatggtgacgttgttaagctggagtattgcccaacagaggatcaagttgcagatatctttacaaaacccttaaagctggaacagtttgagaagctgcgtgcattgcttggaatggttaatatgtctgaagtaagctgaattcaggagaattagcttaagggagggtatgttggtgtttgaaaaagtctttggttgttagtcgttggtttgcttctggagtcaattatgtccgagtcttatggaggagtctaagtagtggagttgtggaattgagtcagttcgtgtagtggagtcatggagtctgttcctattttttagttgttctgttgtttctttcgagtctttgtaaggctatttaaagccatcttttctcgttaatgaagtatcacttttagtcaaacaattcacaatctatgcaatccgcgtggaaacagtgacggcaaatcgttaatcgcctcatcttctctccttcctccgcctcttgtagacacacggcgcagaaaggcggagacgaatcatcgtttgccgccgctctccaccggcggaacgtaaaagtgcggtggcgataccatggacttatgatgatcaaagtggcgaatcttacagagaagacagcaacggaggtaaccaaaatagaaacggttatatattcgcaaaatctatacacagattgagtcaacatcctccaacaaaaagtattaacaagtgattgaagaaagaacgagagactcttcttgtggcgtgtgtgtgtaagaaacctacgtagacgcgtgatcatataactacaagtcttttgtgaatgaattgatgaggttattttcgtggactaggagtctgttgaaccaaggattcacacaatagatttgtttagagagggaaaacaaatctagtaatttctcttcattaggtattctatccaagactcgattacaaaacatgttctaatctcttatgaaatacattagggttttgctcaagaacagaaaaagagttagggttttaaaaaggtatagctgcatccatgatggattgcctacgtaccctgtgaagggatcaagccattcgtagttctcaataggtataaagttatgtgtttcttctccgtatccaaagatctcccttttgtgaagtccctgaggcactttatataggatccttaaaccgcccccctagcgatatttttcggaagattcttatttatccttaggtcggttctagaggataatcgtcctaaggatattctccttattcttcggaggttttggggagatttcctgatttcaacattatcttcaaagattctcctttatcatttccgaaagtcccataaaagatcccattttaccggaaatgatccttggagaatgaatggtttttacaagtctttgcctcgcgtgttcttcacggctcggtggtcgtttgagaggtggcttcggggcaaacggtatgtaccggctcggggcgcgcttgatgactccattaagctcagttggctgtctcccgagccgatatagatgtttcccgcagcgttctcacgattggctcgggctgtgttcatatgattaacacccgagccattttacaaactctcttcgggacggtcgatcgaataaggtcccgaggtgctttgttctaggctaggggccattcatatgtttaaccatgaggtgattgttattcttagactgtttggctcggtcttgcttgtgggggaatccgaccccaacagttagccccccagctcgttggttaagagttaatgcgacgagcttcatgaatggtgtgaccgagccagctgcttccgcatctatactgactgatccgtatcttttgagagtaaggcttgttttttcttggtgctacgagattctgttcttgacgagtgttgctatctcgaactcaaaatgttagctgttgacaagttgtgagctaggaaagctgctaggagacttgttgaagaactccaagctgttgacgagctgttaggcgggcaatagctaggacggctgccgacgagctgttagctgggcgaactacgagtcagagaaactgcagacggactgagctaggaaaagtgcagactaggtgctagctagacgaactgcgagctaggaaagctacagacgatcagggagctaagaaagctgcagacgagctgttagctaggcgaagtgcagacgagctgctagctaggaaagctacagacgaactgggagctagaaaggctgcagacgagctgtcagctaggcgaagtgcagacgagctgctagctagacgaacttcgagctaggaaagctacagacgaactgaggtggttggctcgggtacaaattgcctgagtcaaagttgggttcagtatacttcgttccgagctgatcgtctcggtaccaggttcttcgggataactggatttctaagcacagaccaaagcagataagaaactgtatttagccgaagcaaaacctcggcaccagtgtttatgataactgggtttcagtttccgaggcggttgactcggtaccagtgtgtttagagtaactggatttcagtagatttgaatacccacggttgcgacccgatttgattcaatcttttaccagcgtttagaaacgagctggggcaccggtgttaagtataaccgggtttcagaagatagaattcatagtctgctcggaaaaacattcgagcagattcttatcttgaatatttatatagcgcgctgtaaccgaagcggtgtaaatgaaactttcaaaataataggccgtcgcccgttaaaatatttcaaaataaaaagatttagaaatcaaattccaagaaaatttgaagtagaaaaatcgaagttcaaatttaaaccgaaacgagagtttaaaattgaagtgggagtatggatatacggaccccacacccccccctttttgctcggtagacgagtgtttttgcaagtttacgcaaaaaatatagcagagaatgcatatatatgattaagctgtacttgttagattataatagataacacttatcttattggtttggacatagagatgatgatatctacggcatggacgatctgaatctctgagattgtaaacgtcgttgtatgaaaatctacatttaagatgttgttcgttagaggagatctcatctttgcgtagaaagagagaagcaaggatgaatgcttgtgatataagtgagaatgtcaatcaagcttaattaatatgtaagaaagtaattgaacttatcttttatgagggaggtcgtcgagacagaattggagatcgcatcattgatgaatgagtggaaaccttgagcgattgctagtgatgatccattgtcacttgttggtgtaatgtatttccttttgctgatttatagaagaactgataacttccgtttgaaccgttaaactattgatcccaccgttgaatctttagctgatagtcccacgaagattttgtccgaattttagtcagatcagatattgcctgaggcttctaccgtcttatgaagttgctgtgacaaagtgaatatttcttcctttgctatatttgttttttggtttcggttgctctggtagcaacatacgatcctcagtgaatataggaggcagtatccagtgatgcttactctttggctgacttctggtgatctttctttacttctctttcctttgaattttcattacacgacatgtttttgtgagatctgaacaacgttttgtgattaagataaagcagaagctctccaaggcgaggaagggacaatttttcttagatatatgttaagacgagccgattgtagatgaaagacgagcttgaggccggaagacgatcttgatgtccgagtaagaatagagtttattcgtcttatagctgaaccttgtaaaaggttgcctacgtacccttagaaagggatcaagccacacgtagttcatatcgtgataaacaagctaggccattactggaggaaggtcgtatggtaggtgacgagccggcagatgtgcgacgagctggatgaaccgtggtagaggcgaattggacaaaccgagttctgctgaaggtttagactagctggcgacgagataggtggactatgcagccaatggacgaactgccgctaggcgaggaggtagatgagttttgcagtcgagggatgagttgatagctagacgagttggacgagctgaatagctgacagctaggcgaggagatggtcgttgagtatgggaagagcttgaagacgagctgaggagcttggagacgatctgatgaacttgagtacgagctaaggagcttgaagagcttaaaggcgagctgaatagctaagacgagctacttgagaagggcgagctacttgagaaggatgagctgacgagcttcgtgagacggacgagatgacgagctttgtgagacgggcgagctgacattgtgtctctgcgtgtcaggcggcattccccccttttgacatgacacgatattctgagtcttctgagtcgctctagatcactgggaaattgagcttgagttcggctggtcggatagagacgaatctcggatcgaggcgaggtcgatggtaactccttaatagacatctcggatcgaggcgaggtcggcttctttagaaagctgactcggggcgatctgtagataggtatatcattgcctagttcatcaggattttcaaggaaaacgattccgaagctgactggttttatagagctgggtcctatgactggctgcacttgcttgaggtaaacgtttatatctctcagcatatatcttcgattaaggcgaggtcaacttctctgaaaggaagattctctgggcgatccgtagatgtattaaaccttacgagattccttgtgatttgtcgggaaatcggccccgtggtgagctggattattcagacggattcgttaagaaacagacagcatcgacttcagaaaaacggtgataactctgagcagaggtatccgatggagttacggttagattccctggaacgctgatctccggggcaatccgtggaatggttgtacgtcatctggttcattgtatcttgacgggaaatccccccgctagtagacggatctgattgtcttggcttgatgagcgtacatcgaatacttggatgaatgttatgcgaagagagttctttgtcgttccccacagacggcgccaattgttgaaccaaggattcacacaatagatttgtttagagagggaaaacaaatctagtaatttctcttcattaggtattctatccaagactcgattacaaaacatgttctaatctcttatgaaatacattagggttttgctcaagaacagaaaaagagttagggttttaaaaaggtatagctgcatccatgatggattgcctacgtaccctgtgaagggatcaagccattcgtagttctcaataggtataaagttatgtgtttcttctccgtatccaaagatctcccttttgtgaagtccctgaggcactttatataggatccttaaaccgcccccctagcgatatttttcggaagattcttatttatctttaggtcggttctagaggataatcgtcctaaggatattctccttattcttcggaggttttggggagatttcctgatttcaacattatcttcaaagattctcctttatcatttccgaaagtcccataaaagatcccattttaccggaaatgatccttggagaatgaatggtttttacaagtctttgcctcgcgtgttcttcacggctcggtggtcgtttgagaggtggcttcggggcaaacggtatgtaccggctcggggcgcgcttgatgactccattaagctcagttggctgtctcccgagccgatatagatgtttcccgcagcgttctcacgattggctcgggctgtgttcatatgactaacacccgagccattttacaaactctcttcgggacggtcgatcgaataaggtcccgaggtgctttgttctaggctaggggccattcatatgtttaaccatgaggtgattgttattcttagactatttggctcggtcttgcttgtgggggaatccgaccccaacagagtcttgattaaataagtcaagctaaacaagtttttagctaaaaatatggttattgcgacgaaagtttggctatatcgtatgatgagaacatgtaaaatgtagagataattacatatacaaataaagcatgaatctgtaaacttagttacgtatacgacaaggcacatcattgactttggagtctctgttttgttctgttcggtgaatccaagtccttgatgctacaaagacaaagaccaaacaataatgcattacatatctacaaggactagagagaaaactgtatgtttggatgatcacgagcatcaccttgtcaagtttcagatgcaaatagaactctgacagcctcgaaaacctcttcgctggattttgcagcattgatctggagaaaatcagaaacaagaatcaaaatcaggaacagcgtatgatagtaatgatcaaggaagagaagtggagaaccaaatcctaacctttcgaagtttccctttcgattcgtagtagctaataattgggagggtagattcaacaaacactttaaatcgcttctttatggtctctatattatcgtcttctcttcccttcataaccaagaaacgacactagtaaaagaggtaccggaccttaactagacaatattttccaagtaaaaataccaacctggttcctgctcataatgcgtctttctagttcttcttctggacaatcaaagaatagaacaaaagcaggctcgattctagcctgtcaagatccagacagtattaaaccaaggaaggttaacgagacaagtagaacttgattttagactataataggaatcaacgagaagacaattgacaatgtgttcaagagaaggaacatgacccttacaacattttcgaatacgtttcgattttcttcattgcgagggaagccatcaataaggaacttatcattaccactttcctccatagctttacacaaaagtttcactgtgatctcagacggcactattctcccctctgcaatcatactttggatcatggctctgaaacaattccacagaaaaagaaactgaaaacttcaccaagtgtttggttttcattaccaaaaaaccatatcataagattagaacaagattcactttacacaacaattagttagagacatgagactcactgaagcatgtacttacccaaattcagaaccggacttaatttctgctctgagaagatcaccagcactaaaatgggtatagctaaagtgcttcacaacattagcacactgagtaccttttccacttccaggaccacctatagaatcaatcaaaccactcaacaccacaaaaattaaccttcaagcatatgattacatagagtggagttattattacccaacacaaaaactacagttgatttcttccacctagggcattcatgttcgtcctgtaaccaaataatatcctcgagaatttagaaaaaaataccagatttttattagttacaatgataatgaaattggatagacaggtgaatacaacaccttattcggagcatcgataggagtttccatgatcaaggcgatgtgacgatgaatcacgcacaagtttgacaagtccaggcgaagaagattcaggtgaagaagatagagaaattaaggaagaaaaacggcgtgtagtctgctaacggttgcaacgtgcatgttttaaacggcacgcggttctctaaagtgaagcgagacggaaagtacacgctatggcgtttttaaatagtaatgataagtttattacaaaacgtctcaagtctctctcaatagggtctgatgatcatatacatacatacaaagacatagtcaacgaacttaaacaacagacgaatttatagttctctaaaaccatcaccagaaacacacttttaggttttatcatcttacccaagcaacagcatcaatctcatctcttgctttcttgtataactctagcctcttcgcgcactctagtctccggtccatcaatgccggatcttcatctagtaactgtcccaactgtttcccctgtgaaattttccgaccaactataagatttgatgcgcataccacataatatgaaatatttgagacattctattttagcttcagtttacctctctcttgctgatctgagagtagaagtaattgagcaatgcgagcttggcttgtctaacctgacagtacacacaagcttttggaatggtgttacgaagtgtgtccgaaaccatattaacatacgcagatacatttgatgctatccttctgaaatgtccgtctccatactggtctaatgttgcagacgaaggagaagcggtttggtttttgctgttggttactggtctttctatttcttgaggaagtttccggaagaactcagcggttagatacgcagattccatgtcaacaagtcgaataaccgacttcttgctttcttccctgaatttctccaaggagctgttggctgctgcagcaagctcgacttgcagtgaagggaaacgctttagctcctgcattttgccaccagggaagggagatccagtcaaacccgtgtagtacattctaccagtataagaaaaatcaatagtgaacttacctcagtttctgatattgatttcctcacaagctctttcaagacatagtgaacctgttgcatttgcgccattctcattacggtcttgtatttataaaagtgaagtgaggagacactgtagaagaacttacagcatccacagaagcttcagctggacctctaaagtaacccagtgccccttcgattagacggcgataaccctgttctggtgcaatcaagtgaggttgataaccatctgcctcggacacgattttcttcacgctttgtagagaaagatggcgatcaaaaggaagctttttaagtgcagctggaagttggttgtcaaagactccatagatacggtcacctccaggacgcctaaaatgtaaaaagaggttaaccaaaaatcaacaacctaagcaaaaaaaattccacaggaagattagcaaagatgtttacccgccatcaagatgttccttgaatatcttatcgaatgcacggcacatctccaatatagtgtatagttgagcctgagaatgagaccaacagatttagcacatatcaaaaaacgtaaaactttatggaagagaaatagtttcacataattgtactctctcaccccagcatcaactgcgacaggccgacccattcggtctaactctctttcaagttcttcaatgcttttgtttattaaggatagtatacttggaatacgggtcctgataacagactccaagtgctgcataaaaaaacaaagaccataaatcaaatgaataacaatgaataaacaatccgataaagtctcaagtatttcagcctttgattgaataccttagagagcagctttgccagatattctgaacccattttgctggctaagtgaccatagtcaggactggtatcaaaatattctcgttccttgcgtcttgcaagcatcatatcgacattcttattaatatctgcttgtgaacggttcactatcccaacccaaggatgttgcagcctgtaagatcttccttcaagaaccttattaaggcaagcagttctgaatgttagatcaaaatttctaactaaaaaaagtaagaactggaaagcacgctgtagatttagttacttttatcatccctagattggtttgccaatcataataccagtcatgtataatcattaaagtggaccatgacacatgaaccaaaagagacgaagaggtgcttacttctaacgcattagttcctttgtccatcaagtctaacttggtaagaacaccaaatgtcctctcacctgagacgatcaaaaacttatttcatcatctaaagacagtacttcctgccatatatatatatcaatcataggtaacaaaatagtaaacgaacctgttggatcgacatcttttgcgagcttaattgcatctgatgtggcaatgtcttggttggcaggagatatagccaatatgatacaattgggctgcaaacaaacagaaattaagctattggtactactaaaaaagttaaccatctgcaactagaacttgagcatatagtttaaaagtcgtataaggtttttgcatttttaaaaaaaaatgaaagatctagcaattctcaccttatcaacatatgtgcgaaccatggattcgatatcctcagcaatggtttccggctgtccctctggaaatcagaggcagtatcaataactacatatacggtcatcaaataataaagaaatggaaacccaaagaagaggtcaaaagaaacataccaacagccactttagttaaaccgggcaaatcaatgagtgtcaaattcacaactgtttccataaaaaagagcaaacatcaatgttaaatcaacaaacaagaatgttacaggaatcagactgagattattaaagataccatttggagagtagatactgaggtgaataggaactggagatatctgtttgtttttccctgtgattctatcagtctcatcctgaatctccctgcgaaccaaagctgaaacatcgaagaattttcaagcaaaaattcaatgaacactttcaactaaaacacacttgaagcagaacaaacatacattgatatacataacatagatagacataaatgttaaggtacataccaaaatctgtgaattgcttcttgggaagatgaaggaactctgcatactcctctgttccatcatcagtcttatgaagctgcaacactaaaggccgtctcgtaacgatacctgcacaaacaatacttcttcctcaaaaccaaagctcctccttgctttatatacaaacataagagaaaagggaaaattttcacaaaccagatcctctaggaagaaaatctctcccaactatactctcaagaaccgaagatttcccagaactctgcacaaacccaaaaaaaaagtaagttgaagagtcaccagagagaaaacctaggaagaagtcaaagatatttcaaccggagaaatcacctgaccaccgacgacggcgacggttggaagagcttcccagagagaattgaaagcgttacttccagttccaccaccatagtcaccgagtacggtacatgctctctgtatcctattaactaacccaatcaaactctccatagtcgtcatcttccttctccttcagtttcagatgagagaatataaagttccaaagacgaaattttcagttcagaattagaaagctgcttgaaaattcgccaacagaccaaagacttcaagagctgagagagagagacgaagaagaaaaatattcgtaggggcaaaataggaaaatgaatttagagaataaatgtctctctttgatttctagaaggtttgatttgtgtgcctgtggctgtgtggttcggtcggtttacagatagcttagccgccgttaaggagtcgtctggctctggttcgttttggttcggtacggtctggttcttacttttctagacggtcaaatctaaaataatgaagataagatttgtgtccctttaatttgagatatttgtaacctgtttgaattttcgaattttgaaattccacatggacccctcacacaaatacaaaataataagtctagaaacaacaatcaacattgtttagaaggcccaatagatatagaagacttttaaaaggacccaataataaagttaggtccaggaagagggtaggaggctatatgtatacaagcggttctctagtttttatgggttttgtgttatccagtctgaattattttagattttattttagaaatcacaaacataaaataatatttctagaaaattttgaatttcttagtacttggtaaataatgaatcattcttcacaataaacatagacataaacacaaaaacaatgagtttctctcaacatcatgatttagttatcaaccaaaccaaactaaatgactgaaataaccaaactaacataacatattcaaactaagaagaagcaaaaactaagtataggttgtcgttatttattacatcattgattatcacatgacaggcccaatagacaaggagactttaggaaggctttaaaagcccaataatgaagttaaggcctattgatgaaatatgaaaaccacgtggcaatatgtagaagaaacggacgaacattcgtgtgagatatgtggaaaacgacgatggctcgtcttcacctaatacttgtcggcttttaccatccaacgtcacatgcttctcttttaggttttttatttatttatacagttatatcattgtttcaagtcagtggctgaggtaatcactacacatcccattcaaatccaatggtattggtccgtatattgaattaaagaaaggtcaaccataactagattttatcttctacaactatgaaactataatggcgcgttagatcaattttttgtaagttggcaaaattacgaaccaaaaattgcaattgaatcactaaccatcgcataattaaattttgcattaaagaaatggttagtgataaaatgatctgtcaaaatgttgtgcttacaaatctccattagataaataaattagtttctctctctcatctatctttttttttggttttccgacatagaatgctatctctctctctctaagcctatctcaaaacagagatcttaggagaagaagacaaaatctttaccaccagatcttttcttcttccttcatctttacaggttgtcacatcactataaccaccgaaactctcggcccaacccaaaaaaaaaaaagcttcctttcgaaaaaaatcaaagctttttcttttatcttcaattctcctccgatgaggtgtaaaagacacaccgtcgatctcagcagcagcaacggcgtttgcgcttcttgcctccgtgaacgtctcctctctctcgccgcttccgccgccgtatcagccgccgtagaagataatcaatcaaagaaatctaataacaataatcatcctccgcttttgattttccctcgctctgtttctccttacgttacccgtagaaaatccgacgccggagccggtggaggagatcctttagtttcttctaatcggagattcattaccacgccacagatagatctcgtcggatattcatgcaaagatttcgaatcgaatcgatcaaataaatcaaaacaaggtaaaaaagtatctagattctcgaatctattcagagctagatctgaagatttcgataccaatcccaaatccaacaatcctagattctcctcatgcgacgcgtctgagatttcatcttcttcttcctcttcacgttcatggatctcgacgattctctccaccggtcgacgtaaaaagcaaccaaccaccgcgtgttacatcgaagacgttatcgctgcgcgtagacctcaacgtatatactgtagaggaatgtcacctgtaagagatacggaaccggagcagtcggcggaatcaatcgaggaattgaggagaactccggcgacgaaaactccgggaaggaggaagattgcgatggggatagggaagagcatgtcggggatggctttttgtttgagtccgttggtgagagctagtcctaactgtccgtttaaacggaaaatgagatttccatcggagtttggtaattctggggaggtaacggcggtgccggaaaagcctcatatatcagcagcggcgtcgttttgtgcaaatagatcgaagaagcttgtggatttaggtagagttgatcgccgccgttgagtttttttattttggtgggattagtctttggtcaacgtgtttgactattggatagtaaactacggctttctgaagatggattttgccaaaatcaagctttttatatggcttgtggtgaataatctctatgggaaatagctcaaacaatacttttgttataaaaaattgtaatgttttctgattgtaattgtagagtttgaatggccaaatatattgttcttaggagattaagagaaataatgtagtgtgttcttgtttttttacttatgagaattacttaccgattattaggacaagaaatcaagataaaaccggatcgattgattggtagaaccgtggaacctgatcaaaccggatctaaattccaaaaaaattggacaaaatcagtatgggttcgtatagcggtaagatcctatatgaaccgtgccaataataccgaatcaggttagtcaatctatatgtgctgaagtattaattcaaatgtattatgtcatatagtcaaagactcaaatgtcattacactaagcattacggttttgagtagtagtagtagtaatgcgggtgcttagattttgaaatttgacccatgaatttctggctataaataataagagtgcgacagttttgacttattttttgtcatcaccttggaaaagtttatcttgggtttcacagtccttcttctctagtccacttcaacacatagacctacaaagctatattggaatcgcttatgacacaagtatcaaaatatcttttatcgacttttaataaaaatccaagtacgacatagagtgctttcaattcaactttataaaagttgtctaataactcgaaagagtttaaatgaagagggtccacggggttcatctccatgggtccgtgaatctcctttacgctctggtaaaataattcgtttttaagaaatcaagtaaagatcaaatccttgaaaaaattgaatgggatcggtcttgttcaccagctaagctatgaacataaggcttatgagaaatttgcaaataaaacgatttctgtttgagagaacattgttgactttaacaatttcggtttccgatcaatctccactttgagctctttcatgaaactcaaacaacagaacatatgctgctgtcactgaaattacaagaaaaccagaaactctttggtagatgatatcattgaatgcacaacttcgatgctacttttcactggacgatagctaacaagtcgctttctttgcaaaagcaatgcttagcatcttctgttccaaaatcaacctgaagaaatcaaaagagatgtctcagtttcacaagtatgatcaaagtcatcaagtatggtctcaatgttccatcataatcatcaaatacaaacctcataggcgctcatatcagagaacaaaacctgcaaaagatacaagagcatgaacaaatgaatgaagaaggagattatacagttacttcatcgtgtttttagttaaaagatgaaacataccttcttgccaggttccacttccccaacctcagacccaacagagacaacctgaaatcctcaactccatatcaattgttccttctaagtcttaataacatccaattaaagagcaaaggacagacgagagagccttacctcgcctgttaggtacctctcgaatttcacagctgatttaggcaacagtactcctcctgaggatttctgcacaagcacaaaagcattgtcacaactcacaatcaacattagaactcacaactagtattgtaacaacatgatacattgaccaagactcatgattcgtctacagaaaccgcagcgccacgagcagagaaactaaactttgtaatcttaagtgttctaaattgtttccctttttgtgtgtgtttcttttctcttctaacaaaacagaaacgatctcaagacttcagtgaataagggaaactaactacatttcaacagcaacattgttggaaaagaaagctaaggaatcaccggaaaatggcaaatatactctagtcgtcgtgagggggatcgattgaaaatgtaaaaagaagaaagctaagagacagaacctcaggaagcacttcaaggcggacaaggaccctgtctgcttgtggtacaacctgcaaaacccattgcaacaaataaaaatgaaatgatctcctgattaaaacaaaatcaccaccaaaaataaaaggagacgaagaaaaaaaaaactaaaaggtcgtacctttgccggttcccatttggtggaaacggcgttaattctaaaggaatttcttcgaattcctatagaaatccgtaaacaagaaaggaatcaatgatggggaagacacagacaaaagagaagctaatccagaaaacaaagaaacatggattaagatttgtaccgagaagggtctgctgaggtagagtaggagcattggttttgatggggaaggacaagaagggtttaggtactgtaatgaaactcgaagccattggataaggttaggttcctactcggtgagtagtcacgacacggcgagctattaggttggggaagttgaggagattcgctcgtgcttgctgtgttgttggacaaacctttcttctacagacttctcttgatgcttccttccttgtgtgctttgtttgatttagtttgggcctaactatgttggcccgaatacttttgcttctcatctttgaaagctagttctcttaatacggttttgaagaaaatattttaaaattttaacacttagaaaaaaacaaaattgttgaaaaaaataaaatagaagttttaaaacatttttaaataaaaacaatttggatgttgtgtacaattagtttagacaaaaatttagaatttaacacttcaaaaaaacctttaaactttaatagtgataaaaaaaaaaaagtttaaaaacaaatgttaaaaattaaaattatgtgtaaaccataaaaaaaggtacttccttacttccatctggtccaatctctcttcctttgataatctttctccttgcaagaggtcaaaggatccagctttggaattggacatgtaatcctatacagctcgctcaactctcagtgcagaacaacatgaaagaagaagaagcaagctttgtcttctttgaagcctctactatctctggaattctccaagcaagctt

SEQ ID NO: 1373 - DNA, 88548 bp, Arabidopsis thaliana
gaattctttctacagaaatcatcttgttttctgcattgcatatattccatatcactgtggcttgtagaacattcagacttaagccatatgtgaccccaagaccagcaatacctgtaaggaaaagtgaaaatgaagtttaatttctgatcccattagacaatgtattttatggtttatgatgtatgagacttacttggattgatgacaccttcagggagagtcacaagtaacaccaaagaaaaagcaaagacgaaatgagacagcaaattcaacctgaaggaaagccactccattgctgatgcaacatggaaccatggccttgaatggctatctattagaacaaggtttgagctaatgaagcgatctcgttgatcaaaagcacgtattgttgttgcaccagcaagcgattcagcgaaatggtggagaattggagctctttctactcctgacatgcgtgacagttctcttgctgttggtgtgtaatatctctaaagacaacacgagtaaacaaaaaagtaagcaagatttgttgtatcattgtcaagaaattggatttgttttctctcttgcctggtaaaacacgcaggctactgctactggaatgaagatgacacaaacttgccaagcaacttgcgacatgacgaagatggttccaacaatctgaatgatcgaaaaagcacaccaacctagtttgactgccatttccaaatccaggacactttgatctgtggatgcctattacaaaacatgaaaaaaccaaaggtattttcagtcttgattataaaaaacaaaaccatgtttttttgttggattgattctggtacttcaccctgttcaagattcttcctgttggagttgaatcgaaaaatgacattggagctctgaaaatgctgcagagcatccttgagaagaacgtctctgctgttgaaagtccacctatggcgactagaatagtccgtgctaaaacacaaagtgaacttcctgcagcaagaagtgcataaacaagtaaaatccgacccattcctaactttggtatggattcagcagttggaggagcagtccatgccatccagtaattgctagcaatctgtagcatttggaagcaagactgagccaatattatgaatggcacaagcaatccgcctttcaccgttgttaaatatgccaagtaaacttctttgccaattactcctttctctgtttcttcatcttgcactagctttgcttctttctttttattctctgttgaaatgttatgctctgagtcacaatgtgtctggagactctctgcaattgatgctgtgtcatcttttgatccctctttgaagtttctgcttgacttttcaattgatagaattgagtccagcgcttcgttatgagctcctacaagaacttcaaaacctatgttttgctttagaagctcttcaaacttgcctgcttgcatcactcttccgttttgcatcacctagtatacaaagtacacacactaatgttaatggaaaaactaacagcctcttttgcatttgcttattatcaacggctgtttctcttaccaggattagatctgctgctggaagaaactcaacttgatgtgtgacgtaaagtacagttttgtctttcagtatccccattaagcaatcctgcaaaacaagtaaaaacaaaacatagtcaagtgtggagtttaaagagagaaaggatcaaacgaacaaattgtcatgaacattattatacttcaaagagttctcttcctgtatgagcatcaacggcgctaaaaggatcatcaagtagatatatatcagcattctgataaaccgctcgagcaatctgtatcctttgcttctgacctccactcatgtttatccctctctctccaatctctgtcaagtctccattcgagaaaagctcaaagtcctttatcaaagcacatgctttaacagttctctcatacttctcactttcatacatacttccaaacaaaatgttatctcttatagtcccgcttagtatccatggtgattgtggaacataagcttgtttaccactgactctgactgttcccttcagcttctgaatctcccctaggattgaagagagtaagcttgattttcctgatcctacagctccacaaaccgccactttcattccgctttttactttcagttcgatgtcatcaagagtcggtctgcttgactcaggttcccaactaaatgctccattttctatttcaacacttaattctgtatgatcctttgagcaatactcaactgcatctttctgagtctcactttgttgaaggtaagaagctattctatctgcagaaaccttgctctgaacaagtgctgagaggagatcaggtaaaccgaaaatcggactttgtaacatttgaaacgttgcaagagcagataagactgctccagctgttagcttcactcccattaacatacaagtaacaaaagtcaccacagagatcaatgaaggagctccccaaaggataaaagttgtgaaagcttgtaacctcaaagacttccataaacaatcatactctttctttcttaatgttttaaccttgttgagaaactggttatcccatgcttgaagcttcagaatcttcatgtttttaagaatctctgaagttgctttcattctatcatctttggcattcatgatatctgattggtagtttctctgaagccttgtcagggggtagttgcaagccatcaccattaaagttgtgaccaatgcagctaaagctccaagtcccagatgtttttgcaagatataaatcgccgagaaaatctgtattggtaacatccatatgttgtttacataccaaatgaagtcagtgattctctgaacatctacactcatgtagttgatgatctctccgctcgtgtggctttgccgagattgacttgataaaactaaacctttctggtagatatgtgatatcaaagctgctcgaagacgtagtcctagctgacgagctccaaagatccattgtctttgagtaactgtctcgacgattttcgcagttagaaacccgagtgcaagaaggtaaccatggtttaagctctgggattgtttctcacttagaaactctacaaagtcattgatgagatatggtccgatgtaagctgtgctcgcgtttacaactgcgaataccgcgttgattgcggctttcctccacacatagcgaagaaccgagttatagaagaaagcatttccaggtccttctttttctttggtggttttcagtttctggtcaaaggcatgagagcaaaatcgagcggagtctttcacatcgatatctggtacatcatctttttctagaggtctcttgtatccaagggagaacaaagggttgatccatgagaaagtgatgcgttggaagagagtagcgtttccatatggggaagaagaagaataagaatctttcttgttctgctctgtttggtcaccaagtagtaatggctctgtgttaccgctggattcaagaagatgaaaaccggttttgcctctgattgaaacagccaacaggaacaaggatgcaagaagaccagtcaagtcggcataatcttgaaactcgagaggctcgtgtttcgcggtaatgaaatgagcatcaaaggaaaaggataagatgaaactacagagccaccatgaccttaacatccaaggaaacttgacaagcctcctttctctgatcttcaccacaacaacagaaacaaacaaccacgagaaagactgcgaaacctcagcggagaagacagaaacagaggaatcacaccgtgagaccacgctgtctcgaaacagcaaaagcaagataaagcaatgagtccctaagatagaaacagagcagagaagagatatgttgtaagagaagctctgcttcacagttatgctctgcttcttcaagtcttcttctacatcattagatcctctgtttcttactacaccaaaccatttaagtgccaaatgaataagaaagaaagcgaggaaagtcacttgcatagcgatgcttatacgttccttcaagcaaagtgagtttcctagttgcaaccattgcgtcgtcaggagatgagaaccagtttctgctgctcatatcaaagcaaacacaatcaggtaaaacgaaaaaaaatatcattttttcgagtgaaagagtaacaactttacctgcgaaaccaaagggcttgaacatagcttctttcttgggttgagaagacacgtgtcttcgtaccgagagtctaagtgagaagcactagagatgattggagacgatgaagtttctgttttgttttcagatggagttgcaggagccggagagagtgtgagacaagttttgagtttatagagaaaagtgatgccagctacaaaacaaaacaaaaaccctattgaatatatgattgataagtttggggacattggagaaaaacaaattgaattctcttaaatatacgttaggccgaccaaaaatttaatttagaaatacgtatatatatctaaaaggaatgtctttcttagaattactttcttgttttgaagtatttaaacttttcaaaattaattttgtataatctgaaagtaaaaagaattatcaacaagacaacaacatgcatgatatatagtgagtgagtgacgatattcgcactaatacttaatttttaataattacgtactatgtattatcataacgaacgaacgagcataagaatattaatttaaacctgtgaaattgttttgagacaaatatatttgggatctagttagaaaatggagaaaatcacatgatgatgagctcaggtccaaatttattgaaacatgaagcaataaaagagacttgcagaagttaggacctgaataataatgatgacttgcagagtcactggtcactcttattattgatagtaataaacgtggacaatgtcaatgtaattactgttaatgatgtggtccttgaaaaacattaatattggaacgccgaaagctcttgatttccctgccttatgcaaaggaatgcaatgcaagtcgtatgttctttcacttcgtgattaaaaccttagatgatccggcttttcattaatagttaaatagtttatgtctagactaacttgatttttatggaaatgtgactaccgtacgtaatcgattaatcgctgactcggatttatttgtttagtaactcgttactcacggaagtaaaaacacacacacagtaattacaaatataacaagctcacgtgtaaataaccgtattgacgaagagtatatacgaaataatcaaaaataataaaatcgttgaactaaatacatatgtttcttcgtagaactttgattagacttggtagtactgagagttctgttgtttagcgtaattaaggatgaacgtgtgaggttcgtagaaaacgacttccttatatgaaagttaggctcgacacttttggaaaagagtgaatgggagagattccaatccgatttgattctattgtatcctgtccttttccactgaattgtagttggctgggaccatatatactcgactgcgatattattacatcgtatcttcgagtactgtataaaccaataaatagtatctgacaaagttgatctggccgtatggtctcaaatcatcatcaaagtcagtaagtcaccataaaacccagttagggttcgaactcctttgagaaagttgaaaggaaaagtggtacagaaccaccaaactagctagatgacccgaaagacaaaaacctatagtaatagtattgtttcttctacttattacgtgattagttctctttttttcattgattttttgttgttatagttctacttgccctaatttttccttgaattgctaatttcaatgccgacaaaaaaaaaaactgtagtatttttttaggtttgatcaaagtgataatattccaatagtcacggtctagtaattaaagcaaagttaattccttaataaaatagtttgactttctaagaatcgttcttttcttttctttttgtgctttaagggtcgttattccacaagataattaaattaaagtataagaatatacgtgtacggtgtgccacaacatcaaagtgaagaagcacgttgaaaattaaggtcgaaacaaaactgtagtatatgattatttaagtcgatgtcctttttttgcttttgtttttgtcttcttataacgagaaacagaggacaaaagggtatgggattatataagtcgatgtcttttggcccataattgagtcgagatgttgctgaccttaataaaaagggtatgggattattcatttcatctaagtaagtaccaacatagattttcttaataaaagcatctttaatctttattagtattaattattatacagaaaatcaatgtattttaccatattttgaatctaaatagatacatatttcttcacaatatccgaagaaaaaaactagactaaataactcaaaggatgagtggatgactaaaaaaccaagccggttcacagagtttagtcatcatcttaaaataaatatctgatatatatatgtgttaaattgacaaacaaaaatattataaaaagttgtatgaattatgtcttgtcatgtacgcatgtgttagtgatttccacgtgagtttcttggctgtttcggtcctttttcttcatatgtttagctgcgtcatcaacttgccttttcttaactttggaaaaatgcaaaaaaatagtacattagaaaaagaccccacctcaattcaaatgctaaagtctgtgaattgtcaacgttcattgcacagattacttatcctatgaatttaagaatatagtacatctgaatacactgtaatcttaaatgcatatatttagtagtctatgcatttaatgtggatagcagataaacatagggatcacacacactgattgttacgttacgtataagatcttgggcctgcctttgtataagtgaacaagtcagatatcacatgaaggcccattaactttagggagaattaagaaacagagagaattcgaagctagagagctacgcgtcgagattctttcttgctgaataaatcaatcacacccgccggaaaaaacagtaagagcataggacttgccggcggtaacggaggaatctgagctctacacaacggacacttggacatttcactgagccatgtatctatgttggtgtttgaaaaagtctttggttgttagtcgttggtttgcttctggagtcaattatgtccgagtcttatggaggagtctaagtagtggagttgtggaattgagtcagttcgtgtagtggagtcatggagtctgttcctattttttagttgttctgttgtttctttcgagtctttgtaaggctatttaaagccatcttttctcgttaatgaagtatcacttttagtcaaacaattcacatttggtatcagagcttgcaaacaagaaacaacctgtgtgagagagtgatcgagagagaaagataaaagagagagagaaaagtgagaaaaagagagatgtcgtcatctgagaaatttgtgcagccagctatcccgagatttgatggctattacgatttctggtcaatgacaatggagaattttctccgtagcagagaactgtggagattggtggaggaaggaattccggcaattgtcgttggaacaacaccggtcagtgaagcgcaaagaagcgcagtggaagaggctaagctaaaagacttgaaggtcaagaattttttgtttcaggctatcgatagagagattctggaaacaattcttgacaagagcacctctaaggcgatctgggaatcgatgaagaaaaagtatcaaggttctacgaaggtgaagagggcacagctacaagcattaagaaaggagtttgaattgctggccatgaaagaaggagagaagatcgatacttttctgggaagaactttgacggtggtgaacaagatgaaaaccaatggtgaggtgatggaacaaagcacaattgtaagcaaaatactcagatccttgactccaaaatttaactacgtggtttgttcgattgaggaatcaaacgatctgagtacattgagtattgatgagctccatgggagtctacttgttcacgagcagaggctgaatgggcatgtacaagaagagcaggcgttaaaggtgactcacgaggaaagaccaagtcaaggaaggggtcgtggagtgttccgaggaagtcgtggtagaggaagaggaagaggaagaagtggtactaatcgtgccattgtggagtgctacaagtgtcataatttggggcattttcagtatgagtgcccagaatgggaaaagaatgcaaattatgcggagttagaagaagaagaggaactgttattgatggcgtatgtggagcagaatcaggcaaacagagatgaagtatggttccttgattcagggtgcagcaaccacatgactgggagtaaggagtggttttcagagttagaagaagggttcaaccgtactgtgaagcttggaaatgatacgagaatgtctgtggtggggaaagggagtgtgaaagttaaagttaatggtgttactcaagtcatacctgaagtttattatgttccagagcttaggaacaacttgttgagtcttggacagctacaagagaggggcttagcaattctaattcgtgatggaacttgcaaggtgtatcatccgagtaaaggtgcgattatggaaaccaacatgagtggtaatcggatgttctttcttctagcttccaaaccgcagaagaattctttatgcttacaaacagaagaggtgatggataaggagaaccacttgtggcattgccggtttggacatctgaatcaagaaggattaaagcttctcgcacacaaaaagatggtcattggactgcctatactgaaagctaccaaggagatttgtgctatttgtttgaccggaaaacagcatagagagtcaatgtcgaagaaaacttcatggaaatcatcgacacagcttcaattggtgcattcagacatatgtgggcctatcacaccaatttcacacagtggcaagaggtacattttaagcttcatcgatgattttactcggaaaacatgggtctattttcttcatgaaaagtctgaagcgtttgccacattcaagatcttcaaagctagtgtagaaaaggagattggtgcgtttctaacttgcttaaggacagatcgaggtggagagtttacttcgaatgaatttggagaattttgtcgatctcatggcatctctaggcagttgacagcagcgtttacaccacaacaaaacggagtggccgagagaaagaataggacgattatgaacgcagttcgatctatgctaagcgagaggcaagttcccaaaatgttttggtctgaagcgaccaaatggagtgtgcacattcagaaccggtctcccacggcggcagtagaaggaatgacacccgaagaggcttggagcggtagaaaaccagtggtagagtattttcgcgtgtttgggtgcataggatatgtgcacataccagatcagaaaaggagtaagttggatgataaaagcaagaaatgtgtttttttgggagttagtgaggagtcaaaagcatggaggctttatgatccagtgatgaagaaaattgtgataagtaaagatgtagtcttcgatgaagacaaaagttgggactgggatcaagctgatgtagaagcaaaggaagtaacattggagtgcggagatgaagatgatgagaaaaattcagaggtagttgagccaatagctgtggcatctccaaatcatgtgggtagcgacaacaatgtgtcatcgtcaccaatcttagctccgtcgagtcctgctccgagtcctgttgctgcaaaagtaacacgagaaaggagaccaccgggttggatggctgactatgaaactggagaaggagaagagattgaagaaaatttatctgtcatgttgttaatgatgatgacggaagctgatcccattcagtttgatgatgcagtgaaagataaaatctggagagaagcaatggagcatgagatcgaatcaattgtgaagaataacacatgggagctaaccacattgcctaaaggttttacaccaattggcgtaaaatgggtgtataaaaccaagctgaatgaagatggagaagtcgataaatacaaggcgaggttagtagctaaaggatatgcacagtgttatggtatagactacaccgaagtgttcgctccagtcgcaaggcttgatacagttcgcaccattcttgccatctcatctcaattcaattgggagatctttcaattagatgtcaagagtgcctttttacatggcgagctcaaggaggaagtgtacgtaagacaaccggaaggattcataagggaaggagaggaagaaaaagtttataagctaaggaaggcattgtacgggctgaagcaggcaccacgagcttggtacagccggattgaggcttatttcttgaaagaagagtttgaaaggtgtcctagtgagcatacgctttttacaaagacaagagtaggtaatattttaattgtcagcttatacgttgatgatttaatatttactggaagtgataaagctatgtgtgatgagtttaagaaatcaatgatgctggaatttgaaatgtcggatttgggaaagatgaagcatttccttgggatagaagtgaaacagagtgatggtgggatttttatttgtcaaagaagatacgctcgggaggttttagcaaggtttggaatggatgagagcaatgctgtgaaaaatccaattgttccgggaacaaagcttacgaaggatgaaaatggcgagaaagttgatgaaaccatgttcaagcagttggttggaagtctcatgtatttaacagtgacaaggcctgacttaatgtatggagtatgtttgataagtcgattcatgtctaatccaaggatgtcacattggctcgctgcaaaaaggatcttaaggtatctaaaaggtacggttgagcttggtatattttacaggagaagaaagaataggagcctgaagcttatggcatttacggacagtgactatgccggagacttgaatgatcggaggagcacgtcgggtttcgtttttttgatggcgtccggagcgatctgctgggcttcaaaaaaacaaccggtggtggctctttctacgaccgaggccgaatacatagctgcagcattctgtgcgtgtcaatgtgtttggcttagaaaagtgttagagaagcttggagcagaagaaaaatctgcaactgtgattaactgtgacaacagctcaaccattcaattgtcaaagcatccagttcttcatgggaaaagtaagcacattgaggtgagatttcattatctcagagacttggtgaatggtgacgttgttaagctggagtattgcccaacagaggatcaagttgcagatatctttacaaaacccttaaagctggaacagtttgagaagctgcgtgcattgcttggaatggttaatatgtctgaagtaagctgaattcaggagaattagcttaagggagggtatgttggtgtttgaaaaagtctttggttgttagtcgttggtttgcttctggagtcaattatgtccgagtcttatggaggagtctaagtagtggagttgtggaattgagtcagttcgtgtagtggagtcatggagtctgttcctattttttagttgttctgttgtttctttcgagtctttgtaaggctatttaaagccatcttttctcgttaatgaagtatcacttttagtcaaacaattcacaatctatgcaatccgcgtggaaacagtgacggcaaatcgttaatcgcctcatcttctctccttcctccgcctcttgtagacacacggcgcagaaaggcggagacgaatcatcgtttgccgccgctctccaccggcggaacgtaaaagtgcggtggcgataccatggacttatgatgatcaaagtggcgaatcttacagagaagacagcaacggaggtaaccaaaatagaaacggttatatattcgcaaaatctatacacagattgagtcaacatcctccaacaaaaagtattaacaagtgattgaagaaagaacgagagactcttcttgtggcgtgtgtgtgtaagaaacctacgtagacgcgtgatcatataactacaagtcttttgtgaatgaattgatgaggttattttcgtggactaggagtctgttgaaccaaggattcacacaatagatttgtttagagagggaaaacaaatctagtaatttctcttcattaggtattctatccaagactcgattacaaaacatgttctaatctcttatgaaatacattagggttttgctcaagaacagaaaaagagttagggttttaaaaaggtatagctgcatccatgatggattgcctacgtaccctgtgaagggatcaagccattcgtagttctcaataggtataaagttatgtgtttcttctccgtatccaaagatctcccttttgtgaagtccctgaggcactttatataggatccttaaaccgcccccctagcgatatttttcggaagattcttatttatccttaggtcggttctagaggataatcgtcctaaggatattctccttattcttcggaggttttggggagatttcctgatttcaacattatcttcaaagattctcctttatcatttccgaaagtcccataaaagatcccattttaccggaaatgatccttggagaatgaatggtttttacaagtctttgcctcgcgtgttcttcacggctcggtggtcgtttgagaggtggcttcggggcaaacggtatgtaccggctcggggcgcgcttgatgactccattaagctcagttggctgtctcccgagccgatatagatgtttcccgcagcgttctcacgattggctcgggctgtgttcatatgattaacacccgagccattttacaaactctcttcgggacggtcgatcgaataaggtcccgaggtgctttgttctaggctaggggccattcatatgtttaaccatgaggtgattgttattcttagactgtttggctcggtcttgcttgtgggggaatccgaccccaacagttagccccccagctcgttggttaagagttaatgcgacgagcttcatgaatggtgtgaccgagccagctgcttccgcatctatactgactgatccgtatcttttgagagtaaggcttgttttttcttggtgctacgagattctgttcttgacgagtgttgctatctcgaactcaaaatgttagctgttgacaagttgtgagctaggaaagctgctaggagacttgttgaagaactccaagctgttgacgagctgttaggcgggcaatagctaggacggctgccgacgagctgttagctgggcgaactacgagtcagagaaactgcagacggactgagctaggaaaagtgcagactaggtgctagctagacgaactgcgagctaggaaagctacagacgatcagggagctaagaaagctgcagacgagctgttagctaggcgaagtgcagacgagctgctagctaggaaagctacagacgaactgggagctagaaaggctgcagacgagctgtcagctaggcgaagtgcagacgagctgctagctagacgaacttcgagctaggaaagctacagacgaactgaggtggttggctcgggtacaaattgcctgagtcaaagttgggttcagtatacttcgttccgagctgatcgtctcggtaccaggttcttcgggataactggatttctaagcacagaccaaagcagataagaaactgtatttagccgaagcaaaacctcggcaccagtgtttatgataactgggtttcagtttccgaggcggttgactcggtaccagtgtgtttagagtaactggatttcagtagatttgaatacccacggttgcgacccgatttgattcaatcttttaccagcgtttagaaacgagctggggcaccggtgttaagtataaccgggtttcagaagatagaattcatagtctgctcggaaaaacattcgagcagattcttatcttgaatatttatatagcgcgctgtaaccgaagcggtgtaaatgaaactttcaaaataataggccgtcgcccgttaaaatatttcaaaataaaaagatttagaaatcaaattccaagaaaatttgaagtagaaaaatcgaagttcaaatttaaaccgaaacgagagtttaaaattgaagtgggagtatggatatacggaccccacacccccccctttttgctcggtagacgagtgtttttgcaagtttacgcaaaaaatatagcagagaatgcatatatatgattaagctgtacttgttagattataatagataacacttatcttattggtttggacatagagatgatgatatctacggcatggacgatctgaatctctgagattgtaaacgtcgttgtatgaaaatctacatttaagatgttgttcgttagaggagatctcatctttgcgtagaaagagagaagcaaggatgaatgcttgtgatataagtgagaatgtcaatcaagcttaattaatatgtaagaaagtaattgaacttatcttttatgagggaggtcgtcgagacagaattggagatcgcatcattgatgaatgagtggaaaccttgagcgattgctagtgatgatccattgtcacttgttggtgtaatgtatttccttttgctgatttatagaagaactgataacttccgtttgaaccgttaaactattgatcccaccgttgaatctttagctgatagtcccacgaagattttgtccgaattttagtcagatcagatattgcctgaggcttctaccgtcttatgaagttgctgtgacaaagtgaatatttcttcctttgctatatttgttttttggtttcggttgctctggtagcaacatacgatcctcagtgaatataggaggcagtatccagtgatgcttactctttggctgacttctggtgatctttctttacttctctttcctttgaattttcattacacgacatgtttttgtgagatctgaacaacgttttgtgattaagataaagcagaagctctccaaggcgaggaagggacaatttttcttagatatatgttaagacgagccgattgtagatgaaagacgagcttgaggccggaagacgatcttgatgtccgagtaagaatagagtttattcgtcttatagctgaaccttgtaaaaggttgcctacgtacccttagaaagggatcaagccacacgtagttcatatcgtgataaacaagctaggccattactggaggaaggtcgtatggtaggtgacgagccggcagatgtgcgacgagctggatgaaccgtggtagaggcgaattggacaaaccgagttctgctgaaggtttagactagctggcgacgagataggtggactatgcagccaatggacgaactgccgctaggcgaggaggtagatgagttttgcagtcgagggatgagttgatagctagacgagttggacgagctgaatagctgacagctaggcgaggagatggtcgttgagtatgggaagagcttgaagacgagctgaggagcttggagacgatctgatgaacttgagtacgagctaaggagcttgaagagcttaaaggcgagctgaatagctaagacgagctacttgagaagggcgagctacttgagaaggatgagctgacgagcttcgtgagacggacgagatgacgagctttgtgagacgggcgagctgacattgtgtctctgcgtgtcaggcggcattccccccttttgacatgacacgatattctgagtcttctgagtcgctctagatcactgggaaattgagcttgagttcggctggtcggatagagacgaatctcggatcgaggcgaggtcgatggtaactccttaatagacatctcggatcgaggcgaggtcggcttctttagaaagctgactcggggcgatctgtagataggtatatcattgcctagttcatcaggattttcaaggaaaacgattccgaagctgactggttttatagagctgggtcctatgactggctgcacttgcttgaggtaaacgtttatatctctcagcatatatcttcgattaaggcgaggtcaacttctctgaaaggaagattctctgggcgatccgtagatgtattaaaccttacgagattccttgtgatttgtcgggaaatcggccccgtggtgagctggattattcagacggattcgttaagaaacagacagcatcgacttcagaaaaacggtgataactctgagcagaggtatccgatggagttacggttagattccctggaacgctgatctccggggcaatccgtggaatggttgtacgtcatctggttcattgtatcttgacgggaaatccccccgctagtagacggatctgattgtcttggcttgatgagcgtacatcgaatacttggatgaatgttatgcgaagagagttctttgtcgttccccacagacggcgccaattgttgaaccaaggattcacacaatagatttgtttagagagggaaaacaaatctagtaatttctcttcattaggtattctatccaagactcgattacaaaacatgttctaatctcttatgaaatacattagggttttgctcaagaacagaaaaagagttagggttttaaaaaggtatagctgcatccatgatggattgcctacgtaccctgtgaagggatcaagccattcgtagttctcaataggtataaagttatgtgtttcttctccgtatccaaagatctcccttttgtgaagtccctgaggcactttatataggatccttaaaccgcccccctagcgatatttttcggaagattcttatttatctttaggtcggttctagaggataatcgtcctaaggatattctccttattcttcggaggttttggggagatttcctgatttcaacattatcttcaaagattctcctttatcatttccgaaagtcccataaaagatcccattttaccggaaatgatccttggagaatgaatggtttttacaagtctttgcctcgcgtgttcttcacggctcggtggtcgtttgagaggtggcttcggggcaaacggtatgtaccggctcggggcgcgcttgatgactccattaagctcagttggctgtctcccgagccgatatagatgtttcccgcagcgttctcacgattggctcgggctgtgttcatatgactaacacccgagccattttacaaactctcttcgggacggtcgatcgaataaggtcccgaggtgctttgttctaggctaggggccattcatatgtttaaccatgaggtgattgttattcttagactatttggctcggtcttgcttgtgggggaatccgaccccaacagagtcttgattaaataagtcaagctaaacaagtttttagctaaaaatatggttattgcgacgaaagtttggctatatcgtatgatgagaacatgtaaaatgtagagataattacatatacaaataaagcatgaatctgtaaacttagttacgtatacgacaaggcacatcattgactttggagtctctgttttgttctgttcggtgaatccaagtccttgatgctacaaagacaaagaccaaacaataatgcattacatatctacaaggactagagagaaaactgtatgtttggatgatcacgagcatcaccttgtcaagtttcagatgcaaatagaactctgacagcctcgaaaacctcttcgctggattttgcagcattgatctggagaaaatcagaaacaagaatcaaaatcaggaacagcgtatgatagtaatgatcaaggaagagaagtggagaaccaaatcctaacctttcgaagtttccctttcgattcgtagtagctaataattgggagggtagattcaacaaacactttaaatcgcttctttatggtctctatattatcgtcttctcttcccttcataaccaagaaacgacactagtaaaagaggtaccggaccttaactagacaatattttccaagtaaaaataccaacctggttcctgctcataatgcgtctttctagttcttcttctggacaatcaaagaatagaacaaaagcaggctcgattctagcctgtcaagatccagacagtattaaaccaaggaaggttaacgagacaagtagaacttgattttagactataataggaatcaacgagaagacaattgacaatgtgttcaagagaaggaacatgacccttacaacattttcgaatacgtttcgattttcttcattgcgagggaagccatcaataaggaacttatcattaccactttcctccatagctttacacaaaagtttcactgtgatctcagacggcactattctcccctctgcaatcatactttggatcatggctctgaaacaattccacagaaaaagaaactgaaaacttcaccaagtgtttggttttcattaccaaaaaaccatatcataagattagaacaagattcactttacacaacaattagttagagacatgagactcactgaagcatgtacttacccaaattcagaaccggacttaatttctgctctgagaagatcaccagcactaaaatgggtatagctaaagtgcttcacaacattagcacactgagtaccttttccacttccaggaccacctatagaatcaatcaaaccactcaacaccacaaaaattaaccttcaagcatatgattacatagagtggagttattattacccaacacaaaaactacagttgatttcttccacctagggcattcatgttcgtcctgtaaccaaataatatcctcgagaatttagaaaaaaataccagatttttattagttacaatgataatgaaattggatagacaggtgaatacaacaccttattcggagcatcgataggagtttccatgatcaaggcgatgtgacgatgaatcacgcacaagtttgacaagtccaggcgaagaagattcaggtgaagaagatagagaaattaaggaagaaaaacggcgtgtagtctgctaacggttgcaacgtgcatgttttaaacggcacgcggttctctaaagtgaagcgagacggaaagtacacgctatggcgtttttaaatagtaatgataagtttattacaaaacgtctcaagtctctctcaatagggtctgatgatcatatacatacatacaaagacatagtcaacgaacttaaacaacagacgaatttatagttctctaaaaccatcaccagaaacacacttttaggttttatcatcttacccaagcaacagcatcaatctcatctcttgctttcttgtataactctagcctcttcgcgcactctagtctccggtccatcaatgccggatcttcatctagtaactgtcccaactgtttcccctgtgaaattttccgaccaactataagatttgatgcgcataccacataatatgaaatatttgagacattctattttagcttcagtttacctctctcttgctgatctgagagtagaagtaattgagcaatgcgagcttggcttgtctaacctgacagtacacacaagcttttggaatggtgttacgaagtgtgtccgaaaccatattaacatacgcagatacatttgatgctatccttctgaaatgtccgtctccatactggtctaatgttgcagacgaaggagaagcggtttggtttttgctgttggttactggtctttctatttcttgaggaagtttccggaagaactcagcggttagatacgcagattccatgtcaacaagtcgaataaccgacttcttgctttcttccctgaatttctccaaggagctgttggctgctgcagcaagctcgacttgcagtgaagggaaacgctttagctcctgcattttgccaccagggaagggagatccagtcaaacccgtgtagtacattctaccagtataagaaaaatcaatagtgaacttacctcagtttctgatattgatttcctcacaagctctttcaagacatagtgaacctgttgcatttgcgccattctcattacggtcttgtatttataaaagtgaagtgaggagacactgtagaagaacttacagcatccacagaagcttcagctggacctctaaagtaacccagtgccccttcgattagacggcgataaccctgttctggtgcaatcaagtgaggttgataaccatctgcctcggacacgattttcttcacgctttgtagagaaagatggcgatcaaaaggaagctttttaagtgcagctggaagttggttgtcaaagactccatagatacggtcacctccaggacgcctaaaatgtaaaaagaggttaaccaaaaatcaacaacctaagcaaaaaaaattccacaggaagattagcaaagatgtttacccgccatcaagatgttccttgaatatcttatcgaatgcacggcacatctccaatatagtgtatagttgagcctgagaatgagaccaacagatttagcacatatcaaaaaacgtaaaactttatggaagagaaatagtttcacataattgtactctctcaccccagcatcaactgcgacaggccgacccattcggtctaactctctttcaagttcttcaatgcttttgtttattaaggatagtatacttggaatacgggtcctgataacagactccaagtgctgcataaaaaaacaaagaccataaatcaaatgaataacaatgaataaacaatccgataaagtctcaagtatttcagcctttgattgaataccttagagagcagctttgccagatattctgaacccattttgctggctaagtgaccatagtcaggactggtatcaaaatattctcgttccttgcgtcttgcaagcatcatatcgacattcttattaatatctgcttgtgaacggttcactatcccaacccaaggatgttgcagcctgtaagatcttccttcaagaaccttattaaggcaagcagttctgaatgttagatcaaaatttctaactaaaaaaagtaagaactggaaagcacgctgtagatttagttacttttatcatccctagattggtttgccaatcataataccagtcatgtataatcattaaagtggaccatgacacatgaaccaaaagagacgaagaggtgcttacttctaacgcattagttcctttgtccatcaagtctaacttggtaagaacaccaaatgtcctctcacctgagacgatcaaaaacttatttcatcatctaaagacagtacttcctgccatatatatatatcaatcataggtaacaaaatagtaaacgaacctgttggatcgacatcttttgcgagcttaattgcatctgatgtggcaatgtcttggttggcaggagatatagccaatatgatacaattgggctgcaaacaaacagaaattaagctattggtactactaaaaaagttaaccatctgcaactagaacttgagcatatagtttaaaagtcgtataaggtttttgcatttttaaaaaaaaatgaaagatctagcaattctcaccttatcaacatatgtgcgaaccatggattcgatatcctcagcaatggtttccggctgtccctctggaaatcagaggcagtatcaataactacatatacggtcatcaaataataaagaaatggaaacccaaagaagaggtcaaaagaaacataccaacagccactttagttaaaccgggcaaatcaatgagtgtcaaattcacaactgtttccataaaaaagagcaaacatcaatgttaaatcaacaaacaagaatgttacaggaatcagactgagattattaaagataccatttggagagtagatactgaggtgaataggaactggagatatctgtttgtttttccctgtgattctatcagtctcatcctgaatctccctgcgaaccaaagctgaaacatcgaagaattttcaagcaaaaattcaatgaacactttcaactaaaacacacttgaagcagaacaaacatacattgatatacataacatagatagacataaatgttaaggtacataccaaaatctgtgaattgcttcttgggaagatgaaggaactctgcatactcctctgttccatcatcagtcttatgaagctgcaacactaaaggccgtctcgtaacgatacctgcacaaacaatacttcttcctcaaaaccaaagctcctccttgctttatatacaaacataagagaaaagggaaaattttcacaaaccagatcctctaggaagaaaatctctcccaactatactctcaagaaccgaagatttcccagaactctgcacaaacccaaaaaaaaagtaagttgaagagtcaccagagagaaaacctaggaagaagtcaaagatatttcaaccggagaaatcacctgaccaccgacgacggcgacggttggaagagcttcccagagagaattgaaagcgttacttccagttccaccaccatagtcaccgagtacggtacatgctctctgtatcctattaactaacccaatcaaactctccatagtcgtcatcttccttctccttcagtttcagatgagagaatataaagttccaaagacgaaattttcagttcagaattagaaagctgcttgaaaattcgccaacagaccaaagacttcaagagctgagagagagagacgaagaagaaaaatattcgtaggggcaaaataggaaaatgaatttagagaataaatgtctctctttgatttctagaaggtttgatttgtgtgcctgtggctgtgtggttcggtcggtttacagatagcttagccgccgttaaggagtcgtctggctctggttcgttttggttcggtacggtctggttcttacttttctagacggtcaaatctaaaataatgaagataagatttgtgtccctttaatttgagatatttgtaacctgtttgaattttcgaattttgaaattccacatggacccctcacacaaatacaaaataataagtctagaaacaacaatcaacattgtttagaaggcccaatagatatagaagacttttaaaaggacccaataataaagttaggtccaggaagagggtaggaggctatatgtatacaagcggttctctagtttttatgggttttgtgttatccagtctgaattattttagattttattttagaaatcacaaacataaaataatatttctagaaaattttgaatttcttagtacttggtaaataatgaatcattcttcacaataaacatagacataaacacaaaaacaatgagtttctctcaacatcatgatttagttatcaaccaaaccaaactaaatgactgaaataaccaaactaacataacatattcaaactaagaagaagcaaaaactaagtataggttgtcgttatttattacatcattgattatcacatgacaggcccaatagacaaggagactttaggaaggctttaaaagcccaataatgaagttaaggcctattgatgaaatatgaaaaccacgtggcaatatgtagaagaaacggacgaacattcgtgtgagatatgtggaaaacgacgatggctcgtcttcacctaatacttgtcggcttttaccatccaacgtcacatgcttctcttttaggttttttatttatttatacagttatatcattgtttcaagtcagtggctgaggtaatcactacacatcccattcaaatccaatggtattggtccgtatattgaattaaagaaaggtcaaccataactagattttatcttctacaactatgaaactataatggcgcgttagatcaattttttgtaagttggcaaaattacgaaccaaaaattgcaattgaatcactaaccatcgcataattaaattttgcattaaagaaatggttagtgataaaatgatctgtcaaaatgttgtgcttacaaatctccattagataaataaattagtttctctctctcatctatctttttttttggttttccgacatagaatgctatctctctctctctaagcctatctcaaaacagagatcttaggagaagaagacaaaatctttaccaccagatcttttcttcttccttcatctttacaggttgtcacatcactataaccaccgaaactctcggcccaacccaaaaaaaaaaaagcttcctttcgaaaaaaatcaaagctttttcttttatcttcaattctcctccgatgaggtgtaaaagacacaccgtcgatctcagcagcagcaacggcgtttgcgcttcttgcctccgtgaacgtctcctctctctcgccgcttccgccgccgtatcagccgccgtagaagataatcaatcaaagaaatctaataacaataatcatcctccgcttttgattttccctcgctctgtttctccttacgttacccgtagaaaatccgacgccggagccggtggaggagatcctttagtttcttctaatcggagattcattaccacgccacagatagatctcgtcggatattcatgcaaagatttcgaatcgaatcgatcaaataaatcaaaacaaggtaaaaaagtatctagattctcgaatctattcagagctagatctgaagatttcgataccaatcccaaatccaacaatcctagattctcctcatgcgacgcgtctgagatttcatcttcttcttcctcttcacgttcatggatctcgacgattctctccaccggtcgacgtaaaaagcaaccaaccaccgcgtgttacatcgaagacgttatcgctgcgcgtagacctcaacgtatatactgtagaggaatgtcacctgtaagagatacggaaccggagcagtcggcggaatcaatcgaggaattgaggagaactccggcgacgaaaactccgggaaggaggaagattgcgatggggatagggaagagcatgtcggggatggctttttgtttgagtccgttggtgagagctagtcctaactgtccgtttaaacggaaaatgagatttccatcggagtttggtaattctggggaggtaacggcggtgccggaaaagcctcatatatcagcagcggcgtcgttttgtgcaaatagatcgaagaagcttgtggatttaggtagagttgatcgccgccgttgagtttttttattttggtgggattagtctttggtcaacgtgtttgactattggatagtaaactacggctttctgaagatggattttgccaaaatcaagctttttatatggcttgtggtgaataatctctatgggaaatagctcaaacaatacttttgttataaaaaattgtaatgttttctgattgtaattgtagagtttgaatggccaaatatattgttcttaggagattaagagaaataatgtagtgtgttcttgtttttttacttatgagaattacttaccgattattaggacaagaaatcaagataaaaccggatcgattgattggtagaaccgtggaacctgatcaaaccggatctaaattccaaaaaaattggacaaaatcagtatgggttcgtatagcggtaagatcctatatgaaccgtgccaataataccgaatcaggttagtcaatctatatgtgctgaagtattaattcaaatgtattatgtcatatagtcaaagactcaaatgtcattacactaagcattacggttttgagtagtagtagtagtaatgcgggtgcttagattttgaaatttgacccatgaatttctggctataaataataagagtgcgacagttttgacttattttttgtcatcaccttggaaaagtttatcttgggtttcacagtccttcttctctagtccacttcaacacatagacctacaaagctatattggaatcgcttatgacacaagtatcaaaatatcttttatcgacttttaataaaaatccaagtacgacatagagtgctttcaattcaactttataaaagttgtctaataactcgaaagagtttaaatgaagagggtccacggggttcatctccatgggtccgtgaatctcctttacgctctggtaaaataattcgtttttaagaaatcaagtaaagatcaaatccttgaaaaaattgaatgggatcggtcttgttcaccagctaagctatgaacataaggcttatgagaaatttgcaaataaaacgatttctgtttgagagaacattgttgactttaacaatttcggtttccgatcaatctccactttgagctctttcatgaaactcaaacaacagaacatatgctgctgtcactgaaattacaagaaaaccagaaactctttggtagatgatatcattgaatgcacaacttcgatgctacttttcactggacgatagctaacaagtcgctttctttgcaaaagcaatgcttagcatcttctgttccaaaatcaacctgaagaaatcaaaagagatgtctcagtttcacaagtatgatcaaagtcatcaagtatggtctcaatgttccatcataatcatcaaatacaaacctcataggcgctcatatcagagaacaaaacctgcaaaagatacaagagcatgaacaaatgaatgaagaaggagattatacagttacttcatcgtgtttttagttaaaagatgaaacataccttcttgccaggttccacttccccaacctcagacccaacagagacaacctgaaatcctcaactccatatcaattgttccttctaagtcttaataacatccaattaaagagcaaaggacagacgagagagccttacctcgcctgttaggtacctctcgaatttcacagctgatttaggcaacagtactcctcctgaggatttctgcacaagcacaaaagcattgtcacaactcacaatcaacattagaactcacaactagtattgtaacaacatgatacattgaccaagactcatgattcgtctacagaaaccgcagcgccacgagcagagaaactaaactttgtaatcttaagtgttctaaattgtttccctttttgtgtgtgtttcttttctcttctaacaaaacagaaacgatctcaagacttcagtgaataagggaaactaactacatttcaacagcaacattgttggaaaagaaagctaaggaatcaccggaaaatggcaaatatactctagtcgtcgtgagggggatcgattgaaaatgtaaaaagaagaaagctaagagacagaacctcaggaagcacttcaaggcggacaaggaccctgtctgcttgtggtacaacctgcaaaacccattgcaacaaataaaaatgaaatgatctcctgattaaaacaaaatcaccaccaaaaataaaaggagacgaagaaaaaaaaaactaaaaggtcgtacctttgccggttcccatttggtggaaacggcgttaattctaaaggaatttcttcgaattcctatagaaatccgtaaacaagaaaggaatcaatgatggggaagacacagacaaaagagaagctaatccagaaaacaaagaaacatggattaagatttgtaccgagaagggtctgctgaggtagagtaggagcattggttttgatggggaaggacaagaagggtttaggtactgtaatgaaactcgaagccattggataaggttaggttcctactcggtgagtagtcacgacacggcgagctattaggttggggaagttgaggagattcgctcgtgcttgctgtgttgttggacaaacctttcttctacagacttctcttgatgcttccttccttgtgtgctttgtttgatttagtttgggcctaactatgttggcccgaatacttttgcttctcatctttgaaagctagttctcttaatacggttttgaagaaaatattttaaaattttaacacttagaaaaaaacaaaattgttgaaaaaaataaaatagaagttttaaaacatttttaaataaaaacaatttggatgttgtgtacaattagtttagacaaaaatttagaatttaacacttcaaaaaaacctttaaactttaatagtgataaaaaaaaaaaagtttaaaaacaaatgttaaaaattaaaattatgtgtaaaccataaaaaaaggtacttccttacttccatctggtccaatctctcttcctttgataatctttctccttgcaagaggtcaaaggatccagctttggaattggacatgtaatcctatacagctcgctcaactctcagtgcagaacaacatgaaagaagaagaagcaagctttgtcttctttgaagcctctactatctctggaattctccaagcaagcttttaaattgtgttccattactttgtgggttgttgcaggcaatgttggctcttccaaaagtagaaccggtttatggagcagatactgacaacttgattcatacagcagacattggcatcaggggctaccattcctagttgatgtttcgagagagaagcggcatggttatgatcacaacaagaaagcaggagccacgaatgttttggttataaccaacgcaatcatgtctaatggcccagtcatcctcaattttgattgtgaccactacatctacaactctgtttgtggcaatagaatctgctatgttccgttgaagatgcctattaaaacttattggcttattcaatgaatcaactcaagagtttccacaaatccataagtgaaaaaacgaaggttaaatgactcatcagcttcttttttcttgggttggctatacagtaatatttttcttgttatatatgttcccatttgtagtgaagatcatatctggaacattgacttaaacaggagtttggtcttctcagttcagcacaagcacaatattctacatggtacacatctacgcctttaaaggttgcaaacgtagtccttaatccttcccctgcattttccttaaaacgtagtcctaaacgtagttcagaactgcacattgcaatgctgttgaacaaaagaaataccttaaaatttaactcattgaccaatgcaggcaggcagccatgcctaaatctggagcagaactaatataaccaccgggtaatgtcaaacttgcagcgaaggtcacagttgctattagtgttgcagacaagaagggtttaggtactgtaatgaaagtcgaagcattggataacgttagcttcctactctgtgagtcacgacacggcaagctattattaggttgggaagttgaggagattcgctcgttcttgctgtgtttgtgtgttttgttattggaccaaacacttcttctacagacttctcttgttgcttctttaaaaagtttatgtgctttgttcgatttagtttgggctaactatgttggcccaaaaacttttgcttctcatctttgaaaaccagttctcttaaatacggtttggtttttttttgtttttgtgtgtgttataaacctaatagttttcttttcttcctgatattcaataagaaagttatccaaatgaaaattcgctatcaatgttgaatcacactggacataataaaagagaaaatagaccatttaaaagtaataatatataactagagaattcatctgttatatcgtcagaaaaagaaaaaaaaaatcggtaattgaagcaaagaacttcaaatagtgtttatatgtacaaaccaaaagtaatgctctgtttttttttccaagtgaatgaacaaatgtcaccaactcacctgtcactcacacccctgagagccaccggaaaagctcacttatctcttctccggcatgattcgcttctaaatccatcaccgtcaattcctcactccgacgactactcccagtaaaaaatctaccagagcttctaaacgacattgcacgcgacgatatacctcgtgagagtctgtcaacgtaatccttgagccagcttctagaaccatcgttacctatatccgccgctaaactagcttcaaacgacgtcggattagtcgtaaccgccgttgctgtggcagttgttgtagtcgcgtcttcctgttttccacggttgaaatttgactctgagatttctgaatctacgtcgtctactatgtaatcgaacgaaccgattgagtaagttcgatgctgctcaacggattctggaatcggtgtttgacgacgacggctgatggatccgatttcgagacggaagctgttttctcctccgccgttgtttgagccgacgacggcgagagacttcatgagatcagattctgaagcgaagagaggagagcgacagagaggacaagtctggttagagactagccagatatcgatacaatcggcgtgaaaagcgtgacaacagagaggaagaagacggagctgatcctccggttcgaatttcgacaaacaaacggcgcaatctccggaattcatggagctagatcggcgagtgacggaggagaatttgaaaatcggaagcgaatcaagcacggaggaccgttctgtttcgggagagactcgatgtccagagaatcgtcgggaatcggaagttacggttgcgacggaagaggaagatgaaagagggagaacggagcggtggctacagcgattgagacagcggaggaggaagcaaatggaaacggagatgagaagagtcatgaggagaatgagaatgatgactagtacgcttggtttgagactatcgagagaagaagagtgagaatcgtagtttcctccgccatggctgggattgatgagagattccattgatgagaggagagagctcgcacagagagaaacagagagagaagaagaagaagaagaaagttataaattccccaactgttttatattaatgacggaggagaagagaggcacgtgagagtgagagaggtcacgtgagggtcatggaccggtcttattactctactctgccttataaagaagggggacgttgggaaagaggcagagaaataaatgtcatcgaaccaactcaaactgtctatatttaattctataaagttatatcaaatcaattggcttttcactttgctttcaattttgtccactatcttcttaaggtatttttgcattttgttaaggtcataaattgaggagagttgtgacatgtatttatgtaaaacattttcacaccaaagtcatagtttcattttcaaatatgtaaacaaaattgtagaaaacaatacaaataaagttttatttggaggtgttggaatcatttcttgagtccttgctctttatgcttaccttgttgagtctaaaaacagatcgataccatttttgacattttccccaattcttatgattattattgtttttcaactttatgttgcttttttgatatatgagtgatgctatcattattttcacactgtctttttctgatatccattagtagtttttttttttttttgctgccaagtgttacaaaatccgatgttttttttatttatgcaatagaatccggaaaagtttgtctccttgcgtgaacgaattcaggcgtcaagaaagcaaaccggtttaaatggagaaaagtacgaacattttaacaagataactataagctgttagaatgataatcaacctgataaagaacatgtaagtaaataattatatctctaagaattaattggattcgtatatcagagatcaaatggaaataatgtacaatggtcaagaagtgactgaggagtaagattctctatatacttagaacatcattattagtggtatattagtcaaattcttaagctaagatttatgaaaaaagggctcttagataaaagtttttacttttatattttcgtaaatgcgatgacattcgaaatatatatatatgttcttacaagtaaaaagattaattaaagcaactaatacgtttataggttaaactccaaacaaatacgtacagctgccaagaaatgtttacacaagaatattattatttttcgtaaatttgttaggaaagacgataacagtgctgcaataaacatagcttgtttgtttttgtttgaatagaatgtttataaacattctatattatccagaaccttataataattcatatatggtcaaaagaaacgaaactatatagtagtattataagaattccacaagttagttggcttagaattaatacgactccgcaggggacatgtgaacacagctcttatattaattagggatatgcaaaatcagaatgacacttgtaatattaagtccatcacgtaatgcaatatagatgcagagagacacgtgactactcattattggatatttttgttttttttggatattatctgtatttttgcgtaaaataaggttgcggttgcacgttcgtagcatgcctcttactccatttaggtcttagtttggactttggagttttcacggtttctgttttattttatttcatatatatcaaaaagcattatggattatacaatacgaagatatcacgctctccagaaactatgccaccaaatacgtaaaatgcatgtagatacaacctgtaactgcaagtataataattattattttggtttaagctgtaagtataattatagttatatctgatcattagtgattaaaagaacttaaatccctaaactaaaacaatcatctctcgatgttgagctaatcatatacaaatcgaagccaaaacattttcccattttttgtggttaatcttaattactcctttttttctttttctttttagtgctgttgaatttagagagcatgctataaattcagatatcaattcaaaagaaatttcggttagagaaagaaataaaatttatgtaacgaggaaatgaaagaaacatggtgtgctcttgtgtctgtacccttggaaggacaacaaagtcataaaaacagacaacctactttattcatccaaccatgaatattttccacgtcactcatttatttcctttccaaatcaattttgtacacttgattttgtcctactttacttgtattgcactctaagcatgttcttctttttctaatctacaactaaaaaaaaaaataactgattttcttcctctcagaatagtctatatctcttagattgctagctcaaagtcaaatgatccctaaaaaattaaagccgcttaaagtgtaaagacagatcgaacaaattgtgagccaagatgattaaagggtaagctcaaagaatgaaaacagattcactgtaagatcttgggatcattctgaacttgtatacaattcacaatcgcttttaaaaaagaaagtatcaatcaacataaaagaacttccatattaaggtacttataatataggaaagtgagatttaaagatactaatcttgtagctattgaggattaaaacaagtgacgttaatcaaaagacagccatagccaaaacagagcattgtctctgcaaagtagtattttcttcaactttgatgcttcttcaataaataccgacaattttcctgtgcattttggcactgtcacaaagtccctaacaagatacgacccctgatagaaaccatgctttgtaaaggtaagacttcttgcctcttatcttatcctcctgaaaaatgtaaaataagatcgacattcacgagatgagatacataataaacaaacacaaaaaccttaaaattaggcaatttcatcttccattccatataatattcacatgtcttagattgccaaaaacaaggcttattggtgataaccaatgtatacatgaaaaaggagagggtacttggaataggaagcacagtttcagaaccagaattgaaaggtcaaagaaaaaggctttgtggtgaccagaatgtacatatgtggatactcgcagtatgaaccgttagtttccaaacccacccacatttacttctttttttctatagagtatcaaaataaacttagaggagtccttaaacttaatctccaagttcaggttttttttcttattttcctgagcttagctaatcacatcacaaattcagcaaatgaggtagatgaaataagagctgagagtgtaaaatataccttaaaccccgtcaaggtgccttgtcaaattccaaggttttgcaaaattgcaaattctgaatttgtactttatgtcttaaatgggctgaagactgacgcccatctctatttgggccgccaacataatgaaatataaatatgtattagaaaaaacaggctttactcttctgtcaaaaaatttaattgcatgcaagacgcgagtctcgactctggcggctttccgttgctgcaaggctgccacgtatcatagtctatgaccttagctggcgcacgagggaatataaccggtcgtgcttgtgccacacgcatagtttgattgtgcgatcggggaagcgaaggtagctgttatgggcccttaagggacaactgaattggagaattgggccttggttttacgtacaggtacaggtacttcttcgttgcttgcgatccaaacaactaaacgaatcggtcatcagaatcaattttctgatctgatttctgaaaatctggagacagctatataaacaaagaacttaccattgggtacaacttttttttcttcgaataaagctttagatatttattttcttatcgatatcttgctccaatatatgcagaggggacatggcattctgtagccaagagtgtaggcaagaacagattgagtctgatgaaacataatccaagaggtggagaaaaacgtcgatttccagatcataatctctccggaaatcgcctgattcgaaatattccgtcgccatcaaaactgtacggacgaagactcttgtcatggcttagtagtttctaaattggatgtggcggttaataaacaaagagagagagacagagaacagagaagccaattgttggttgtgaagtttttgttttctctacctatatttttgattatggtcttttaccacgagaaaatggataaactctgtttgtgtttcttgattcggtttcatgagaagaaaacaatgaaaaatattctgttcttttacaattcaaatggggttcttcttaaatacttgagcccaatatcgccctttgtggcccatttaccaaatcccaaacattgacccgtttgtcgaacgtcccctcggacaacaaatgtccagttcatttgtctgtagctggtgacttaaattagtgacaatcatcggcgagtagcaaccacaattttcagtcgctaaactttttagcgatcagtcgctgaatcaatcgataagtaaacgaataatttaacgatcataaatataaattactaatgattaaaataaaataaaataaattatttaaattaaacttaattaaataaatctgaattaaattcaaataaatcttataaaattaagttaaaataaaataaaatataataaaattaaatgaaatcttatttaattaaatgaaaataattcaaataaatcaaaataagtatagtcaaattaaatttgaaaaaaattaaagtaaataaatgtattaattttcttttgatggtgtataatatatataatttacatttttagtttaaattataaattatcataaaaaataatttaaaatttaaaaaatatagcgatttagagcgacagtcaaacgaacaatacaacaattactagcgacagttgttgttgcaattagttgctgaatccaacgacaaccaaacgaagaatacatattgtcgttggtcgaggatcgttgtcgctggattcaactacatacaaacgaacatgacctaatatttacgagagacatggaaatgtgttgttcaacttctctttttaataggtacaataattaagtaattcagttaatacttcccctccaaaaagtaaaccacctaattgatcacataagagatcacctaactttctactactaagagcaagctttattatatacacaatgaatctagtaattctctcataactaaatacaaaaatcacctaacttttgacaatataatgcgtatatgttcagttcaaaatgtatgattcgacgtatcaacttaaaattgaaatcacacattgtaagtcttttttttttataaaccttataccaatatatttgacaatttttaaaatttttgttactcgtgatgtgatgtctataaatcagtgaagactattttcacactttacattcaataaacaacaaagttttttttgtatccatatttcatgtactaagtctccacaaattatagccaaattcacacgtgttaatattttatcaatgaagttaatttaaatttacatttatttggtttttagtgcggaaaattcagctttttgttattgttttgtcaacgcattatgttttatctcttcaaatgatagtaaaaaataatattttaattaaaattaaaattaaaaatttggcttaaaaaagtttgttgagttttttggggtgaccacctgaaacctctctttgcacattgaccggaaaaaaagttttttgattgagtaacgagataaacttaatgagttgtcgaatttacccctaagacatagcgtaatttactaatcaagtactttaaccagactctttcactaatacaaaatctctatattttttttttctttctttaatttccaatttattttttgattacacatagtttctcttcattcatctctttctctccccgtcttttcttgttcctataatcatgtccgtccaataaaaccctaattttatctttccttgcgtcgtttcactccattacagagttgtagaatttagcttgccaaaaagtgtgaagattagggtttgttctagatgtcctacaatcaatccagacccgacagaagcgagactcaatatcgtagaactggtcgatccaccggtaaccaacaacaacaacaacaacaccgatcttcttccgccgccggttacggtaagggcgccggcgctcctggttctgcgcctgccccttccacttatcctgataattcttccttgtcttccaatcgcaggttttcatttcaaattcgacttttttttttttggatgattctctgagccattattggacatgattaattatgcaaagtttgatcctttattgttatttatgacagttttaagaagcccggcaatgctcaaggaggagggcagcctcgggtgaatctgccacctgtgaatcatcctaataatcacaacaatggtcccaatgctcactctcgctctcaaggtatgatcgttattcacggagtgccgcaaagtctttaaatttgtataatttcagattaatttggtcagtgtgtgagtgatcgtttggtttagttcaatctatcttacactgttagttacaggagaaccgggtgttggtggaccaaccaatccaactgaatcgttcaacagaaacaccggacctattccaaaggctccaacttctcagtctaccgtcatgagttccaagatcaatgagacgcccaacacagctaaaggtaggtttttgttgcatcgtctatttttttgtatgcatactgagctttgaagttgaactaaattcctctgtaattccataaaggtataagttttataatgtttattttgttttgtttagtggcagcctctggagacgcttctcaggcatttcctctccagtttgggtcacttggtcctgatttgatggtaatgctgttgttccttcctttgtttgtttgatttttccatcaacacctgaataatcttccctgttggttttctaggttcctgctcgaactacctcagcacctccgaatatggatgaccagaaacgtgcccaggtggaacaccttttagtattatgcatctgccgttactgtgattgttgcctacataaataattctttcttataggatgatgaatagtctgtgtctcgaactttgcttctgacttttaaatgctctatcatttgtcttgtattgcgatttgctggcctgattgcttgatctttaactcaaattggtttaaagaatatatactgaaacttaagatgtcttttattcactttgttctgaacttgacctttcgtttatgacacgagcaaacattgttttgcagatgcagcaatcttctttaagaacggcgtcaaatgtgccagcttctgtacccaaaaaagattcatcaaataagggtgcagataatcaattgatgaggaaagaggggcacaatccatcgagtgaaaaagctgatatccaagtcccacatatagcccctccaagtcaaacgcagaagtctccaattacaaatattcgcatgccttctgtgcagacaccatatcagcatactcaggtccctcaccctgtacattttggtgggccgaatatgcatatgcagactcccgtgactgcaacctcgtttcagatgccaatgccaatggcattatctatgggaaatactcctcaaatcccgccgcaggtgttttatcagggacatccaccacatccgatgcatcatcagggtatgatgcatcaggctcagggacatggttttgcaactccaatgggtgctcagattcatcctcagttaggccatgtgggtgtgggtttgagccctcagtatccccagcagcaaggtggaaaatatggtggggcacgcaagaccacccctgtaaagattacacatcctgacacacacgaagagctgaggcttgatcgacgtggtgacccgtattcagaaggcgattcaacggctttaaaaccacattctaacccacctcccagatcacagccagtctcatcatttgctccaagaccagtcaatttggtgcaaccctcatataactccaataccatgatatatcccccggtttcggtaccgttaaataatggtccaatgtcatccgctcaggcaccgagatatcattacccagttattgatgggtctcagagagtacaacttatcaaccaacctgctcatactgctccacagcttatcagacccgctgctcctgcacatctttcctctgattcgacttcctctgtgaaagcacgcaatgcccaaaatgtaatgtcatctgctctacctgtaaatgcgaaggtatcagtgaagccagctggggtttctgaaaagcttggatcaccaaaagacaggtcacatggagaagttaacatttctctgtcacaaaagaacgtggaggcatgttcgttgagctcttcccagcagccgaaacctagctttgtctctggagtaccaaattcgtctgctccgccagcaaagtcgcctgtggagactgttccgctagcaaagtcgtctgtggagactgttccgccagtaaagtcgtctgtggagactgctccagttacaacgactgaaatcagaagagcggaaatggtgagtgagtcgatctcagttgaagatcagacatgtaaggtggaaccccctcataatctgactgaggtatgatactgtgttttgtttttgggtattattcattaattctttttcttatttgattaaattattttctttttttggctggttcactcagaatcgtggacagactatgccagactctctggtctctgatcctgaaacagcaaccgttgctgccaaggaaaatttatcactcccagctaccaacgggtttaggaagcaactcctgaaggtgtctactacatctgatgctccaacttctgactcagtagatacaagtattgacaaatctacggaaggttcaagccatgcctcatcggagatttctggttcttcaccgcaagagaaagacctaaaatgtgataaccggactgcttctgacaagctcgatgaaaggtctgtaatttctgatgcaaaacacgaaacactgtcaggtgtgcttgagaaggcacagaatgaggtagatggtgccacagatgtctgtcctgtctctgaaaaactagctgttacagatgatacgagctctgaccttccacattctactcatgttctgtcttctactgttcctcttggacattcggaaacacataaatctgctgttgaaacaaacacgagaagaaatacttctacaaaaggaaagaagaagataaaagaaatccttcaaaaagcagatgctgcagggacaacttctgatctctatatggcttacaaagggcctgaggaaaagaaagagagctcaaatgttgttcatgatgtttcgaaccagaacctgttacctgccatacctcaggctgttgaagccattgtggatactgaaccagtgaaaaatgaaccagaagactgggaagatgcagccgatgtttctacaccaaagctggaaactgcagataattctgtgaatgcaaagagaggttcctcagatgaggtcagcgacaactgcatcaatacagaaaagaagtactcccgggatttcctcctaaagtttgcagacctgtgtactgctcttcctgagggatttgacgtttcgcctgatattgctaatgccttgattgttgcatatatgggtgcatcacatcatgaacatgattcatatcctactcctggaaaggttatggatcgccaagcaagtggtgctcgtttagatcgccgtcccagcaacgtggctggtgatgatagatggacgaagaatcagggttctcttccagcaggatatgggggtaacgtaggtttccgacctggtcaaggaggaaactcgggagttttaagaaaccctcgtatgcagggaccaattatatctagaccgatgcaacctgtgggtcctatgggaggaatgggtagaaatacccccgacttagaaaggtggcaacgtggttcaaatttccaacaaaaaggactttttccttctccgcacactcctatgcaagtgatgcacaaagccgagagaaaataccaagtggggacaattgcagatgaagaacaagcaaaacaaaggcagttaaagagcatcctgaacaagttgaccccacaaaactttgagaaactgtttgagcaagttaaaagtgtcaacattgacaacgctgttacactttctggtgtcatttcacagatatttgacaaagccttgatggagccaacattctgtgagatgtatgcagatttctgttttcatctctctggggcgttacctgattttaatgagaatggtgaaaagattaccttcaaaagattgcttctcaataaatgtcaggaagaattcgagaggggggagaaagaagaggaggaagccagtagagttgccgaagaaggtcaagtagaacaaaccgaggaggaaagggaagagaaaagacttcaggtgcgaaggagaatgcttggtaacatcagacttattggtgagttatacaagaaaaggatgttgactgagaaaatcatgcacgcatgcatccagaagttgctcgggtataatcaagatccacatgaagagaatattgaagctctgtgtaaactaatgagtacgataggagttatgatcgatcacaacaaagctaagttccagatggatggatattttgagaaaatgaaaatgctatcatgcaaacaagaattgtcttctagggtgaggttcatgttgatcaatgccatcgatctgagaaagaacaaatggcaggagagaatgaaggtcgaagggccgaaaaaaattgaggaagtgcacagagatgctgcacaagaacgccaaactcaagcgaataggctttcacgtggaccctcaatgaattcgtcaggaagaagggggcatatggagtttagtagtcctaggggaggaggaggaatgctatcacctccagctgcccaaatgggtagttaccatggaccacctcaaggtcgtggctttagtaatcaggacattcgatttgatgacaggccatcttatgagcctaggatggttccaatgccgcaaaggtcagtatgtgaggagcctattaccttgggtccgcaaggtggtcttggtcagggaatgtctattagaaggcctgcagtagcatcaaacacttatcagtctgatgctactcaggccggtggtggagattctaggcgaccggccggtggtttgaatggttttggctcacatagacctgcaagtcctgttactcacggacggtcaagtcctcaagagcggggaacagcttatgttcatagggaatttgcaagtctgtcgcgtgcttctgatctgtcaccagaagtttcgtccgctaggcaagtactacaagggccatcagctacagtaaacagtcctcgagaaaatgctttgtctgaagaacagttagagaatctgtcattgtccgcaattaaggaatattacaggtactatatctctcctttcttgctggtcatttgtttcattcttcgcaaagtcatcagatactgccacatttaggaaattattctgtgggaacctgtgtaggtataattggatcaaattacagttcattcgtttacagttagagcgtttgtttacaacgacagatcatctgataaagtgtatatttcttgaagtatgtaaattagaatttgctccaaacaaaacggcttaaaaatacatatgagagactttgttctttgactttaatagaatctctaatacaggggtaaactctgttttttttactgactgtgcgttttatgtatgatgttagtttctattcgtttaccctctttattattgataagcactctggtgcgttccaatgtgttcttgtgcagtgcccgagatgagaatgagattggtatgtgcatgaaagatatgaattcaccagcttaccacccaacaatgatttctctctgggtaactgattcgtttgagagaaaagacaaagaaagggatctcttagcaaagctccttgtgaacctcgtgaaatctgctgacaacgccttaaacgaagtccagctagtgaaagggtaagtaaacaaagcccataaatcttgaagccctagtctaatcaaacgtctgttgcttaaatcttttactgctttttttttcacaggtttgaatcggttttgaaaaccctggaggatgcagtaaatgatgctccaaaagcagcagagtttcttggtagaatatttgggaaaagtgtgacagagaaagtagtgacattgacagagattggtcggttaatccaggaaggaggagaagaaccaggaagtctgatagagtttggattaggcggcgatgttcttgggagtgttttggagatgataaaaacagaagctggagaagaaacgttggttgagattcgccggagctcaggtctgaggattgaaaatttcaaacctcatgcacctaaccggtctaagatattagagaaatttacttaggaaaaaaaaatggaaccatcttttgggttcctttcttcttctctttttttgtttctctcttaaaagtcttttctcttttcaagtgcttcaaacaaaactaatttgttataaagggagtttctctattttattatatagcaaaaaacttccaaaatttctcatttctgtgtttaaccttttcgtacatcagttttaaagcacagagagctcaatgttcttccaatatcgttattaataaattttgattaaattcaatcaaatcggagttatattaccacatgaggttaaagggccatattaaaaagtctgcacttcatatgagcaacaaggcttttatgtctttatggttgatttgatggcccatatatgatagttcaaaggcccatattaaaaaatgccctaacatgattcgattcgtatataaagacgcttaatgtgacaagcgaacttgctcattagggtttctcatctacgacggcgtggtgttcctccttcctgctctgaaaaatggtgaaaaacctaatcctttctttttgttattgttcttgaatctctgtaattccatagcaagttattcgagtatacttccttctgtctcgttctagctttcgttttgagatttcaagtttcatagttgatctgtggattctgatagaagtctagttttgtgattttgtcttttgactctattactctttttcgatgtttcacaggcgaagagaacgaagaaggttggaatcgtcggcaaatacggtaatgttcctgactcatctcttattgaatcgcttaggatgttaatgctatcgaaaataaggataggatctgcaaatttgcttagtcttgtagctcattttaatggagtatattaacatgtatcgttcatttttgattacatgttgtcaatatgtaatggatctgtctacactggtttcatattgcaattcgttcttcattttggggtctaagttggttattatatgtattgtgagttctcttcctaacgtatgtatggttatgtgattcaggaacacgttatggtgcgagtatcaggaagcagattaagaagatggaggtcagccagcacagcaagtacttctgtgagttctgtggcaaggtatgaaagagattaacattcagttactgttttcatttctaaatctcttttggttttggattattgtggtaactgtggtttgatcaaaatgattgcagtacggagtgaagcgaaaggctgttggtatctggggttgcaaggattgtggcaaggtcaaggcaggtggtgcttacacaatgaagtaagtgatttctgagttatatttgtattagctttgtgttggttatcaatcaatgatttgttttctgatgaaattgttttcgtttgtgaattgcagcaccgccagtgcggtcactgttagaagcacgatcagaaggttgagggagcagatcgagggttaaaagtctgctggctttttatatttggtttccttgttttgacaatttaagttttgcaaactctatgcttgtgattttgaatcaagacttatacattgagcagtttaagcaggtttttattttttgttgagttaattttcaaagtttcattaccaatagttctagctatataacctaaagttaggcttgaggttttgaatgtttgatcctattcaacacctaattataaatccttgaatcctgatctaatgtgatgtttcttatactttattttgatcagcacttctttaaccctataacttggtaacagtattcgcacgagtctttacagatcaaaatttttagagtttgatgtgtgttttcaaagtgctttactagaaatccttacgataatacaatctataactgagtgtactaagtttaattacacaaaagtcggtgaataaacaaatactaacgttactggtttttatgtctggcaatgatctcttataaaatctatatattgacttgtttatatgcttttgtgtcgtaatcatcctaagatattggtcccttgagtgtattttaatggccatacatgtctcattatgatctttgatgaaattgattgatctaagttatacttcagttgaaatttatgagttttacatgaaattagaaaaacgaataataatccaacagttcaaaacaaaatccaactaactggggaaaatcttttcggagacaacaacaagacccaagtgtgtcgttcttttcccccaatgagccaggctgttgcacttctaagttttcttggaacttcatgagattctttcaagattccatctttcaacttcagctctcatcctctaacccaatggttgatgtatgctccagtcaccgcagctatcgtttcagttgctcatccggatgcaattacagagccactaaatgtatcaccattgagaatgcagagcactagtatcatggtttgtgtaccttgaagccaaagatttttgggacatagctttgagtaggcttctgcggctttaagttcccgtaagtcatcaagaacaagtgagggaatgtggttccaaagtacgctccatcaatatctgcacaagtcatttaaggaaaacgctaagatacaatgacactcaagatcagagtgtctcaactgaagcaaaatcagacctaagctttcactgaaatattgaaatggcaaagccaaaattatggattatgaacagagaaaaaggatactgccttggaatttagatcgcgggtaagatatatcctcgcatttagggcagtatatcttcacagtactcgatctcgggatatcggattgtccaactggaagacaagactgaccgcaacagaaaactctcgggcatctcccgaaatcacagttcttgtacttctcagtctacagagatcaataaacaagagacgtcgttaatcaaataacgaagctaaaagcaccaaaacataaacaaaagagtagagagattctctcactaaccattgcagccattcctttagtagtcaaaatgtaacgaacatgaataagaccatatagcatctcagcagctgattccaccatttcatgctgttcatcagtaaacatctcacctaaacatagatacaagatttcagaccaaactttactagctccttattaacaaaaaaagaaagaagaagaagaagagagatgacttactgttggaagcatcaacatctaaaatgagatcaagtgcataatcatagtaagggacttgaccacttaaaccacaaagattgaaatcatcttgaatataatcttcatcgacttcacagaagaaatcattccctctcaaattacaaaaccaagagatccacgacgtatcatcaccctccgatccactcacatcagacccttcactatcagtttccgattccactgcaacaccaaaaaaaaaaaatcatcagaaagaaagcaattaaccaacaaaaagactcacagatgtgaaaaagagaggaacaaaccatcaggaagctgagttttagtagatgtgaaggaaaagggatctttgtctttagaagagaaaaccctagatgtggtggtggaagttgaagatttctctagtttcttattgagtgcatcgttgattcgtttccgatcaatagctccaccgaggatctctgatctcgatgacccaccaccacctcctccactacgttccttgtacataattcgattccttctccaaaaagacaagaaatttggagattagattctcgaaagtgtcagactttctgagaagcttgagagagaaaggaaattagagagacggagaaatctagggttttcttctttttaattttaatttttttaaaaaaattatatataattttggtaacagagtggaggacaggacataggcgatgtaaagatggtctctctttctcctctcaactgttttgtttttttttgctttccagtttttgttctttctattttacaatgggcttctataattgggccttgtgttagctaaagtcagtttagtctcattgcttgcttccatcagaaacgaccaaaacagatgggccacagcccacataagatgaaatccataaatcgtgaacaaacatgacaaccaacaagattacgatttttggaattagagtacatatacatgttggaacttggaagatgcattggtcaacggagctagacctgacaaaggtcttcggataataataatatcgtaaacattaaggaaactttttaattttaaaaaatcggacatgaagagcacgaattgaactctatacaaaatctagagttgaatcgtgtttcagaaactgaaggtacacgagcttgtggtggcgtggtgcacgactctgcataaaactcattatattatctattcaaaatctaagcatttgtttcagacaacacaagtttcatttttaaaagatctcgacttacgacaaaaaaaaaaaaaaagatctcgactttttttgttagttaaatactacaatagtttgagaaatattttgtatttattttattttttttagtttgagaaatattttgtatttcttcgtttgtgttcaagtaaagtttgtgatccacgtttatatacaaaattgatagataaaaattggactggcatatcatgtaatatacacacccaaacataatttttgggatctagaaacatttgcttgcagaacggagcctttgtcggagaaagtagtcatgcctcgttacaacgacttttgacaatttcccaaaagttttatagaagttgtaaatttaatactagtagttgtatattgaaattttatttttgcattaaacggtaaggatctactaataattgacatgttactaagtgaatgtctaatcacacgaacaaaaagaaaaggcagtttacacgcgggtcggctatatttgaaccataccggtgatagtattggcccacgccttaatgaaattgtcgcacccatgataccgtgatctcacttatgtggttagctttgtaagacaacattattactctacatgctatattatcttactcggattcgatgttttgttttattaagaaagtaaacaaaaactagattgaaagctaacctttagatagattttattaaataaagtttaatttcgataatgcatttccaaactcgaagcgtcactagttgcaaacggaagtgtggcactaagactttactaatcatataattctgtgagattagatttcaatattttgatcaggtaattcaaaattttgttgttgcctaaccattccttaaccgctcagctattttgaatgtgttaacaaccaagtagatctttgattttaaagtataactttctaatggttggttagtatatagaaaaaatgaaaacaaataaccataagttaattatgtaattcatttcgaattactattgtgttacagcaatattcacgatgttcacaacagtagaaaacagaatcttaaaaagatgcttaaaaatagagaagattgaaagataataataaaaaaaatgaattagaagattgtcgttgacgtcgtccgacttaaataccgatgaccgcacgagtcattattttccgttactaagcttttgatagcgactgaacaacacgcgccagatcctttagttgtaaatccccatttttattttcttaaacccaaagaaagaaaaaaaagaagagaaacggccgaatcttcataaattccgccatctgttaagctcaatcgccgcctaaactccggcgactctctcggtagatctctcaatcctaactgttttcgtctatctctctgttgtatctaaaagcagcgacgccgatttgttcgttttccggcgggtacatatagtatgattatctctgtttaggtgtttttgatcagtttctcatgatatggattcgcattgcgtctctgtttgattcagattccgaaagttccgattgattcgataacttgtatttgttgtttgtttctgcatttgatagaagatatttggtgattgaggtgactcggaagagagtgagagagagagatggatgatagaggaggatcgttcgtagcagtgagaaggatttcacaaggtctagaacgaggaagtgtttatcattcttcttctggtaaatttcatcttcactttgtacgatgattctttctattttttttgcttcttctggaacaaacgcgttttctcatcattatacatctctatctctatttctctctctctctctctctcccactttttccacgttttctctttctctctgtgtattcgctggcgattgcctttttatctgagatttagtgtcgcagatctacctttcgccatttgctttttcgttgctctttctcataaattcgtggagtttttgttatgtgtgttgatcttctttgtaagtcctatttttagtatttcccatacgaaattgtttgcgttgatttctctagttgagattagtcttcttccctgcagattccatttctctttttgactatattgctagtttgtttttccatggaagcatgttttgctaaaatcttttgttacttgcttcgattttgatagtcaataagttgaagctaatggatgatgtgttctggaatctttgatttttctttcatcgttctgtattttgacaagtctgatgcttaaatgacattgtatgcttctcacgtattagttatcgtatttgtaatataaaagtcagctaaaagatgtttgactagtcaccctcttgcattaagaaatcatttctttatcaaaaaacatcacaattctgattttaattttattgcagctgaggttgtagctggatcggcagcgtggttaggccgtggcctttcctgtgtttgtgttcagggtagagacggtgaccctcgtccttcatttgatctaacgcctgctcaggtaccattttcctcttttttaattggtttactttataatgattgcttgtttctcctctcatattagctgacttctggttagtatttttcaagtagtatatataacttgtatgatccttattgtcaatgcttgcaggaggaatgcctgcagaggttgcaaagccgcattgatgttgcttatgacagctcaatacctcagcatcaggtatgctttcctttatgggctgtgtttgtaaggactgctcacaactaacttgttccataaattagatggtctctgtttcaagtttaccagctcttcagttttactgtatgctagcttcattggtcaaaactctacctgcgtttacataaatatattgtttgctatttcatatgtgtgtaggaagctctaaaggatctttggaaacttgcatttcctgaagaagagctacacggaattgtatctgatcagtggaaggaaatgggttggcagggaaaagatccatcgacagattttaggtaacgtctcatctcattgtcattatccttggattttcccacttcaattgactcacagtagagcatctggcaggggtggtggttttatttctctcgaaaacttgttgtacttcgctaggaaattcccggtacgcctttataataaccagttgcaaatgcttctcaaaactgtattttcgttaaaacattcaattccagtggcaccgtacttgtatccatcacatagtatttcgatcagttaataccatttcaatccagtctctcaattcctgatgccacttatttgtttcctgcagaaatctttccacggccttctgcggaaacaggttggcgatcgttctgtgtgggaatacccctttgctgttgctggcatcaatataacattcatgctcatccagatgcttgaccttgaagcaggtactaccacatttattatttccatgattacatagatattcctttgtgaactgttgttacatgcattaggcagcaatcttgcaacaactagcttaaatagcaattaccactccttgttttcttaatcttataactgggcatatgcattagtcttgagtacttattttgagtatcttatttgagatactcaggttcagtaacaatatcctactagttgtgtatactaacaatagacacccttcaattttacagtgaaaccacgaagtattgttggggaaacatttctaagattcctttcgggtaattttcagacaattctgatattatgacttcttcttgtgtcacgaattagattactaagcctgtgtcctacgacttgtgttgtcatcagtgaacgagtctgcgtttgaccttctttattgcattgccttcaagctaatggatcagcaatggctatccatgcgtgcttcatacatggagtttaacgtaagtatattctgtagcctatactaatgtcgcaacaagttatagattcgaagaaacttgggtattaatagatttgactcttggtgttttatcttgggctatacataagttgatcaaatgaattgtggctaaagtggtagttgtgtggaataacagactgtgatgaaatcaacaaggcggcaactggagagagagattatgattgaagacattacaagtctcgaagatttgccatcatacagtcttctcagtcaatagcaaatagcttaccaaaaactactttgtaagtagaaagatctaacagctcagaaaccctatatcaaagctaaaacaacagcagagcaagtaagcaagcaaaaaagaagacaaggtttctctctctctcgctcttcactccatcttcctcgatattagtgttggttccatgaaatttgggttgttatttctatgaaaccagggtcagattttgtttcttatggggtcagattttctaacttgtggtgcttgtaaaacgttgttggttagttggtgttttgggctaataaatcatttggttacatttccactactcagaagacccaaaaaaggactctctcaacatttaatggcgcgatcttgtgtagcacatttcaaatttacaaataaaagactcgtgatgagatttgtctatactacacaaaaattttgaagtacgcttctccaccaaatttgtctatactaatcaatatgattttgcttttctctctcggtccaatattgacaaccttttttgtgaatgatcggttctccttcacaaagctgaagctgataatggtgtcttctccttaaccatgtcagttttataccatcaatatcataaaccgtactagctatgacggtcaaacaatggactggtctattgccacatagttcaatttttaccagtccatataataaccgggtccgccaagatgtgtatttcacactagtcaaatgtaatgttgctgttggaaataaacttgttattcaaaaaatacaagttgagatgactatatatatatatcttacaatttacaaacgggttaatttaatacaacgtctctttctttatacgatttggttttctaatctctctaagccgtcctttgacgctctaatttggcttagatataagacaacttgtatttccttatgtcccaaaattcgaacggtaaatattgttccaagaggaaggaaccggaatctaagattaatttgtactgtactcaataagcatgtagaacatgataacgataacgctgtgctacgaccatgagtaatagaacaaaagagatcgagtaaagataacaataagcaaaaaagtattgatgaagaaaataatttattacacacaagaagagcacttcatgatggactagttcgaaagaccaagaccaaaaatagatcgaggcaattgttgcgggaatatctaattaagcacaccgtacatcaacaccatcgtcaccacaatctttccatagctcatgattcccttagacgccgcatttttcaagttttctgcgtttcccggcgatggagacggcgatggagctgatggagacggtgatggagctgatggagacggcgatggagctgatggagacggtggaggctctaatgaaacggcagcaagtacttgtacggcgagtttcatgccaaggctgcagtgaccaggagtaaggcaaaggaagtgtatagcacctacttttgtaagatcgatcttagtgtctccgtcagaaaaactctgcgtcggtctgctagtttcgcagccatcatagtcggctttattcaccacggccaccgagtgcgaaggaccatatttgaactctgattggtcaatacaaaagaaaccaacaaatccttatgattgttagaaggtaaaaaaggagtttcttgtgaaacaagtaatcagtatgaacaaattctaacctaaatggttattagtttgttatggggaaaacaagtgaagcaagtaatgaaagaaacaatttatttacctagagtgtcaccgactctgaaagtcttttcactaacccaactcgtgtactcgacaccaatggtccaaccatcattatctcccacctggaaagtcacggcaaagacggcagggactgccactaggaggaggaggaggaggagagcggtggcggcggttgatcccattgagatattctatatatatcatgaggaagaggctaaaatatgaggtgagttatatagaaaaaggccgtgacgtgagatgtttgaatatatcatggtttgatcaattgccaattcaatatatcaagttcgtcagctgtgtttaccacaaaaaaaaaaaaaaaaaaaaaatcgtcagctgttttctattttataagaattgtttgtttaaaaatctctttgttattatgtttaccaattctctattcttttcaaaatttctctttgtaaatgaccaactagccatatgcaaacttttgtccttcatttttttaaatcatgacatgatgtattgaacaatgtaaaatcgacatataaatttcgaatctgaaaatatgatagtgtcgaagattaacagagtgagaagaagattggtggtttttttacttcttctaatactactcaaatgcttcataaatatatgaaagtttccgactaaaacaaaatctttctgaaagaaagaaaaatcgttcttttaattttattttattgttataataattggaatgagttttggctgaacaagattttaacgatacatacggtatggtttgttagcaatgttttatatatgctctacagatttcgtaagcttacatcaatgtttggggttttgtttaaatgcaattacaagatttgacaattgaattggttgaccatatgtaacataattagttcaaccagttgaagatataccgttttccattgtctaacagtttttggagagattacagttttttattttattttgaaaaagtgtgacaaatacagatcaatcgtttgtccgaatgtgtataacaaaaaagaaataagagttatagtaaacaatcgaaatgaaatctaaagaatattttagaaatatggtaagaataagataaaatagcttggagatggctataacgtttatcaacccctacaagtaattaaaaaaagaaggaagaaggaaaaattgtcaatggcaaaaaaattccgttacacacaaaagagcacgtagtggtgtagtatttccaaaggccgccgaccaaaaaagacatggagcaaaacaatgctctgtttccaccctgttatttaggtcataacagcgtacatcaatatcatcgtgactccaattattccatagctcatgactcccttagatgccgcgtttggagacagcgaaggcggcaatggagctggcggaggcgtcaatgtctctgaatccggcgtgccattggtcggcggagatgcagatggaggcagagagctaggggggagcgatggagaaggaggcgaaggaggggaggggggcgaagaaggggtagacggagtggagggcggggaagaaggagtcgaaggagtggagggaggcgaagaaggagtcgaaggagatggagcggcggcgaggacaggaacggcgagtttcatgccgttcttgcagtgaccaaaagtagggcaaaggaagtgcattgttccaactgtggtaagatcgatcttagtgtctccatcggcaaagttctgtgtggctccgctactgtcgcagttatcgtagccagctttatccaccacggacaccgagtgtgaaagaccatatacgaactctgtaagaataaaatcatcagcttgttagaggggaaaaagatgattcttgcgaaacaagtaatctacatgtagtgtaaaatcaagcatttttatttacctagagtgtcaccgactctgaaagtctttccagtgagccaaaccgtgtaatcaagattactggtccagccagaaatatcgccgaccttgaaagttgcggcaaagacggcagggactgccgctaggaagaggaggagagcggcggccacggttgatcccattatatataatgtacgaagatagataaagagacagagagagatgaagaagaggagtaaaatggtgaggggagttatatagagatgctatggggtgaggaggacgatgacgactacagactactatgagagagttagtaaagaagaatgtttgaagaagtcgtggctttgatcaattgccaactcatttcatcaattccgtcgtatatttgattcattgttgttatgtttaccaattctttcctcttttcaatttgctttgttgtaaatgacgaactatacatgtgcaattagctctactttttttttttctttttaaattctactatgtgcacacgtaacaaaattagaagatgcatatttcaaccagctgggaaaaatgaaacaattgatcaatcttttttttttttttaacactgttgaattttgaatttgaatgtttggagagataccttatttgtggtaaaaaaaagttaagattttgttttaaaaaaaaggttatttaagataatatatcagggaaatgggccaaatggctaccacgttcactaacctctgttctaataatggaattacagattcggtacggtgattccaaacaaaatagttagcaattttagtctgcctacgaaaaaaggtcaatgacagaacaagaatcccataaaataaaaattactactattcgtttgactaaaggtaataactattattattgagaaaaaaatccaatcaattctgtcaccaaatcttcgaagtacggctgttttattataaaaacgtgtgaaactaaaacctaccagaaaatataagtggttgacatgttctttagcaacaaaaaaaaataatactcaaaaggataatttgagaattgtaaaaatttagtttgcttttgttgttttgtttttggtagttaaaaatgttatgttgctcttctattccactttttgtttttatgtccaaatagagaaagaaatcttgttttttttttgtttgtttaccattaaaacaaatatttgagtttggtaaaataaacaatcatacaacaaggctaaaagaaaaagaaaactaagcccaaaaaagaccaaaaagaaaacttcaagggctaaaaccgaaggcccaaactgattattacaaagatgggctaacactaattgtttggcccaaataccgacataagccaaagtcaacgcgtttcagaagtggaagaggagactcaaagatgcgaacaagaagaattgttttgttgatataattttggaaccaacaccaacttgaatcttgtctttcaacttgcaccacttattatttgttggtttccttctgtctccttccattgaatctcaccactctctatcttcttctgagtcacaagaagaaaacaaatcatcactttttttcttcatcccaaggaaatcacctcactgattcgagccacattcagataacattcattttcatatacctccaaacctctccataacttctccttttctttggatatttatatcatcatcaattaaataaaaagaatagttctatgtttatgtacctataccaccaacactagtccatgtttccactttttttaatgacgtcttcgcagaagaaaatatcctatgtatgacctagatgaggaaaaagagagaaaccgttgaggtgtacaatataataagagttatgaaaaacatgcatgatgactattttcatttgataatatatccaaatagcaaaacatgcaactagtcatacacccttcacagatacctttcaatccaatgtggaatatctttaaaccaaatgggaattctttatttcgggaaatcatctaaccattcatttaatgttttgtgtatatgaacacaagcaggtagtttccaaaaccgtattcaaagagaaaagcagaaatgttgaccttttctaaaaccaggttatcttcatgcgtatataaaaacggactttgcatgtttgcttactataacttaggacagagtggaatcccaagtaccaaaacagatttcttgcaaaaaaacaatggaggaaacaaataagagtgtggttaatgattactttaccagtgctatggaacttacagagtcaggtgaccctcacgtgcctacccgttacattcttccaccttcacaacgaccaatgctcggtccaagcattggcaccagtaccatcaatcttcctgtcattgatctctccttcttacacgatcctttgcttagactatgtgtcatccatgagattgaattggcctgcaagggatttggtttctttcaggtaacactcgtgttttggctacatacactacacatgtctgttaggtaagacacatggcaagttctgcgactcagattcatgcattgttacaatccaaacaaagagaagtttgatgcttaactgtcctattcatgtgtctatatttctcagatcatcaaactcagccatgagtttcatttctcaggtcactaggactagtatggaatgtacttatcacatctaccaatcatgcttgatatatgacttatgagaaatgcagtttttatcttttgcatttctatcatacccaacaaagtcccttatcaaaaattaaataaatgaaaaagacaaagtccttggtttctgtctttattgaggataaaacaagtagagagccatgtgaagatgcttatcttcattttctacacagatgtcaagtatactgcccagtttctttaaaaacactacactagtgtcattttcatccctcttattaattacattactctgatcttctctacaggttataaaccatggaatatcatcagcagtggtgaaagatgcacaagattcagctacaaggttctttgacttacctgccgatgagaagatgcatctggtttctgataattttcaggagccagtaaggtatggtaccagcataaaccattcaacagacagagttcattactggagagatttcataaaacattactcccatcctctctcaaactggatcaatttgtggccttccaatcctccctgctacaagtaagtaaacctatctaggccaacttcactatctgataataactcaaatttgttctctttttactggtctaagaatccaatttctcaatagatgtttcagaatttgcaagaaatttgtatctaaagaatgtgactcagaactgatttgatcatctcgaaatatcattttcctatcagggaaaaggtggggaaatacgcagaagcaacgcatgttttacataagcaactaattgaagctatctcagaaagtctaggactggagaaaaattacttacaggaagaaatagaagaaggctcacaagtcatggcggtaaactgctatccagcttgtcctgaacccgagattgccttgggaatgccaccacactcggactatggctcgctgacaatcttactccagagtagcgaagggctgcagataaaggactgcaacaacaactgggtttgtgtgccgtatattgaaggagctctgatagtccagttgggagatcaggtagaagtgatgagcaatggcatatacaagagtgtggttcatcgtgtaacagtgaacaaagattacaagcggctctcttttgcaagtcttcacagtctacctatgcacaagaaaataagtccagcaactcagctcgtcaatgaaaataaaccagctgcatatggagaattcagcttcaacgattttcttgattatatatccagaaacgatattacacagaaaagattcattgatacactcagaaagaaaaacctctgaagatggtgtcatataactcgacacggcaattccgatggttgattatttggacctagttgcatgcatcttgtatttaatctatgactatcttgtgcaagtgaatagtccttgtttatatcacataaaagtatatttagttgtcatataagtgtatccttatgctagattcatattagtttctcatctaagagcaaagtttgataaatggatcaaaacagtaagggttaagacttatcaaatctcaaataagttccaagacattcttcaaactctatataaacatgaattgtcctgaagcttatagagagaacaaaaaaaaaaaaaatcaaccagataacacagacaatgaaatgagatgtgaacaattaccaaacatttaacagcttaaattctccatctttacaatacagggaatcaaacatgttcacaaaccagccacgtatcgaaacaaggaagtaaaatgctcgattcaacgacataaatcgtacaaaatctgttaaataagcttgatttcgttccaacaaacacagaaaaataaaacttctcagaattaaaaacagcttaccgtcaagttctctaagtatgtacggccacagcctcttggtcccccgtcggcagattcccggtaaaatttaactccggcatcgcttacgtcttttttttatatttgttttattcctaatctttttcatatttactctttttaacagatatgttttaacatttacttatcgagaatgtagaaacttcggggattagaagttagggaaaaagggtgaatttgagaaaaaactatttaatttggacaaaatcagaattattatatagtattgggccgtttcagatattttaggaagctacaataaaatatataatgaaaactattagtgaaaaaacaaaagtctgcttcttcttcgccgtctctgtgcggcctcttcctcttcctcttctaaacaatgacggaggaagaggtagctatggaagtggaagctctagaagcagtttacagcgaagactgcgttatactggattcgtatcctcctcatcttcacctccatatcaagccccgtaccgccgaaatctcttctcagcaggtttttttttccccccaatttgttcttcggaatcgagaactatctgaaaactccagaatttacgcaatgagattgtcagatttggcgatcatccatataagtaattcgatcttaagaagtagaaaaatttaattgcttttgttgtatgatttgatgtgacttcgatttgcccaaaatttgctttcaagtttttttttttttttggttgcaagaactcagtgatcctctgaatttttttttctctatgatctgatgtttgatgtataacattgtttctgctctgcagtttgtggaagccgttgttagattccaagcaggttctaaggtagatttgtcatcaatgttgtcattatcctggagctttgcgtagagaatcattaagctaaagtatcttcttttgttattacagtatccagatgaaccacctcggattagtctgattgaatccaagggtcttgacgagcaaaggcaaaagcttttgattggcatagtgcaagagaaagcttctcaactatcatcttctttaatgcttgtagaactttgtgaggtaactactctatatattttcttctattctactgtactgtatgtggagcaattctccttcattgcaccatgctactgcaaatctcagaatgtgacttcttttccttgatgaaaaataatcgactggtagatttagtgtaattaaaaggaaataagtcgtatgcagaagaaaaagtagagttttctgaatcacgagcagacgatgtgtgtatgtgcgtggatttacatatgcaatcttgattaagattagaatgtcatgtagtgtatactaaaaatatatgtttctaggaagcagtggagaggctcacaattatgaatcacccggagggagattgtccactgtgtttgtatccgttattccctgaggatggcgggagtaaacaaatgccatttatgaagctgatgtcttgttttcattgtttccactggtaatgaatagttagcctcagttacaattctctttcttatgttgggattgtattccaaatgtttaaggtgtctaattgttctttaatgatttcaagtgatcagtgagtgcatcattaggtggtggaattggcttcatgcacaggaagaggctgattcgaaatctggtgacactttacatatgcgtagaggatcaactgctcgagaaggtttgtatcataaggtctttttttgacggaaactactgaaaaagtaatctgaatgaacaagtattgcaggtaattctggatcagcagataaaagcttgggaaactgtccagtgtgccgcaaaatttttcactcgagtgacattgaacatgttcttgacttagttggtgctcaatcatctctacaggtgagtgagccatcaacttcggattcaatccagtgcctttcattgatctaacccctcaattcacaatttggcttacacgtaggactctagtttaataccaggcaaggaccaagacccgctgctccagtcagattcagagaacataagaagagagcggtttgagtctattctaaagacgcaggaagaaaagggtggtttggttcaaccgaagaaaaacatatcggtggtgcccggtatgtatcttcctccaccagctcatgcatcaacgtcacgaaacgaagaagaagaagctggtgaaagccaagaacaaggagaagaggaacccaaagaagctgaatcagagacaaactctagcagctccaccaacaggagaggtcgagggagatggagaggcagaggcagaagcagaggccggggacctactgtcaatgaaaggaagccgaattcgcaagatccaagaaaaccgacgagacaatgggtgcagagagccagagaaggagacaaataatttatgctaatcttgtgtgatacatcaaactcaaactcaaacacaagatatatatatattgtgagcatattaccaacgaaaatacatttctgtgagcatatttgtttctgataaagtagctttaggaaaatagcaagtacaaaaatacaaaccgctttaaaaaaaaagatggtgtcgtctcataattgggcctcactatcaattgggcttgggcttaatatcttactttcttttttttttcgtcaaagtgttaattaagttcatacttcataactactcatacctcaaccggtttatgatctgagtgggcattacaaatatttggcttaaccggttccgagccatttgtaatttccgagtatctacatcgccggcgattgattctgctcatcttttcgatgccctctccgtctgcagtcgccgatctcttggccgctcttgcttacaggcttcagaacggagatgaattattcgaagaagaagaagaagcggaagagtctacttcttctatgggactagctatctcggagcttaaccgatctctgactctggatatcggctgcgaggattctggggtcagggttgtggacgcagcgttatctataatgtgcttcaaggcacctcaggttagtatcatatctatcctggacttgcattgtttctacgtagctgagttcttacttgtgagtgattttcttattaaaattcaggtttttgattcggcaattgagtttatggtacgaacaattgtttgcgccttatcatcttcaagcaattgtaaggtaattaggtatcgaaacgaggaaacattacagtttgggagctccaatttacctggctgctctgaagaattgatcgaaatctctaaggatattattgagaaactgtggggaaatggtgcgtttgatttagcttatcctagagttatctgaagattttaacttttgtttgttctctcatatttttctgacttggaaatgttcataggaagattggctacattgttattcgaagctgttgtaaggtcagcagcctcaacatgtaagatcagcagtttcaacgcgcatggaaagcttatggatggaagaaatagggctgtctcgaagcttcttgcttacttaccgggagaatcatctatagagaaccacaagatacctctgaggtttgacctcttgtactgtttctgttccaagctatgttagtctgcattttccatattactcaagaagccacagcttctgagatgtttgctctcttgtttcagaaaaaggtagaccggtctgacactttttgatgatcaggattcttttctggtatcgagatccattgtctttgaaggtagatgtttccagaatcttgaaagaggtggtggaaaggcctttcctttgtgtaaaaagggagcttttcgagaggggggagtggcgcgatattgtcatctgcctagcgatatctcctactatgtttatcaacactagatcactcttacataaatggcttttgcttacgtgagttcctatccaattggtgtcatgtaaatctacaataatagacatgtgtaatcttatgcgttgtgatctctagttttccatctttcttgctttctgatgcaatttctttctttacgccaggggacttgcttctgtttttgaagtacttgctggtttggcctctgcaataatggatacaatttcaaggccatcgttgtggggtataccaatggaactagcttccatgttgccattttctgatacatactttcctttccagtgtcaatttctgagaatcttggcgggtcctctcagttccaagtccctcctaatgttagctcatactgtcagtaaagcgtctgctgtccctgggcaacaacaacgggatactaattgtaagcctactccaataaaagttcaagcattagatgacaaaaccgaatggtaactttacataaaatgcaaattgataccctcagatttgatctatttatatatacgtgcgtgtgagtggtttttgaatgatgttgtatcttctggcagggctttggctattaacttcccagattggttctattttgcatctgctatgctcttctcagaaggaaagtcgtttgaaaatatccaccatatatgcgcttcaaaagtggctgactgtagacaagtatgtgatgtagaagatctctccattgctgcggctacatacatttcttggattctaaaccctggaagtggaaccattcaagagtcagtaagtaagtctctcattagagtctcagagatatgtatcagtaaaagttgcggctcagaagcatatcgtactgagactataactggcaagagaaagaaaccagataggctcgtttctggcaaaataaatgcttccagtattgtggaagacctattgagagaatttgaaaacaatatcaccaattcagtttcttatgatttggattctcggaaaacgcatccatctttcagctctggcctccaaaacaatttgttggtaagaagagttgtggttggcgttctgtttggttctccatattcagtaacagatgaggagtatgaactggtattacactatgcagcaactgggaaaattcttgactttaagaaatcacggagtaccggattcaaacaaggaaagaaattctctagaatatctgctttactgtcgaatgaaattaccaaggaggaggctacagaaggcacacttcttgttttcaacttaactgacactttggagagtatgtgtgtatcaagttttgaggccaaagaggacgcagagaagtttattaaccattttaagctgagatccagcaagtacttggtcaaatgcatagatcgcctgatacaacttcactgtacacaagatggagatccaatactaagtgacattaatatcagactgctgcaatggacagtaaaaggactagaagatccacattttaacaaagttcttgatgatatcgctgctaagttggcctgcatattctcgcgcgtgtaactgtcaccatatagcctgacttgtgtcatatttggtggtacactaatttttgggaaaatggtgatcaaatgtgaactgttcaaagcactcgcacgactggtatgaggatataactggtgtacaggtaattgtaattgattggtctaatttctaatacagtaacacaatcataagtgataagccggtttagtcgtcaaagtagcaacattcttggctaaatttgagttggatgtctgaatgtctttggtatcagtgtaatggttatctataatatgttgccaccgctaaatatgatctagtacactagtttgtttagagcctaaagttttttatgttggtggctatcatatgttatcatcaagggagctttatgtttaatatattactctacatgggtgatgagacatttgacctgcatttttttttcataatactgttaaattttttgtgatcataataacatattaccttcatcctttctatttcagctccacaactgaaattatttgatctgcctggactggaccagagaattgtggacaattcaatggtgagccttgaaagcacttgatgccttattcaatggtgagccttggaaccacttgatgcctttgccatgctctcttaattccacttgataaccacaaaacaataaccggatttcctgctgaaaagggtaatgtagattcattatcatgatttgctctctatgttcaaatagtcatttgtttcttagatctcttggctaattatgcgcaaaaacacaattagccagggcatctgagtttcgtcatcccaagcccctgagagttgcaaaaggagtatgatccagagaagtgagttattgtgagtacatgtacttgggttttgccttttaggcttttaatcatgttgttaaatatttcttattgaatcagttggtttcagaccttgtatgcttaaaatagtcattacgttgacatcagataagttgaatagacacctttggagatggaagccagccaggtctaggctttcatatggaaagagctattaagagatatttattttccaatattttttgtttgtttccgtggtatggatcttttatcctcaaacagtaaagggataaagacaagaggggacatgggagagattctgtctattaggctcggggagggacacaaggcaagaagaagacacagagcagatccggtaaatcctgattttacaaaaccatgtggtttcactttcagacaagaaatgaagagttgtcagatgtgaactcgagagagaatccgatggagacaagaccccacccacttggaattgaagatcatatcaaagcttttagtaaatcatcactacagagattctagtttattgcttacagttaactatgctttcttccgagttttcttcatattctcgccaaacccaatacataaatcacaaactctataaaacaactaaaaggaatgcctacaccatcgccgagataagaacatgttagaggttatatcacgtttaaccgtaagatcttagcgactccctcagtttcaaaactttgtttatatacattctccttgtaataaatagaaatgtatccaacactttcttggtaaaaaaggaacattacaataactgacctcacaattgttactgtaaactctgtaagcatatcaatatatatatatatataatatataatgtcctatttgatagagtatgagcgagtgcataccgtttgaagagactccatgaacaaagcagagaaacttgttaaagattggaacacaccaggcaaccctgtctgcagattattcaaagtcatggctcttgtcacttctattgcctttgagtatttcaccatctcttcctcaactctcctttggcaaaccgcaagctctgactttttatcgcttaacgggtctcgagcgtctaacatgtgttggttatcgggtcctgactctggtaaaccgacaccaaccattgagtatgactggtagtattttctctctaggtttctaaccgacgaagccttcttctcaagctcttttgatgctgattctgttcttttctttatcttgtgttcatcggcttgttttgcggatatcacgtgtacaacgttgatgaagctcttgattgcctcagatgcaactgtatcgggaatacgatctagagcgagtttccactcatcgcagaaggcgtaagcatcgagcggctctttgtgatgattggcggcgtcttcttggcaaaccggaagaagggtcagcttgaaccaggcgtgaactgagtgtatgaagtcacgttggaatttaatcaaactactgaaactggagtgccaagaagagacagctgattccaagtcacgtgtagcttgtcggtgtagctcagatgttgattcgcctttgcccgatctgttaatgagcccccggacttgctccacgatgctgttctgagtctcatggtattgatgcatagatttccacatgtacataaagctgcatccggtggaaaacaaacccaaagattaatgtctccaaaggtcaaaattaatgtcttgttttgattttgtttaacaaaatgtccagagactcgaattgattacagaattcacatgatgaataccagaaaccagaagacattcatttctggcaaaactagaaattagtcagtacgcctaaccaacaatgttattgcctctcaactaattaccaatttcagcaacttactataaaactttcacaggataagctataaaacttaaaaagctaagaaataaattgtaacaattgacaagagaggtaagagacctttttgtctcactctaagcatatcaaggaccacagaattctaaaacgcatgggctcataattgttcacctacttattgagtccacaagattctttcaaaaatatgaaaagtaggtggcaatgaataataatactatactgaatttaagaaaccaaatgggtaaagaataatgattgcttgccaaaaatgtcagattcaagaaaactgttggatcacaagataacatcagcatctggtgattcagttatatatagagagaaaacttacccatgacagagctcaacgagttgtggaacaaggtcagtatcacgaagacggatgatggcagtagatgtggtagtaacagcttgagaagtaacaatgatcagtgactgtaacctcgttatagaggcctttgtcttgtctaacttagcttcatcctcccctttatattcttggctttgaagctgtgataacttcttctcatgctcaatcttgaaaccttctctagcctggaaaaagaaatcatcagctaccaacaatcaattgttaaatttcataaaaggaaaaacctttgatttggacaaactgtaaaagaccttaatttcttcataaagcttcttctcccatgccaagagacggtcaagagtggaacaaaggctcttcgaactgttcggttgatccagcgcagtcgtgtctatcctatacttgactgccaatggcggcttcgaggtccatgtcgagctcaagttgcttaataaactactcgaatgaatcaccgtttctaataaacaaaattcacaatgtcacaaactcaatttcataaaagcaggataatccaagttatcaaagaaagaaaacagaacgaacaatagaactcactcttcaattggctgaaactacgatcgagctcagctctgccaagctcgagcatctgagagacttgctcccctgaggcagcagccttatcgaaattttccttaatggcatcgatgatttctttcaaatccctatgcctaactaccatcttcatgtcagcgatatctcctccgcctctatagctaccagaagatatcgtagcatcatctgctttatcatatttactttgttcagcgccgccgtatacttgcggcattggtgaaggttgttgatgatgccgtctcatcgaattacttctcaccgtagatccaaactcggagcgtgtcccgacctcggaaattgattctctatcatcatcttcttcctcttcctccgctgcgtccgaggagctcgtggtgctgtaatgatcgtgatcctcccattcactacactgtacttcctctctctccgtctccgtctcttcctccacctgatttctcattgattcgaactgcttctgcttttgcttcctcgtgtcgaagaaatcatactctgacctcactgtttccgtatcctcgtcgttgaatcgattatcggagttatgtttcttctcttgagccttcctgttgaagaattcggaatcgggaggagaaggagggtagaaattctcccagttccagacggaggaggcatgagaaggagtagcggagtaagtagagttctgataagcactgggatacaaattgggcatgaaattggatctctcacttctcggagaagaagaaggacttgactccgagagaatatgaggcagtctaggttttggttgctgtttccggcgtcgattggaagaggtggacatgactgaaggctgcttagaactggcgacggaaggagacgtcgaaggaggataaacagaagaaggagcaggcgacggcgaaaaacgtggagggacaaatttagccggagattgttcagaaagcggaggagggggagtatggaggaaaacagccggagtttgatcagatacagagagaggctcaccggaggcgaatgaggaaagagcagatccagtgatacgaagcgatcggcagtaatcggcgtgagcggcggcgagatgatgacgagcgtagacagcttctttcatcagacggcggcgatccttacaacgccgtacagcatcttcgttatcgagcttggacgccgcacatcccatggcttatttttctccttcaggtttgttcttcgttacggtggcgcctgagctcacggcggctctgcattattcacaacagaatcatagagaaaagggaaaaagttagatacagctgtttccagactttcccactacactatactacttcactgtactctcaattttctcatatttatcggaaaaacaaaattataaccgacaacaaaaaaaagttaaataatcattttcaaatggtggcattaacctcgattaattttacctttcggtttctttttcagtttgttttttagtaaaaacaaattagaatttaaaaaaaaagagacattttctgacacaattattaacggttaccagaaccaacattacaataatacggttaatcacaatattaaatagttgatcaaaagaaccctagtcattaacgttttaaaaagtcattttttagttactagtagctctttaattaattaaatgaaatattgtgaaataagtaatgcgaagcaaaaaaaaaaaaatgggtcgtggtcctcgtggctcgtggatctgaggcttacgagctaaggtagaagatgaaaaaagcaccgatagagaggaaaacggcaagatggtgaaaagctgaagctgaaaacggtgaaaagttttactttcctctttggaaaaagtctttattagtgaatagaacaaaaggaaaccacatgcattcttccttttttttgagctttctagtttctttaccaatcactttgttccaaaagactcatcatcaccgccctgtcaaaaacaacaccaaaatctagatgctttttattaatcagatattctctggtggagaccctgcttattatataactataagtaccaaagagcatctacgattatgtgtattcatttcacttcactacatgtggcttttttgttttatgagtatattgagttataaagaacaaatgaatagcaatggtttactttgtaagtgcacaaaaatgttgcaatatatattacaactagctaggcaaaacaggaaataaagttattagttggggtcctggtggccgtaaaatgatttgactgagtccaagaagtggaggcctcaccacttaagaaaatgactcattctttgaagtagtcatattttggttgagaaaaatatatcgcatgactcttatatagttttattatatgtacgtaatatatagagtggatcacaacttggttaccagtaccgacagaaataatctccacccatgttttaacttctcttttttttcatgtgtaaagaaattttttgtgtgttttctatctttcatttggcatgttttgtagataaatatagccaaaaagaaagaaagatataagtgttatattgacaatacaagataatctcgtaatgtaatagctccaattgttgaaaagaaaaaacaaaaaatataaagagcagtttgccatatatatcaattggaaactattcagttttaattccattttcatagaattttttataacaatctcaaatccaaaagctggaataaagataagtgaattgggcaagtgaccgtgacgtgacgaccaacatgaacaatttttttttttttcctttacacttccattaaaacgaaaattacaagccttaaaagcccatgacggccacatagcccaataaaaagcaacaaaatacattcatctgaagtatataaacggcttcctgaaaactttgaagtagctaagcaataggacgtgaaacacttatatttgaagattaaactggattgttactttaagtttcaatccaatttcgtaatgaccaagttcgtttttaagtgtagtctcattattcgaacatctcgcagaacatgtttacttgacttgcgcaccagttgttcgtcaaaatgtccacatgaacttctcaaaacaccagtgtttcaatgaacttcatgcttacatcttcaaatgatttttgctgattttagtttcttttatttatttatatactatgagttcgagaaactcttggagtcttagaaagtagagtgaaatgcctatgttttccttgagttgtaatgccaaaaccagaagctgtagatttcaatggagaaaactacaggaccatggaagctttatttttacaggctttcgcaatctgaagatgcactttgatgcctatggatacttcttgaccagttgcatgatgtcacatccaacaaggtaccacaaatttcacccttattttattatcttccgtaattggtacgggcatggatcttgctctcattaaacaataagaaaacagaattaaacaaggcaagaaacttgtcgtcgaaaagacgtccggctaaattgttgttgtccactaaatggttcttttgtcttctgaagatttatatggtcataaacttgtcatacatatttttaattattgattttgctataatggacggtgttaagctctcaagaatctcggaatatcctgattagcgtagaaaatataaaaatcccaacattatggatcaccactatcttgaattgtttattatagattttttacattttctgagagttttctttctttcacgttctaagaataggaccgtgctaaataatgcgattaagggagaattttgatcgaattatttgacgcgtgtgccaattgtttttttttgttttgtttgtccctctaaccttttcaatagacaaaaacagaggtcaatgctttgattagctcgaccttagacattaacaacttagtcagatttgttttttgacttttgtgaattttcttctcctgattactaggattaggagttacaattaatctaggattcttacggaggtaaaatgttagtcaaaagaagaaacctaatgcagtttagtttagatttcttactaccctaatgccattagatgctgagaggggctacaattttctacgtcttcaaatgtacattggtaaaggaatatctgttttctcagatctttttttttcatccttattttaattacattttgcggtaacaatagtgacaataaaaaaagaagaagaagagttagttgcattttgaatgagtcagctttcttctgcattgggttaatctggccggcaaaatctttgaattcgttattatatagaccttcttgtcttctttatatattgcttgcattacacatttgtctcaacttccagatttgcccctggtttaaaacgattgtcctgtttcctttgtgaaggtcaagctttgaagggctaacgggtgatgctttggtgaaggttttttctggtccaggtttgtgcttattttgcattgcttctctttgattcacgtctgcataaacatcaaataattcatttatgtttgagttgattatgtagaaaaaattattaggggagatgctttatgataagaaaaaaaagtggtcttgtggtatcttaaggcagaaggaaaatatttagtgtcttaatgagtaatagatttatctgtctatccagattttataactgagttttagtaacttccggctcaagcaaaaaggaagttcgatatgacggacatagaagctctcaaggctatcaccacggagagcattgatctggtatgtacttttatacctcaccactttttttttgcagatgattgcttctgatagcttttatgtcaaatatgaacaaatgcaatttctcatggatcgttgcaggaaaatgttcccgttgaagaggtttttcaacatctcaaatgcacgaaagaaggattgacctccaatgaagtgcaggagcgacttaccttgtttggttacaacaaacttgaggagaaaaaggttttaaaaaatgatttttcaatcttgcattgatctcttattttctctctatggatggtatgttgatctctctttctatttggttctgcaggagagtaagatactcaagttcttgggattcatgtggaatccactttcatgggtcatggaagctgcagccctcatggccattggtcttgcacatggaggagtacgtcttttgttccctctcattagtcgtttctttccacaatatgtaaatacgtaaaattgtgaaaggtatagcttaacatagaattttaaaacaattttgagagtctgaagaaactaatttgtctcaactcttcagggaaagccagcggattatcacgatttcgtgggtattgtggtcttacttttgataaactcgacaatcagttttgtagaagaaaacaatgctggaaatgcagctgctgctctcatggctcagttagcccctaaagcgaaggtttaaatttattccttttagttgcgctcatttaaatttgatggtagtagcttatttacaaatcaattgttttaggccgtccgcgatggcaaatggaatgagatagatgcagctgagttggttccaggagatatagttagtatcaaacttggagatatcattcctgctgatgctcgtcttcttgaaggagaccctttaaagattgaccaggcaagttctacttctaatattggtttatcattgctctgtatcttatctctcccttgactaatcttggttatttatcttttcctcagtcagcacttacaggtgaatctcttccggtaaccaaaaatcctggtgcttcagtgtactctggttcaacttgcaagcaaggtgaaattgaagcagttgttatagcgactggtgtccacactttctttggaaaggcggctcatcttgtggatagtactacgcatgtcggtcacttccagaaggtttgttctcactttggagtaaaatataaaagtttacaaagattttggagtcaatgactaaatttaatctttgtatattggtttccaggttttgacagcaataggaaatttctgtatctgctcgattgcagtaggaatggcaattgaaatcgttgttatatacggtcttcaaaagagagggtaccgtgttggtattgataaccttcttgttttattgattggtgggatccccattgcaatgcctactgttctctctgttacaatggcaattggtgctcatcgcttggctcaacaggtcaatacaagtcttaagacagagtcagttaacttttgttgatttgtgtttctttataaatgactttaaaatccatttcagggtgccataacaaagagaatgacagccattgaagaaatggcaggaatggatgttctgtgcagtgataaaacaggtactctcacgctcaacaagctttctgtggataagaatctgatcgaggtttgcctctttcctctgttcttcttactttgtatttaaaaatcttgataggttgaggacgatgatgtaattagagcactttcatttcttttaaaacaggtttttaagaggggcatcgacagagatatggctgtgcttatggctgcaagagctgcacgtttagagaaccaagatgctattgatactgcaattgtttcgatgttgtcagacccgaaagaggtattaattaaagactcaactttcaagtaaacaagattcagttactttcaaaggtataaacattgtgatgtattgatctgatactttgtcttcaggcacgtgccgggattaaagaactccattttcttccattcagtccagctaatagaagaactgcactaacgtacctagacggagaaggcaaaatgcaccgagtgagcaaaggcgcgcctgaagaggttataacctttgctgtcaactttctttataaatagctattactacattactttaagtttacccactgtttcctaagatattgttctgatgatttgtccttctctagattttggatatggcccacaacaaattagaaatcaaggagaaagtacatgctacaatcgacaaatttgcagaacgtggcctaagatcgcttgggttggcatatcaggtaattatgttttaaatgtggcacttgttttaaatgggataactcctacgattccattgtaacgatcccttttccaataataggaagtaccagatggtgatgttaaaggtgaaggtggtccatgggactttgtagctcttcttcctctgtttgatcctcctcgtcatgacagtgcacagacaattgagcgagcacttcatcttggagtcagtgttaaaatgatcacaggtaaagagccagtctttagctcctttccgccatatcattaggtcctactccaccttggattcttgtgtattcataaaatgtcaaaaatctcaatacttgcaggtgaccagcttgcaattgccaaagaaacaggaagaaggcttggaatgggcacaaacatgtacccatcttcatctttgctttctgataacaacactgaaggagtttctgtcgatgaacttatcgagaacgcagatggttttgcaggagtctttcctggtaatgctacttacttgtaaacttcatttgtaactatgatctttgagagatatctgacattgacaaccccctttttctgatttttagagcataagtatgagattgtgaagagattacaatcccgaaaacacatatgtggtatgactggtgatggagtgaatgacgcacctgccttgaagaaagctgatattggaattgctgtggatgatgccactgatgctgctcggggtgcttctgatattgtcttaacagaacctggacttagtgttatcatcagtgctgtcttgactagccgtgcaattttccagagaatgaaaaattacacggtacataaatgcttctgcctcattggctattacctgataaagtttaaattgaatgcttatattgaatttttttggtttaccttcattttgcagatatatgctgtttctatcactatacgtattgtcgtaagtttctcagtcgaaattgcatcagattttcacaaatacttggtcttattttctatacctttgtgttacagatgggtttcatgcttctatgtgtcttctgggagtttgacttccctccattcatggttcttgtaattgcaatccttaacgatggttagtaactgttaactccctcgatgatttagcttacggcttttgctggtgcttgaagcattcaccctgctaaatttgctttcctgttgaaaaggtactataatgaccatatccaaggacagagtcaagccttctccaactccagattgttggaaactcaaagaaatttttgctactggtgttgtgcttggagcttacttggcgatcatgactgttgtgtttttctgggcagcatacgaaaccaacttcttccatgtaagctacacactatccctctccttgtttactctaatttcaactgtcagcaaaatataactatacttttttcccttttgtggtagaacattttccatgtgagaaacttcaaccagcaccatttcaaaatgaaagacaagaaagtggctgcacatttgaatgaacagatggcttccgcggtctaccttcaagtcagcacgatcagccaagcgttgatcttcgtgacccgttccaggagctggtcatttgttgagcgtcccggttttcttcttgtaattgctttcctaatagctcagctggtaaagagatttccgtcacctatctcattattttccttagttacttacctctttgtttatagtttgttaatagaatccaactctgtattattttgataggttgcatcggtgatatcggcaatggcaaattggccttttgctggaatcagaagcattggatggggttggactggagttatctggatattcaacatagtaacttacatgttacttgatcctatcaaattcctagtccgttatgctctaagtggcaaatcatgggaccgaatggtcgaggggagggtacgtagaccaaaaaaaagacagaatcacttaactctaaattcggtacttcacaattacgttggcctaactagaactcgtgatttgtttgcagactgcactcacaggaaagaagaattttggccaagaagaaagaatggctgcgtgggccaccgagaagcgtacacagcacggtttagagacgggtcaaaagccagtttatgagagaaatagcgcaacggaacttaacaatatggctgaggaagctaaaaggcgtgcagaaattgcaaggttagttttttttttatattagagatcgttagtctctgtcatgtttgagagatgatctcatttctagtatgctgatgaattttgcagaatgagagagcttcagacattgaaggggaaggttgaatcagctgcaaagctgaaaggctatgatcttgaggatcctaacagcaacaactacacaatctgagacagtctcaatctctgcttagttcattttgtcttttattttcgatgtattattattaattcttcttgatatattgacattagttttgatatctttgtggaagatgtctcacatgttgtaatctttcaattgatgcctgtaactttcttactttttatttgatgaaaattcttatttgattggttttgttcggttctttactgaaataaaaccaaaccgagtcaaaccaaactagactaaaccgtctgaacacaactcgaaccaaactaactatggttgaggacactcgaaccaaactaactatggttgaggtccgctagagttttattacaaccgaattaaccgaaccgaaaataaaccgaaatgcaccccctaactacacctaacgcaaaagaatatactccacagagatgtttgtttttttaaccagaccggtttaaatttgtttcttttcagatagaacagaagtatccaagtcttttaaagttttaattctcgcaaaccaacaattactgtttgactaattacttctcacgcgccaaattcgcacgtgtaagacaacccaactaaaagttaactaactcacaagtgcgtgctccacacgtgcctatctgttgataagaatgccacaattttcatctcatattctcattgaacaaaaataataaattctcagtgatccttcgagagattgattataaaatccggtcggcgacgagacttactttcgccgcaaaatttgttctccggtaccggatatttacgtatctgttctcaaattttaccattcccaccactaaaaccctagattaaaagcttcaattaccggaaaaagtctctacttaagagatttatctgtttgttgtcttaaatcacaggaagagaatggattttcttaaggcaacgattatagttgccctaatttgcaatttcgcctcactggcgtcttctgttcctttcatagttctgcatggtaatttgcaatctgatttttttcccttttctccttttttgcccttttgagtcagcaacaatcatgttcttatttgtaaaagtatcaatcttggaattttactgaagattagtttagctttagaaagtgtccttcttggaattcccaaatctctggaaaaagtaaagagaagattgtgtcttactttctcaggaattggggataaatgcagtaatgcaggagtgacacaattcacagagcttttaagcgattggtctggttctcaaggatattgcttgtatgtctattatctcctctttatacaactagcatattcaaatatggcttaaatttggtattaatccattattgtgtaaatttcagggagattgggaatggctcatgggactcatggactatgcctctccttgatcaggtactgatgtcacatgttggaagaatgaaaattgtatgagtttataccggaaaaagaaactgactgttggtctcatttttgtgtgtttttgcagacatcagttgtttgtgagaaggtcagacttaaactactatcatcaagtgtttaccaaatttggcttttaaaagttcattatcgttagatatatgtttaataccacaggtgaaaagtatgccagagcttagtgacggttacagcattgtggggctttctcagggtaacatgattggtcgagctctcattgagttttgcgatggagcaccacctgtaagttcccacaaacgtccatatgcctatgtgtatgtatgtttttatgcttttattctagcttgttcaatcttatctattcctctgatgtttatggcggttaataggttaagagttttgtttcggtagcgggtcctcatgctggcactgcatcgattccgttctgtggtgtaagtaactaactccctccaaaaaagttggtttcttctatattgacaagggaatttttttaaatatattttctcgattttgcaggctacctggatttgcatcatgttggacagtatgatcaaagcagagatctatagcgactatatgcaggtactatgttcatgagtattttaccacttctgcgcaattttctgttacggggatcaaacttagtacatctgtttgagtttcaggaacatttggctcctagcggttttctcaaaatcccaactgtaagtatttttggttaaaggttcaaaagtttcgacttttcattcttgttgtaacttaatgttttttcataggacatagcgggttacatggaaggctgtaggtttctcccaaagctaaacaacgaacttccagtcaaaaactcgacttataaggagaggttctcgagtttggagaatcttgtgcttattatggtcagtcatcgaaccaacttctctgcgtaacttataagtttctttttgatggtaacgttttatttttgatcgaatatcagtttgagcatgacacaatattgatacctaaagaaacctcatggtttggatattatcctgatgggtctttcaagaccattcttccgccgcaagaggtaactttaacccttcaatcattgtttctaaatggctcaatattgcagatacattgagttgtagtaaatgtttggatttttttcctattgtagaccaagctatatactgaagactggattggtttgagaaccttagatgaagctggaaaagtgaagttcgttaacgtctctggaaatcatcttcagatatctcatacagacatgaagaagcatatagtgccatacctctgtgataaatcatcgtcgtcatcatccacaacaatggcagtttccggatcatcttcctcacaccagtggcttccaagtgtagggaacattattatggatcttattggtccagaagtggatcagcttcagcttgtgctacgtcatgtgtaaatctgatgtcctgtgttgttgtttgttctcttactaaacacgatcgtctcgtgatatgtttgtaacttgaagataaaacaagaaaactgttccaaaatccctctcaaaaaagttcttatagtcattgataaaatgtcaaatatatgtcacaagaaatggacagagccttataaagggatgatgaagaacaccattgatccttaaggtctgttattacagaaaatctcagaacgagacaaagaaacataagtccacatatatatattacaacagcattctgtcttcaatccgaatcaaacatcttctgaggcaaattctgattctttgcagcatgagcctgattctttacttgtcttgacttgtatagtttgagagatgcagaggtatctagcactatggttggctaagaaaaaggctcaaatcctattataagatactttcattccttcaggagattctgcctgctgatgctctagattgcgaagcacaattttcataaagatcttggcttcacgaggcatactcgcagctgcagctgcagaacgcaagcctcttgcttctccagcattctgcatcaagcttgcgtgatgcattgcgtgacggctttcaggtattgtaaactgtcatttcatcggttagtactaaaatgcaattgattaaagcgtgcacaaaaaaacaaattgcttcccacacataaaaagtacctgaagaagtgcaaaagctgcacaagctctgagtacaagacaagggtttcgcaacattgtaacaaatcttccaatttcggaaccactgcatctcaagtggccagcttctgggattcgagctctctccgagacttgtgctaacatagatggagcagatgataaagcaccagttgagaagatttggtgttccatgaaagttttaatgaaggctttaatttgatcaagagccattgttctagcaccatttaaggtaacacttttagatgtactttccaatgaagtccctatcatcgcgtattcatccatcctgttataatagatagataagatcaaagtcagatctgcaaattaccttaaatgtggatatgattacagtaattaagttttacgtaccttccatcaaacatgtatgccaatgctaatgcagccataaaacgagccattttggaaacagaagacgaacagagctgaacaagtgctacaactcccccttcctccacaatccgcagagcgttaccaggattaaaagaaagattccacagagctcctgcagcagtttcatgtacatcctggaaaaaagcaaaagctgcatcagattaacccaaaagagtgggatgtgagaacttataacgaaacaaattgtttacctcagcttcagatcgtacaagagcaattagaggcggaataccaccttcatggccaattgcaatgctgatagaaaaatatcaagaaaaaaaacaaaaatggaaagattgtcattaaggttttacgtataatcatgttagcattgatatatatgcacgcatgcagtaacaaataaataaataaattcaacgggttgcacctgtttgcttctgagacagatagtccccagagagcaccagctactctctcttgtagacccgttgatgcatttgaagaggacttcgcaagtgccacctaattttataatcagaaacatgtataagttgtctgaaggtgaagctgaaacacataaaatgaaataaggaaaaataaaggaaatcacaataccaaggcttcaacaccaccaaatgcagcaatggattctcgattcttgtcatcaaatgctaaattccaaagagccccagcagcttcctgtttaacaccttcatgaggtgattgcgtaagctgaacaagagcttccaatgcaccagcctcttgtccaacagcagcattattaccgttgctatcaccatgagcagctagattagccaaagcacgagccgcctgaaataagacaatttgtcacaaactcagttcacacactcactgccatccggaactcaaaatactacaagcatcgaatcaataaaaaaataaaaatgaggtgcattcgaaaacaaggaaatacctgttcttgtgctccttcatacttgcaattccgagctagcatcaccaaggcatgcacacctcctgctcttgcaacttccatgctgcatttatcgtctgctgctaaatttgctaatgccccagcagcacgttcctaattaccaaaaaagtgtagatttctccgttttagaaagaacaaatatagagaaaaataacactaaaaacagtgttggataccacgaaaatcgaattaccaaatctagcaaaattcttgtattttacgaccgagataccttgtctctacaacttcataataattattaaatctaaaaccctaatacaaaaggataaactagattgtactagttttgataatcaatctttcagatgataatacttagccagaagtgttaattttggatatttccaaatgaaaagtgtgaggctttaaagatggcaagcgtgtaccagaactccatcacaaccatgtggccatctaaagataagatcaactaacgcattcactcctccagcttgagcaatcgcgttctaatagaaaaaaaataaaaataagaaacaacaatgtcagtgaaagagcaaaaggttcaatgtgtgtttaaaactttacaaggggaccgtaccttatgctcttctccaacagagagattccatagcccaccagcagcttcttcagccacaagtctattcatagactttgccaaatcagcaagaacactgatccctccttcttcagcaacagcctttgcaactttagcatttaccgacaagtttgcaatagcctttgcagcttctgactgaagaccttctcgccaagatttagcaagttctagaagaagacggatccctccatctcgcataacagcttcggctcttccacagtctatgctagcattctcatcatcaacaacgatgaaagttgcaagtcctgtggctgctctctcttggacatcctcttgtgcgctttgcattaaactgagaagcaacgtagctccctgattcagccagaaatcgtttaatccttgtgaattgctgctctctgcaattcgtagaagtgtatgagaaatgatccactcaatccaaagcattatttcgtcaatgcttttatcctttcttatcaaatctctccagtaagaaaatatattctttggtttctttgagttatcggcaaatatagaagctagctcatcaaaagtatcagtaaacacagcaagcaagacctttcctttgaatctattggagctgtaacttttatcctcttcgagataagggcagtttaaagcacacaagactttcaagctctgcgatgatttcaacaacctggacacagcaatatggtcaatggtggttcttgagacatccaaaccgattaattttggaagcttctcccaattttctaatgcaactttccactttatgtttgatgtcccagcaacagagaggtagcgaagagataccacttttcccaatgcttcttcgttgatgttcaggcaatctaagaatccaagatcactgagctgtgggcaatgtttggccaaagattcaattgcctcagaactaacatctctcatgccagaaacccgtagcttctttagtttcggacagcaaaaggctataactcttatagcatcactagtgatcctctcacagaaatctggtccaagttggaggctctcaagagcttcatggcgtgccgcaatcatagacaatgtagcatctgtaatcttcctacaatagtcgccgctaatttcaagcagactccttgctttgagatgaattatggcatcagcagagtcaacaccacgaaacctaatcttctgaagatcaacacacctagttgcaagagaagctgccattgaaagatcaaatttgtgggctcgaagatccaatgaactccacaaaaaagaagaagcaccaaggcttctccatgtcctacaggtcgaggctaagctagctctatcgcgataattcaatcgagtaaacaaatgaaacactgtgtcataaggcaaactagtccaattcacatactgttgaaccttaggtgctaaatcctcaactccaatcacagtataacttggtgaatcaaccttatactttccattatcctccactctctgcctcaccctacgactcatatcttgatcagatataaatacacactctaacgagtaatcaatcccttgcagctaccaaaattaaagcactctgtttataaagaccataatgataaaataaacgcagatcctactccacctagaagaaaatccaaacctgcagaacaagaagaaacaataagatcaaacaagtccccaatttggaaaatttagatactcaatggctccaaaactaaaatcccatagcagataaaagagaaatcaaattcaacaaacagaaagaactgaggaatgctctcgccggattctgagaagaaaaaccctcgaacagaaaagcgaggagagacttaaacaaatctctgacctttactatgcaaattcaattcagacaaactccattggaaataacaattgaaagagtgatgatggtcggagagaattcagacgagcccacagagaaactgttgtgacacgaaaaaaaaaagggcaaaagagcttaaagtaatcacctttggagaaaaaaggaagaactttatcttccctgattccgagagacagagaaaggaggaagaattagaggaattgggcaatgaaggtaaagagagagagacgagaagggcggatgttgaaaccacagctcatataggcattgtaattgtaacaaagagcttcaatcacctcctttgcacggtacattatatattacccaattaccattcctcttttcttctcttttttaaatcctaacttttatttttgtcattttttaaaaaacaatttgataaataattattgttctaaccagtgttctaaattacgataaacgtttttcttgtgatatattagtatgtaaataattcacgatgacttgttatgaaaactacttgattagtattaacagaatttttgcacatttatatgtatattatattaaaatttatttgaattatagttgaaaatataacaaatttaacggataatccgtaaaatttagcgtgtttatattgagatacagaaaagtggtgtatcatatctttctttcttttagttagtcattttattttttatcaataattttaaaatgttatatactttaaatcttttggctaaacataattaattataagtttattttatatagacaattaataggtttctgaaaaattggaactaataacgcatatcataaacataggggtaacatttgtgtcttatgcctttaattaaaatgactttataatgttttctgaaattatttaagactaattgttttttagtagaaatagcaaatatcataagccagtgcatttgtgttatatgccaaagatggctgtttttctttataagttaggatttgattccaaatttaaacttgtactaaaacagcaattgtaccaaatcatttaaagtcccattgctttttgttttctttctctctttacataagagtaaataaataataaattaaaaaggctgaaccaatattttttgagtcttttaagtaacaaaatctaaaacttaaacaaaaaccaaaatttaaaagctgagtaagatttgcgtatttttggtaaaagccaatcagaaagaaaagggcccattatttgctatttacaaacagtctttttgtgtataccgaactttatcttagtggtaaaattttgaagtcttcaatcttctattttggattcatgtgtttatatttcgtcaatcacattagtaaaacttttccagatacgcaacaaagagcttaaagtaaacagatattgtcccatccaaaattgtatgtaaagttctgcaggttctggagatcaaaaaaactataataaaactgcctgctatataaactttaatagagatcagaaaaatgatgtcaagctacacaaccatgaaagcttttctcttcagcgttttctatcggcgcgccatttgtataccgctttaccatttggattgagcagctcgtcatcacgcagcttccgtttgcgaccctttttctgtccattaaaagagtttaatcagagatggtctagttgcataccaagaaacagtaatgtgttcgggggactgatgataacctgtaactccttctgcattgacatatccgtgtataacttctccaaatctttagccctgctcttccgcccctcgaggtctctataggacctatccattttcctgttttaagaaaatagaatacaatgactattgattgtccgtttgatacctttgaaaacatctaattcatttcagatacatactttttaatatctttcggaatctctactgtagagatatcacttttgcttctaccttgtacctccagttctctagcctcctctctgataaaggaacaacagagttaaaaaagaagattataagaaaacacaaacaatgtggtaccggtaatgtcttttaaatgttaaggtaaggaggatcaaattttgcagtgtccatatgacacattcaaaatgaatgagaaaatcacgaaagctacaccaagtaaagaaaggactaaaagttgggattaacctgtcttctgcatagtaaacatgtctacggcttgactgatccccagtacattgcagcgatgcagtcagcttgtcaattttctacaaaagataagaaggaacaaagagaaaaactggataaatatgatcgtaagcagaaagctcttggggtgtgtatgaggaaagataacttacgtttttctcactctgccatttttggaacacatatccaatatcttgagtcttcataatcataagctcttccgcagagtatttatttacctcatctctgaaaacaataactttgtcaaaatttacaaaccaagaagaaaacgagaaaccatgagaatagcaaaagagataatagtgaaaagcaaaaagaagaaaacgaagagtttcgatatgcttactttggtctatgacgtccatcaactgttttactattaatcatcttaaagttgaattc

SEQ ID NO: 1374 - DNA, 103787 bp, Arabidopsis thaliana
aagctttgaagggctaacgggtgatgctttggtgaaggttttttctggtccaggtttgtgcttattttgcattgcttctctttgattcacgtctgcataaacatcaaataattcatttatgtttgagttgattatgtagaaaaaattattaggggagatgctttatgataagaaaaaaaagtggtcttgtggtatcttaaggcagaaggaaaatatttagtgtcttaatgagtaatagatttatctgtctatccagattttataactgagttttagtaacttccggctcaagcaaaaaggaagttcgatatgacggacatagaagctctcaaggctatcaccacggagagcattgatctggtatgtacttttatacctcaccactttttttttgcagatgattgcttctgatagcttttatgtcaaatatgaacaaatgcaatttctcatggatcgttgcaggaaaatgttcccgttgaagaggtttttcaacatctcaaatgcacgaaagaaggattgacctccaatgaagtgcaggagcgacttaccttgtttggttacaacaaacttgaggagaaaaaggttttaaaaaatgatttttcaatcttgcattgatctcttattttctctctatggatggtatgttgatctctctttctatttggttctgcaggagagtaagatactcaagttcttgggattcatgtggaatccactttcatgggtcatggaagctgcagccctcatggccattggtcttgcacatggaggagtacgtcttttgttccctctcattagtcgtttctttccacaatatgtaaatacgtaaaattgtgaaaggtatagcttaacatagaattttaaaacaattttgagagtctgaagaaactaatttgtctcaactcttcagggaaagccagcggattatcacgatttcgtgggtattgtggtcttacttttgataaactcgacaatcagttttgtagaagaaaacaatgctggaaatgcagctgctgctctcatggctcagttagcccctaaagcgaaggtttaaatttattccttttagttgcgctcatttaaatttgatggtagtagcttatttacaaatcaattgttttaggccgtccgcgatggcaaatggaatgagatagatgcagctgagttggttccaggagatatagttagtatcaaacttggagatatcattcctgctgatgctcgtcttcttgaaggagaccctttaaagattgaccaggcaagttctacttctaatattggtttatcattgctctgtatcttatctctcccttgactaatcttggttatttatcttttcctcagtcagcacttacaggtgaatctcttccggtaaccaaaaatcctggtgcttcagtgtactctggttcaacttgcaagcaaggtgaaattgaagcagttgttatagcgactggtgtccacactttctttggaaaggcggctcatcttgtggatagtactacgcatgtcggtcacttccagaaggtttgttctcactttggagtaaaatataaaagtttacaaagattttggagtcaatgactaaatttaatctttgtatattggtttccaggttttgacagcaataggaaatttctgtatctgctcgattgcagtaggaatggcaattgaaatcgttgttatatacggtcttcaaaagagagggtaccgtgttggtattgataaccttcttgttttattgattggtgggatccccattgcaatgcctactgttctctctgttacaatggcaattggtgctcatcgcttggctcaacaggtcaatacaagtcttaagacagagtcagttaacttttgttgatttgtgtttctttataaatgactttaaaatccatttcagggtgccataacaaagagaatgacagccattgaagaaatggcaggaatggatgttctgtgcagtgataaaacaggtactctcacgctcaacaagctttctgtggataagaatctgatcgaggtttgcctctttcctctgttcttcttactttgtatttaaaaatcttgataggttgaggacgatgatgtaattagagcactttcatttcttttaaaacaggtttttaagaggggcatcgacagagatatggctgtgcttatggctgcaagagctgcacgtttagagaaccaagatgctattgatactgcaattgtttcgatgttgtcagacccgaaagaggtattaattaaagactcaactttcaagtaaacaagattcagttactttcaaaggtataaacattgtgatgtattgatctgatactttgtcttcaggcacgtgccgggattaaagaactccattttcttccattcagtccagctaatagaagaactgcactaacgtacctagacggagaaggcaaaatgcaccgagtgagcaaaggcgcgcctgaagaggttataacctttgctgtcaactttctttataaatagctattactacattactttaagtttacccactgtttcctaagatattgttctgatgatttgtccttctctagattttggatatggcccacaacaaattagaaatcaaggagaaagtacatgctacaatcgacaaatttgcagaacgtggcctaagatcgcttgggttggcatatcaggtaattatgttttaaatgtggcacttgttttaaatgggataactcctacgattccattgtaacgatcccttttccaataataggaagtaccagatggtgatgttaaaggtgaaggtggtccatgggactttgtagctcttcttcctctgtttgatcctcctcgtcatgacagtgcacagacaattgagcgagcacttcatcttggagtcagtgttaaaatgatcacaggtaaagagccagtctttagctcctttccgccatatcattaggtcctactccaccttggattcttgtgtattcataaaatgtcaaaaatctcaatacttgcaggtgaccagcttgcaattgccaaagaaacaggaagaaggcttggaatgggcacaaacatgtacccatcttcatctttgctttctgataacaacactgaaggagtttctgtcgatgaacttatcgagaacgcagatggttttgcaggagtctttcctggtaatgctacttacttgtaaacttcatttgtaactatgatctttgagagatatctgacattgacaaccccctttttctgatttttagagcataagtatgagattgtgaagagattacaatcccgaaaacacatatgtggtatgactggtgatggagtgaatgacgcacctgccttgaagaaagctgatattggaattgctgtggatgatgccactgatgctgctcggggtgcttctgatattgtcttaacagaacctggacttagtgttatcatcagtgctgtcttgactagccgtgcaattttccagagaatgaaaaattacacggtacataaatgcttctgcctcattggctattacctgataaagtttaaattgaatgcttatattgaatttttttggtttaccttcattttgcagatatatgctgtttctatcactatacgtattgtcgtaagtttctcagtcgaaattgcatcagattttcacaaatacttggtcttattttctatacctttgtgttacagatgggtttcatgcttctatgtgtcttctgggagtttgacttccctccattcatggttcttgtaattgcaatccttaacgatggttagtaactgttaactccctcgatgatttagcttacggcttttgctggtgcttgaagcattcaccctgctaaatttgctttcctgttgaaaaggtactataatgaccatatccaaggacagagtcaagccttctccaactccagattgttggaaactcaaagaaatttttgctactggtgttgtgcttggagcttacttggcgatcatgactgttgtgtttttctgggcagcatacgaaaccaacttcttccatgtaagctacacactatccctctccttgtttactctaatttcaactgtcagcaaaatataactatacttttttcccttttgtggtagaacattttccatgtgagaaacttcaaccagcaccatttcaaaatgaaagacaagaaagtggctgcacatttgaatgaacagatggcttccgcggtctaccttcaagtcagcacgatcagccaagcgttgatcttcgtgacccgttccaggagctggtcatttgttgagcgtcccggttttcttcttgtaattgctttcctaatagctcagctggtaaagagatttccgtcacctatctcattattttccttagttacttacctctttgtttatagtttgttaatagaatccaactctgtattattttgataggttgcatcggtgatatcggcaatggcaaattggccttttgctggaatcagaagcattggatggggttggactggagttatctggatattcaacatagtaacttacatgttacttgatcctatcaaattcctagtccgttatgctctaagtggcaaatcatgggaccgaatggtcgaggggagggtacgtagaccaaaaaaaagacagaatcacttaactctaaattcggtacttcacaattacgttggcctaactagaactcgtgatttgtttgcagactgcactcacaggaaagaagaattttggccaagaagaaagaatggctgcgtgggccaccgagaagcgtacacagcacggtttagagacgggtcaaaagccagtttatgagagaaatagcgcaacggaacttaacaatatggctgaggaagctaaaaggcgtgcagaaattgcaaggttagttttttttttatattagagatcgttagtctctgtcatgtttgagagatgatctcatttctagtatgctgatgaattttgcagaatgagagagcttcagacattgaaggggaaggttgaatcagctgcaaagctgaaaggctatgatcttgaggatcctaacagcaacaactacacaatctgagacagtctcaatctctgcttagttcattttgtcttttattttcgatgtattattattaattcttcttgatatattgacattagttttgatatctttgtggaagatgtctcacatgttgtaatctttcaattgatgcctgtaactttcttactttttatttgatgaaaattcttatttgattggttttgttcggttctttactgaaataaaaccaaaccgagtcaaaccaaactagactaaaccgtctgaacacaactcgaaccaaactaactatggttgaggacactcgaaccaaactaactatggttgaggtccgctagagttttattacaaccgaattaaccgaaccgaaaataaaccgaaatgcaccccctaactacacctaacgcaaaagaatatactccacagagatgtttgtttttttaaccagaccggtttaaatttgtttcttttcagatagaacagaagtatccaagtcttttaaagttttaattctcgcaaaccaacaattactgtttgactaattacttctcacgcgccaaattcgcacgtgtaagacaacccaactaaaagttaactaactcacaagtgcgtgctccacacgtgcctatctgttgataagaatgccacaattttcatctcatattctcattgaacaaaaataataaattctcagtgatccttcgagagattgattataaaatccggtcggcgacgagacttactttcgccgcaaaatttgttctccggtaccggatatttacgtatctgttctcaaattttaccattcccaccactaaaaccctagattaaaagcttcaattaccggaaaaagtctctacttaagagatttatctgtttgttgtcttaaatcacaggaagagaatggattttcttaaggcaacgattatagttgccctaatttgcaatttcgcctcactggcgtcttctgttcctttcatagttctgcatggtaatttgcaatctgatttttttcccttttctccttttttgcccttttgagtcagcaacaatcatgttcttatttgtaaaagtatcaatcttggaattttactgaagattagtttagctttagaaagtgtccttcttggaattcccaaatctctggaaaaagtaaagagaagattgtgtcttactttctcaggaattggggataaatgcagtaatgcaggagtgacacaattcacagagcttttaagcgattggtctggttctcaaggatattgcttgtatgtctattatctcctctttatacaactagcatattcaaatatggcttaaatttggtattaatccattattgtgtaaatttcagggagattgggaatggctcatgggactcatggactatgcctctccttgatcaggtactgatgtcacatgttggaagaatgaaaattgtatgagtttataccggaaaaagaaactgactgttggtctcatttttgtgtgtttttgcagacatcagttgtttgtgagaaggtcagacttaaactactatcatcaagtgtttaccaaatttggcttttaaaagttcattatcgttagatatatgtttaataccacaggtgaaaagtatgccagagcttagtgacggttacagcattgtggggctttctcagggtaacatgattggtcgagctctcattgagttttgcgatggagcaccacctgtaagttcccacaaacgtccatatgcctatgtgtatgtatgtttttatgcttttattctagcttgttcaatcttatctattcctctgatgtttatggcggttaataggttaagagttttgtttcggtagcgggtcctcatgctggcactgcatcgattccgttctgtggtgtaagtaactaactccctccaaaaaagttggtttcttctatattgacaagggaatttttttaaatatattttctcgattttgcaggctacctggatttgcatcatgttggacagtatgatcaaagcagagatctatagcgactatatgcaggtactatgttcatgagtattttaccacttctgcgcaattttctgttacggggatcaaacttagtacatctgtttgagtttcaggaacatttggctcctagcggttttctcaaaatcccaactgtaagtatttttggttaaaggttcaaaagtttcgacttttcattcttgttgtaacttaatgttttttcataggacatagcgggttacatggaaggctgtaggtttctcccaaagctaaacaacgaacttccagtcaaaaactcgacttataaggagaggttctcgagtttggagaatcttgtgcttattatggtcagtcatcgaaccaacttctctgcgtaacttataagtttctttttgatggtaacgttttatttttgatcgaatatcagtttgagcatgacacaatattgatacctaaagaaacctcatggtttggatattatcctgatgggtctttcaagaccattcttccgccgcaagaggtaactttaacccttcaatcattgtttctaaatggctcaatattgcagatacattgagttgtagtaaatgtttggatttttttcctattgtagaccaagctatatactgaagactggattggtttgagaaccttagatgaagctggaaaagtgaagttcgttaacgtctctggaaatcatcttcagatatctcatacagacatgaagaagcatatagtgccatacctctgtgataaatcatcgtcgtcatcatccacaacaatggcagtttccggatcatcttcctcacaccagtggcttccaagtgtagggaacattattatggatcttattggtccagaagtggatcagcttcagcttgtgctacgtcatgtgtaaatctgatgtcctgtgttgttgtttgttctcttactaaacacgatcgtctcgtgatatgtttgtaacttgaagataaaacaagaaaactgttccaaaatccctctcaaaaaagttcttatagtcattgataaaatgtcaaatatatgtcacaagaaatggacagagccttataaagggatgatgaagaacaccattgatccttaaggtctgttattacagaaaatctcagaacgagacaaagaaacataagtccacatatatatattacaacagcattctgtcttcaatccgaatcaaacatcttctgaggcaaattctgattctttgcagcatgagcctgattctttacttgtcttgacttgtatagtttgagagatgcagaggtatctagcactatggttggctaagaaaaaggctcaaatcctattataagatactttcattccttcaggagattctgcctgctgatgctctagattgcgaagcacaattttcataaagatcttggcttcacgaggcatactcgcagctgcagctgcagaacgcaagcctcttgcttctccagcattctgcatcaagcttgcgtgatgcattgcgtgacggctttcaggtattgtaaactgtcatttcatcggttagtactaaaatgcaattgattaaagcgtgcacaaaaaaacaaattgcttcccacacataaaaagtacctgaagaagtgcaaaagctgcacaagctctgagtacaagacaagggtttcgcaacattgtaacaaatcttccaatttcggaaccactgcatctcaagtggccagcttctgggattcgagctctctccgagacttgtgctaacatagatggagcagatgataaagcaccagttgagaagatttggtgttccatgaaagttttaatgaaggctttaatttgatcaagagccattgttctagcaccatttaaggtaacacttttagatgtactttccaatgaagtccctatcatcgcgtattcatccatcctgttataatagatagataagatcaaagtcagatctgcaaattaccttaaatgtggatatgattacagtaattaagttttacgtaccttccatcaaacatgtatgccaatgctaatgcagccataaaacgagccattttggaaacagaagacgaacagagctgaacaagtgctacaactcccccttcctccacaatccgcagagcgttaccaggattaaaagaaagattccacagagctcctgcagcagtttcatgtacatcctggaaaaaagcaaaagctgcatcagattaacccaaaagagtgggatgtgagaacttataacgaaacaaattgtttacctcagcttcagatcgtacaagagcaattagaggcggaataccaccttcatggccaattgcaatgctgatagaaaaatatcaagaaaaaaaacaaaaatggaaagattgtcattaaggttttacgtataatcatgttagcattgatatatatgcacgcatgcagtaacaaataaataaataaattcaacgggttgcacctgtttgcttctgagacagatagtccccagagagcaccagctactctctcttgtagacccgttgatgcatttgaagaggacttcgcaagtgccacctaattttataatcagaaacatgtataagttgtctgaaggtgaagctgaaacacataaaatgaaataaggaaaaataaaggaaatcacaataccaaggcttcaacaccaccaaatgcagcaatggattctcgattcttgtcatcaaatgctaaattccaaagagccccagcagcttcctgtttaacaccttcatgaggtgattgcgtaagctgaacaagagcttccaatgcaccagcctcttgtccaacagcagcattattaccgttgctatcaccatgagcagctagattagccaaagcacgagccgcctgaaataagacaatttgtcacaaactcagttcacacactcactgccatccggaactcaaaatactacaagcatcgaatcaataaaaaaataaaaatgaggtgcattcgaaaacaaggaaatacctgttcttgtgctccttcatacttgcaattccgagctagcatcaccaaggcatgcacacctcctgctcttgcaacttccatgctgcatttatcgtctgctgctaaatttgctaatgccccagcagcacgttcctaattaccaaaaaagtgtagatttctccgttttagaaagaacaaatatagagaaaaataacactaaaaacagtgttggataccacgaaaatcgaattaccaaatctagcaaaattcttgtattttacgaccgagataccttgtctctacaacttcataataattattaaatctaaaaccctaatacaaaaggataaactagattgtactagttttgataatcaatctttcagatgataatacttagccagaagtgttaattttggatatttccaaatgaaaagtgtgaggctttaaagatggcaagcgtgtaccagaactccatcacaaccatgtggccatctaaagataagatcaactaacgcattcactcctccagcttgagcaatcgcgttctaatagaaaaaaaataaaaataagaaacaacaatgtcagtgaaagagcaaaaggttcaatgtgtgtttaaaactttacaaggggaccgtaccttatgctcttctccaacagagagattccatagcccaccagcagcttcttcagccacaagtctattcatagactttgccaaatcagcaagaacactgatccctccttcttcagcaacagcctttgcaactttagcatttaccgacaagtttgcaatagcctttgcagcttctgactgaagaccttctcgccaagatttagcaagttctagaagaagacggatccctccatctcgcataacagcttcggctcttccacagtctatgctagcattctcatcatcaacaacgatgaaagttgcaagtcctgtggctgctctctcttggacatcctcttgtgcgctttgcattaaactgagaagcaacgtagctccctgattcagccagaaatcgtttaatccttgtgaattgctgctctctgcaattcgtagaagtgtatgagaaatgatccactcaatccaaagcattatttcgtcaatgcttttatcctttcttatcaaatctctccagtaagaaaatatattctttggtttctttgagttatcggcaaatatagaagctagctcatcaaaagtatcagtaaacacagcaagcaagacctttcctttgaatctattggagctgtaacttttatcctcttcgagataagggcagtttaaagcacacaagactttcaagctctgcgatgatttcaacaacctggacacagcaatatggtcaatggtggttcttgagacatccaaaccgattaattttggaagcttctcccaattttctaatgcaactttccactttatgtttgatgtcccagcaacagagaggtagcgaagagataccacttttcccaatgcttcttcgttgatgttcaggcaatctaagaatccaagatcactgagctgtgggcaatgtttggccaaagattcaattgcctcagaactaacatctctcatgccagaaacccgtagcttctttagtttcggacagcaaaaggctataactcttatagcatcactagtgatcctctcacagaaatctggtccaagttggaggctctcaagagcttcatggcgtgccgcaatcatagacaatgtagcatctgtaatcttcctacaatagtcgccgctaatttcaagcagactccttgctttgagatgaattatggcatcagcagagtcaacaccacgaaacctaatcttctgaagatcaacacacctagttgcaagagaagctgccattgaaagatcaaatttgtgggctcgaagatccaatgaactccacaaaaaagaagaagcaccaaggcttctccatgtcctacaggtcgaggctaagctagctctatcgcgataattcaatcgagtaaacaaatgaaacactgtgtcataaggcaaactagtccaattcacatactgttgaaccttaggtgctaaatcctcaactccaatcacagtataacttggtgaatcaaccttatactttccattatcctccactctctgcctcaccctacgactcatatcttgatcagatataaatacacactctaacgagtaatcaatcccttgcagctaccaaaattaaagcactctgtttataaagaccataatgataaaataaacgcagatcctactccacctagaagaaaatccaaacctgcagaacaagaagaaacaataagatcaaacaagtccccaatttggaaaatttagatactcaatggctccaaaactaaaatcccatagcagataaaagagaaatcaaattcaacaaacagaaagaactgaggaatgctctcgccggattctgagaagaaaaaccctcgaacagaaaagcgaggagagacttaaacaaatctctgacctttactatgcaaattcaattcagacaaactccattggaaataacaattgaaagagtgatgatggtcggagagaattcagacgagcccacagagaaactgttgtgacacgaaaaaaaaaagggcaaaagagcttaaagtaatcacctttggagaaaaaaggaagaactttatcttccctgattccgagagacagagaaaggaggaagaattagaggaattgggcaatgaaggtaaagagagagagacgagaagggcggatgttgaaaccacagctcatataggcattgtaattgtaacaaagagcttcaatcacctcctttgcacggtacattatatattacccaattaccattcctcttttcttctcttttttaaatcctaacttttatttttgtcattttttaaaaaacaatttgataaataattattgttctaaccagtgttctaaattacgataaacgtttttcttgtgatatattagtatgtaaataattcacgatgacttgttatgaaaactacttgattagtattaacagaatttttgcacatttatatgtatattatattaaaatttatttgaattatagttgaaaatataacaaatttaacggataatccgtaaaatttagcgtgtttatattgagatacagaaaagtggtgtatcatatctttctttcttttagttagtcattttattttttatcaataattttaaaatgttatatactttaaatcttttggctaaacataattaattataagtttattttatatagacaattaataggtttctgaaaaattggaactaataacgcatatcataaacataggggtaacatttgtgtcttatgcctttaattaaaatgactttataatgttttctgaaattatttaagactaattgttttttagtagaaatagcaaatatcataagccagtgcatttgtgttatatgccaaagatggctgtttttctttataagttaggatttgattccaaatttaaacttgtactaaaacagcaattgtaccaaatcatttaaagtcccattgctttttgttttctttctctctttacataagagtaaataaataataaattaaaaaggctgaaccaatattttttgagtcttttaagtaacaaaatctaaaacttaaacaaaaaccaaaatttaaaagctgagtaagatttgcgtatttttggtaaaagccaatcagaaagaaaagggcccattatttgctatttacaaacagtctttttgtgtataccgaactttatcttagtggtaaaattttgaagtcttcaatcttctattttggattcatgtgtttatatttcgtcaatcacattagtaaaacttttccagatacgcaacaaagagcttaaagtaaacagatattgtcccatccaaaattgtatgtaaagttctgcaggttctggagatcaaaaaaactataataaaactgcctgctatataaactttaatagagatcagaaaaatgatgtcaagctacacaaccatgaaagcttttctcttcagcgttttctatcggcgcgccatttgtataccgctttaccatttggattgagcagctcgtcatcacgcagcttccgtttgcgaccctttttctgtccattaaaagagtttaatcagagatggtctagttgcataccaagaaacagtaatgtgttcgggggactgatgataacctgtaactccttctgcattgacatatccgtgtataacttctccaaatctttagccctgctcttccgcccctcgaggtctctataggacctatccattttcctgttttaagaaaatagaatacaatgactattgattgtccgtttgatacctttgaaaacatctaattcatttcagatacatactttttaatatctttcggaatctctactgtagagatatcacttttgcttctaccttgtacctccagttctctagcctcctctctgataaaggaacaacagagttaaaaaagaagattataagaaaacacaaacaatgtggtaccggtaatgtcttttaaatgttaaggtaaggaggatcaaattttgcagtgtccatatgacacattcaaaatgaatgagaaaatcacgaaagctacaccaagtaaagaaaggactaaaagttgggattaacctgtcttctgcatagtaaacatgtctacggcttgactgatccccagtacattgcagcgatgcagtcagcttgtcaattttctacaaaagataagaaggaacaaagagaaaaactggataaatatgatcgtaagcagaaagctcttggggtgtgtatgaggaaagataacttacgtttttctcactctgccatttttggaacacatatccaatatcttgagtcttcataatcataagctcttccgcagagtatttatttacctcatctctgaaaacaataactttgtcaaaatttacaaaccaagaagaaaacgagaaaccatgagaatagcaaaagagataatagtgaaaagcaaaaagaagaaaacgaagagtttcgatatgcttactttggtctatgacgtccatcaactgttttactattaatcatcttaaagttgaattcatctggattcttgaatgcagccttctgcctaagtatctgcagtaaagtaaaacggtgtaagagaaactgaactcccaacgatttagtttcttagctatctcacagatatcatcaatcaatcccgtaaactaacaaatgtctacttgaaagactttattaacataatctcgacagtataatcataggagagatggaattgaaaacagagagtgtaatagttacctttaaagtttcctgctttttgtgataagcattagctcggataatataatccttatgcttctcgaggatgccaaacctcttcctcgcttccctgatgatacgtttaaaaatccaaactttaagaagagaaacgaagaaaagaacaaaaaggacacctgagagcaataatagcttacggttgagatcgctccttatgagcaggccgtggaatagcattacgcagcgacgacatgttggatttgctcttgacgctgcaatttcagtcacaaaactgtttagaattaagagagcttaaagatgatcttaagctactcgagctcatcaacttaacgaattgaaactgaaaccctaatctgaagtatgaatctaatccaacaatgcaacattctcaagtctaaacctaactatgcattcgaacagacgaaacgaaagaaaaaaagaagccaaagattctcacgtgaaatacaggggaaccctagaaattagacgacgccgagaagaaaggtgaaaagtagaagtcgccgggaacacaacaaatttcaccgatgacctgaaacttggtttctggaaaggagtagagaagtcggcgagaagaagagtttagggttttttggggataaagaaaactcaaaccgaaccttctagctgagactaagggtttagtggatacgtcgcaattactcatttaccctttttatcgttttagttgctttacttgcaaattatagtttccacacataaaatgtcttaacgtctttagatgaaaatttcgtaattaactttccaaatgtgatgagcattgcacatctaccgttccaaatttcaatgtatctttgtacaatttattatttgtttggggtgtttcataaagagtgccaaaatttggggtagaaattataaaactaacgaaacaatgcattgctttaacttgacaaacgcacagatacagagagacagaagatatcaaaaagctccaaacgcttaaaacgtgatcaacaaagcaacaaaagtaaactacgattatgaaaaaggtcgagactttacatgatctttatctgtctctctatgtaattgtgcatctctacatgaaacccacaagataaatgcctaagcaaagaataattgttctttttgtttctttgtagttctcatctgccgtgcagatttagagtattgaagattgaagaatgcaggttcattgaagcttagtgatgaccatcatttggaagttaactgcatgtgacatctgagtagaaacctattatagtcctcctctcacaattctggatactgagcaactccacgtcgaaaacttcaaattgcttcgagctgaagaaggtcgaaggtcccacctggttagagcccaatgaactttgttttgtcaaaaatatgatcgaaccaaagtgaagacagtttttacacagtacaagtctaatctacattggtttagatatgtccctaaacgagcatgctcaagctagtaattccatttgaaacattgttgatagagggatggtatattcaacggaatggctcagcaaaagtttaccactagtcaggtttacagttcagacaagtgtatacttgtaaggaacaagtaagaacactaaccggaggtcccaattctggagggattataatccttcttcgcccaccgggcttcatgtcacgaattcccatttcaaatcctgcatcatcattatccatatagtattaaaaatcttcaatatgtgtttcctgtcaaagaagattcttcattaacatcctactactaaagagccaagttaatgtcttctacttgcctggaacaagtgcattggttcccatgcggattctagcaggagaaccttgtatgtaagtactatctattcgccttccagactcattgtagccaatgtagtgaaaagtcacctgtcaaaataaccataaaactcaatgatatcttcaattctatatatccaagtaaagagcataccaattccataaatgatctaacttcagatcctaagtttaactaatctaacatagaggaagtagtacctgctgaccatcttttgggaaatcaccttgaccaacattgaaatcccgatatatgaggccagaatcagccttgatgtaattatcagaagctaataccttaacctcaaaacctgcactatatcagcaaaaacataaacacaaacaaaaggacaataagttctcatattcttcttccactcaagaatgaataatactcaaagaaacagtgaataaaagcttaaaccttctctaacaaagttaggaaactcgtcaggagcattgttctctctctgtatcctcttgttctgttctagtaaccgtctctcatcataaggactctttgatttagtcttcgcagatgaagacaacgctggtaacaacaaacacggcgaagcaactaaaacataaacaagacttctccgactcaagctgcaattaaaagaccaagctttatctccagaatcaaaccaaaaaaaggaaaaaaaattatctctcaagattgcaaattttaccattggtcttttggttcttcactcaatgaacaacataccgagcgattgctccgagataatgacagttttgtttcacctataagattttatggaacagttttggtcacttaactagtcttatggaaccagcttactgaatcgtaagatcaataagagttttgagagatagagggaagaactcacagagaaatgtaagtcttggagagagaggagttgatagaatcgtcaccattgcttctccctccggcgattcctgcaaaaatccaatgtttatcctaaagtttaattttgtagataaattacattttacaccatccattttcagtttattataatttggacccacaattccttttgttaccaatttatccgtgtggtcattggtcaaacaaagttgacgaaaactttacttgtggtcttgtggactcttaaccaacttggtatttttggacaatgactccgagcaaaatttaataaggttaaaagttcatttttattcaacaatataaacttcaaacaaagagagtgacaaccagattctcatcaacaatgccgatgaattaaaattacaatattaatacaagtaatgaggcaataaatggtggtgagtgtcatctgaattggctgtttctgaaaataccagtgcctcctcctctaggttgttcaccggatatgagtttctgcaacctaatttgttctcggaatttggctatgaactcaccggcttttctatcaacctcattatgatcatggcttgcattgctttggctttcccaagcagcttcttcctcctcttcgaaagttacttcaggttgctgctcggcctggggctcttccatagcaacctcttctggctcggatttagcgcgagtttctgaacttttctcctggtgtagtacaatcgatagttcttcttgtcgtggtcttctcgatttcgttcttcctcggctttctactttagcttctgcccgatcctcagatgaatctccatctgtctttacatctttcccatgacgatcagatcttatggtcctcacggactttcctctcagtgatacattactggaagctctccaagaacgtggttcaattcttggaccgtctaatttcatttccttgtctttaccaggaaggtcctttttcctggacttatccgaatccacagtgtcatcctctaattttctggtgacaacatccttctccggcaaagtgtcacgtccccctcgtgaagaacgcatggcgcgccttgaagctttagcatttgttggttggaacactacatcaagagcaggaaaagattcactgaccttctcatcttttgcagaatcttctgctgttagctccaaagagtcgtgactccttccctttttgaccctcagattgttatggtcagcttccactcctttcctgatattttcttcaagcaaatgacaattactcttttgctgaagatcttgtcttctagttgtggagtcatcagcaccaccaacgggagatgagatagactcaggaggataggatctgcgagacttgttccctctccgggaactttcagctgccaaattaagtgatttagatccccgttccttcttactgaagaattctgcttttctgcctctgactttactcccctccaactcattttcaaacccccgccttacatcttcctctaacaaggaaccatcactataatgccgagaatgtgacgcacgcctgggagtatcatcggttactaattctggcgaacgtctgcgagtatcattgggcactaattctggcgatggtggagatggagacagtgaaggtgatgggggcaaggatggcgaactagaccgtgatgaactctggcgactcttctccttgaccaactcttccacatttgagtttagtgactctgcggaaacagatcgagaaggagagaatctgttctgattctgggatgcataactagtttgagatgaagaagaaccagtagaccgagaagatatcgatttaagggtttcatccacagatataggctggaaatttgaaggatagttgtcaccgattcccatcatttcaggtctagcttgccatggaacaggtgaagccggagcagccaagacctcatcaaaaaaattatcagccaataatgactcagcttccgcattaacagctccatcacagctatcagcaaaagatttgtcttgaagagcagcattatctctcaaagatgaccttaacctcctaataggcaagcctaatggctgatgcacaacgtgaccatcaagaccataagcaggtcgagcaaccacaaccttagacttaccctggaaatactgcgaattccaagctcggacttcattagtttcaccaaattcagacgattcttccaattcgccgctttcaacaacaaaagactcagatttcccaaccacagaagctcgagcactcacactctcatcactcctcacatcaacaaactcacaagaattatcatcaaactcttcgtcaaaaacagaagaaacctggaagattctagatacataagacaaagaagactcatctacacgagtcatccttaaatcaacagcggattcaacattcctacggctaaacaaaccataagcaacagcaatgccgacgaataggagatgaatcagttcccagaacttagtgagcacagtctcaccgacgaaatcaggagcttgagaagggaacaacggcaaggcgaggagaaaaagagcgaatagaacagacttacagaaaaatcctcctcctcctatggatttataccgaggctgtggcggtacaacgacattcggcggagagcggcgcttggtgtagggatttggagacgccattggtgatgatgagagactccaattcgagatctcgagtgtgaaattggataattagggatttgagaggattcgttgggtatgtgaagggaagaaagaagacttcgaagcgacgtaaaagacagatctaaccattgagagagaaagagtgagaatggaaactatctgcagcagcagaccaccaccataaagcaaaaagacgaagccgctcacaaagaccgttgccgagatttacggaattgaccttggcattattcaatccagaattatacgacgtcgtatcgtttgaccccttcctaaacgccgtcgtatcagttctagacgtttaggctgtccattgttcctgcctcctgggttttgaataaaaaattgtgttaataaaatttggttagaacatctctaaaattttcgatctatttgaaatcgaatctccaacttgcaagcttcagagattttttagctatgggaccactagccacatgatgcactaatcctacttcacaagtttgagacagtgctattttgtaatcgcttcaacataagaatcattgcatcaacatttcattttttccaaaaatttgaagtaacggttggtaattggtatgacgctttcatggtttcaccacactttatatagtattaattttaccttgtagtattaatatttaataaaataatatattaaaaaaaatccagttcgatttggtagaaactaatttggttgtgattaagtttgattggtatggagcgtatagaaccaaccagggcttatatacaaattggttaacgctcattttgatttaactgtccacctaaagcctatactcgatagccacatgtgggaagtggcatgccttcaaaggcccatttattagtttctgtataattttctctatttttgcctctgccaaaaattgaaacaccgagagatatcttggtcgtacctctcattttctctttctctgtcggttgagatcttttgacataagggaagaaaaaaatatcgtatcttcagtgttctgcaagagattctaatggtctgacttcgtctatgtggacccaaatatctccatatacataccaaatgctatgttatgtcacgtacatgtctcgatattcgtattggctaacatttacttattacatatgcaaacaacacacgcttgctccatcaatcataacacctttcattgcttctttttactttatacttctaactaatcttctactgtaattaataatcatctttacaaatccctttcttaagttccaagcaaaagaaagaaaaccccaattaaacaattacaactttaataaatgacgctcttgaaaattagtttatgcaccattcgttattatgattcgatggccttaaaatagaactctggatttggtgaaaaacagatatgatgtaatcaaaatatataacaataaagaatgatagaacctcttatctttccccaaactaataattggacaataatattagtagattttccattatccagaattcagctataaatagaaactgaataaaacaaaggaaagaagagcatgggaccaactcttgaaaagaacttccaagtccgttcaacaatataataaaaacaaatcaccaaacctattatctttagactaattaaactctaatgagaaccagcagcaggtcgttgccgtagaggcatggcagcccacggactcatcggacccatcggagacgatgaattcatcacaggaggagccaccgatgacgaagatgacgtaacagcgactcgctcgcaagaaggacacattgtgagagtagtgggaggtttcatgtgcatgtataagtgtggagaaagctttaaagccctaagctcactcacttccttttgcaatctccgattctcatccgttagattctcgcaacatctcttaagatattcacagtctacttccgtttgcttcagcttcgtcctataaacacacacacaaacagtccaaaacattaaaatccgatatccggtttaactatccgggaaagagaaaacccgaagtacatttgtttcttgtattcgaaactggcggttattgttcttgaaccggaaaactgaaaacactttaaccaaaatttgactcaaaaacaacattggcggttttaattcttaaaccgggaaaactgaatagcttaaaccaaacctcctaatttaagacatgagagacccattaaaatcctttaggataatcttatgggtcataaaatggaccattacacatatcaccatcatagcaataactactaatgttttatttgttggactatataaaatttacgaaagtaaccccttaaaatagaataaaaatttctaccttgcccttcggttttggaaccacacttcaacttgtctcgtcctcagattcaattgcttagccaaagccatcttttgcttctgcatccaacaacaacaaaaaaagtcaatgaaaaacatataaaaagtcaacctattgaagaaaactacggaaatgccactgaccggattgagtgtactatgttctttaaaagtttcttcaagaaccaaagcttgttctttagacaatcggagtttcttcctcgaactgtcatctccgttcccgctaccgtcttcatcgtcgctaccaccgccgagcgagcaagaagctctctcaatctcattatcttctactctacctcctccaactgcacctgccgcagccattagctctcgctcgctcttcttcccgctcatcacgcttgagacggtgctgttcggagacgaaactccggcgccttcatcctccacgtcaaccaccaccgtcgatggagctctgttcacgtctattccccggagaaacgatctcatgtccgagtttctctctgcacgttacgttaatcacgccaaatgattaaaaatcacaaacatatcaagaaaattttatctattataggataaagtgtaataaaaagatcggatctaaaacaaagaaacctataatcttagacatgaatctggattagtaaaaggaggtaaatacctgatgactgaaacatgttaatccaagtgttctgaatcttttgaggatggttataattgctctgctgcatatgctgcatgtgtgatgaagatgcataagaagccagaggcattggatttaacctcgaagacgggtccttttgattaaaacctaaactcaagctcaaacttagccccaatccatcatctctttcactcatttttctcaaccccagaaagaagaaagaagaattctgtctgggtgctcaagatttttaagcgaggaaatgaataaatgactctttctctctctctttcttaaagatgttgtgccactgcctctacacttgtgcagcagtacagtttcaaaagatatggcttatatttatttatatatgcaaaagagttttttcagacaaagagatatggggttgtggggaggcttagggtttcaatgatgacttgtgtcagagagacctctgttacctcaatgatgatatatactgcataaaaacctgcttccttctctctttattttaacttaaccatggttaaaattaaaaccaggagttattactttcacctcacatcccttttcaaccatggttaattgatttattataagaaaaaaaaaagtccaagtctcttgttctttctctatcattttccgtttggtatattgtaagttgtcactattcttaattacaaaataacctatgagcgtttttcaaatattatattagattcttatacatatgataaactcattcacccaaatccattcatgtgaggttttactaaatatagataaaagctgagtttctactttaaaagatactaaagattagtagttgacaatataattgagtagagattttgtgtacccgagtttcaaagtaaagaaaatgtaaaagaagctctttttcaaaaacacacaaacaagcataattggctttttgtaatgtggctttcattacgaaagcggctttctcgctcgttgaccgttgactgattgagaggattaaaaaagcagcgaccagacggtaaaatccacgcgctcgtgagggtgatcaaataatgatatcatatcataataattaataaatcatcatcatcatcagtatcattatgaacatcatcatcatatcatgccttattgttatcatcataactttacttctccctctgaccattggggtcctacgtatctcaaaaataatgcagcttcgctttaatattagtactcttaaagcataatttgtagtactgtatatcaaaccatataattgtacttcccattttaacatggaattatatccttaaaacaaatctcacccactctccaaattcaccatcacttgttaacttgttggttagaaaaggttctttaagttagctttatggtgaatatgtttcatcattggcattcgattatgacaactatttttttttttttgagaaaagatcagctaaattatgtttttcttagtagttttaaaccattctataacctttattgggtaaaattatataacctagttacaaaccaaactttcttaaagaatgaaatgaattattattcttcaatgggttattgttaaaatgtgattatgaggatgttggaataataggtaagcgtgaaagaatagatacgcgcgaatgggcgagtgtgaggtggggggagaataaggcggtgggctcaaaatgggtatggaatcaggagggggcagagatacggtgtcgtatagataggttacagagaacctaaaagccctaaacactgcatggattttgagttgtctgcgaatccaacatgcattcccattccatgcctccctccttcatttattgttcctttttcccaatgtgataccaaaagataattaactttctcattaatttcatctgtcagtcaaacataaataaaaacgcacgacaagtggtgttggctgatttttatgactaataagagagtaattaaattactatttaattaatgatgactccatatatgttattgatattgccatcattacttctgccttcagtctcttcaaaactttcagcagttacacagacaagacaggtcagctctatttatttaatttcctgctcgtgtttaatttatatgtttgattttacatttacacaggaaacaatctaaacataacccttcttctcatttattttctccattaataacactgttacttagatttttagaaaacaccaaaaaaaaaagcatttgtgaaaatagaaagacaaaatatatttgatcaagttttccttttattattaacacacttattcaacgcaaaaaaaaaaaaaacatagccaaagtttatttgttttacctctttgttatacgagagactttcaagctctgaagtctatggaaattcaagttttgtttgtattttatggaatgtaaaaattgtagtagattttttgttgacaatttgtattgttatacaaaataaaataaattatttttatcgaccgaatagatatattgtggtatcggactatcgggcttaaattgtgtttacaatgagccaataaaccaaaaaagacaaatgctaaaagaacctagtgaagtaatcataaacaaaagcacggataaaagtaagtcaggtcataaacctagctaatagtttatgatgtgtttaaattcgcagattgatctgaaattgaacggtgcagatggaccagatctcgagaaatcgttgttatttaagcatgtgacttccattacgtaataaactaataacctctcttagttttatactagaagagacgagaaaaggacctgtcactagtgtcctgctttgtataattataattttgaaaacaaagaaaaagtataatttctttaatgtttttcattttttttcttttgttgctcaaacatttctttagctcatcttaccattttatatatcaagtagaaagtgatagagaaatttcaaaatactatcatattaggttacctttttttgatagaagtacaaaacttcaacactttttttttttgttgaaagaaattcaaagttttcatatttgttgagttttttttttactttttttctttctttcatatttgttgaatttggctacttatagttcgtagcgatgaggcagtgtgacaccggccgtggcacgctagtacgttatatgacatgaaaaaaacgatgaggatcaactagggctttttggttttggcaaggtaacctgatcaaagataaaactaattacacatattttactgaatttaaagctttgttttgcggagataggattcctcttaaatattaatgtagacatacgtcagatgtttatctagtataccgttcgtatacgtagattttattttcacgcgagaaagagccgtgttgtcctcgacaaatataaaaagctggattcatttatttattaatacgtacatactagtcgagagatcatgttttatacaaatatattaaacaagcatgggtttttacagatattttcagacatcacatacgtgatagcaccgcctattaatgaatcgcgatacgatttaatatatttgtttacaatgacacacacaagaattacaatattaaaattttggactgttacttgaaagaagcatccggagtatacacagtagcattgaaccatatgatgataaaaagagtactttttgtatagatcagtccatcttgatccctgtaaatcgcttaaccatttaccaacataaagaaatgaatagatcgatggatttcgtatatttgtaaaattacattatgactgtaatgtaaaaatggttcttttatatgttatagtcttatagaatgaatgtaattgtggatctacatcgatgacttttttttttcaatatgagtttgtgtggtttttaataaacaaatgaatcaaataaagaaatctgggataaaaaagcgagtgagcatgacaggcaaagatctaagaacaagaagaggtggagtggggaagccatgggaggggaaaagaagaaatagaggtcatcacactacgttcacgtgcatgagcatgtgagattttgttgacgtggcaacacgtggttcccagtgaccacactcgtgcggtgtaacattgttcctccacgaccagacatcccacttatcaacaatcatttgaacacacttctcacgcgctctatcgtcagcgtgtacaccaccacgccttattatagtaaaattgtagtattgtttaaagtttttgatgtggtacaaaaaaggatagatatgtaccatgtccaaataatataaagatctgctcatgtgactttataatgcataattaattatagtagtactagctagtcgatattcaacgggtgtaatgaacttaatcatagatgaaaaatgtggatttcaaatgataatatatagttttgtcatttgtgctaaacattatatgttggataagtccataatcaatgttttattcgttcatcattattttgtaaattttgtatgccagctgcatattattttaactaatttagtgtagactttctaagctcctaagtcctaaaccattgaagaatgtaatttacatccttataatatatgtgacctgatttgttataactttataagtgggatatagttaaaccaacgccttagtctctttcaaatataacatgttacttctgtgacttatgtctatagatttcttttcaaccataccatatatcacattttttgacattttaaaaaggtaatgtgatcaacctcggtttttagatttgataagagggactttacagaggtaggtgccaaataaagttaagtcatatcatcatcatgatattggtaagaaacgaataggatacggggatccaatgtcaaccgaccaacaaacctatcatgtttacccaataatgaggtcgtttgattaatataaaatgcaacgttttaaaataattagcttatcattttatcacttacgtaccatagatagtagagtattaaactaatcaaaaattatgtcatgatgttaatctatggccccacgtgcgttcccaaccatgtgctaaagcactttcatttatactttctgctttcgtcttcgtacactcgatcgaattaaagttacaccacccatcaccattttccatgaacaaaacgatcacaaacataatttaattttggcatggtctttatcacagtgattcattttgtattgagacccgacatttgtaattgtttctgtctaccgtcgatctcaatataaaatgaaccatcaggacaatacatcatctatataaacttagaaaaatctaacagtttggttcgacatacataaactaataaatgcaattttatagttctaatttgtctgcctattatgatatcatgaagtgaatataatcttgaaacatcatcatgaaacttacgcatgacttaaagattgtcgtcttttaggaaaatcttccgcttattgattatggatcgatagaaaatcttagcttttgagacttttgtacaaaaagagaagaaaaaaaaagaaaagaaaaagaagatcttgtaacaaactttcagaatcaatgtgtggctgcttttgtctccaactatacctttttcttttaatgattactattgctacatagataacacacaccttaaaatcgtgaaaatgtttgaagcaatatttcattttgtgctaagagatcatcaaaatttttattgtagataagtgactaatttatggtaaagacttgaatcactaaaataaacagttaaattgcaaagggacaggagcgagtgaaagccacgtgagcaaggtgtgtaaaagagcatgggtttaagcgaaaaaaatcttgtagtataaatgtcagagcaatcacgtggatatgcacatgacataacgtccacgtgtcacagaaacaagaaaaaggaaaaggacacgtgggcctaccttttcgcgcgtggctcgttgtccctccctcaccggacacccaatttctttcccaatcatttgatgcgattgcgattctgcttttctttagctacttagggaatgacgtttatacccttgggcatccatcatccactcatgagcttatcaaagcctcaatcattcaatatgatagcttttgcctttgtgtgtgtttacatatttacagctatactcagcgtgactcgcacgtgacctcgtctctaccctttaatagaagaaatttccctctttgggtttgagtaaaccagatatgtaaacaaaaggaaagaaagctggttacactcgtggccactaggatttcatcaaatcaaatcttgttcgatttaagacactaatgtcgaggacttttctttgggcctgtatcagcccactaaaataaaattgtactgaaaatcccttaaaaccattttttctttttccagttcaggttatatataaaataaaaaatgaacacatcaactatcttaaaataagatgttgtataacgcatctaaagattgtgcgtctagagatattttagtcaattttcactgctgatcataagggggatttaaaattcgtctggctaaacatgaaaattcactaaccaacttcatatacccattaacggtcaacaccagaataaacactccatcaataagcagaaccaaaagaatgtagatgatgattgcattgagtttttggtaccaaaccataaccaggtttcgaattccgcatacaaattggcaacatttatgcaaaagcaatctactctctactccaccaatctcggttaaccggtacatttctccacggttattcctggtccggttcatttcttattttatttgattcgaaccataaatggcaaaacagcaatttcatggaagttccgaggccattttgctaacggtatagacggcacgggaagagaaagaccaccggtggagaaaaccctaatcccccaaattcgaccatgttcatggttcgattgaaattcgcatcgatctctcataatttcagtacggtggcggcgaaacatagaagagtgccgtcgaaatacaagtctctagccatcggaaaagcccagcaagccattacagactatctccacaccaccaggtctctctcctacactcacgctgaacaaattgcctcaaacgcctccgtttcgattcgaaacctcatcctgaaactcgatttctctgttcctaccttctccaaatctcttcggaagcatctcagttaccatcctattaacgaattcgagtttttcttcgagagcattggcattgactacagtgaggttagcgagtttttgcctgagaagaaattcttcttctctgaggatcggactgtgttggatgcagcttttgctttatctggatttgggtttccttggaataagcttggtaagttgtataaagaggaaaggttggtttttgtgcagcgtcctggagaaattgaatccaggctacttaagtttaaagatataggattcagtacagttgcggtgattggtacttgtttagcgattcctcgtactctctgtggaggtggtgaattgggttcggagatacgttgtttgtttgttaagctgaaaagactttttgatgagtttgattcacatcatctttttgaagaaaatgtggattcttggctcgccgttagcaggaagattaggatcttttacgatttgggttgtgagaatgaagagatgtgggagttgatgtgtagaaataagtcactttttctggaatattctgaagaagctctgatgaataaggctggatatttttgtaggtttggtgttagcaaagaagatgctgctcttttgattcttcgaaatcccgctattatgaattttgatctagagaaaccggtgatctctgttacaggaatgctaaagcattttggattgagacaggatgaagtggatgctgttgctcagaagtacccgtatgtttttggtagaaaccaattgaagaatctgccttatgtgcttagagcaatagatttgcatgaaaggatctttgatatattgaagaatgggaaccatcatttactcgctagctataccttgatggatcccgatgaagacttagagagagagtatcaagaaggcttggaggagcttcaaaactcaagaaccaaaagacacaacattcaaaagttggatttccttcatgaaatagggtttggcgaaaacggcatcaccatgaaggtactacaacatgtacatggtacggcggtagaactccacgaccgattccaaatcttactaaacagtggcatcattttctcaaagatatgcatgttgataagatcagcaccaaagatcttgaatcagaaaccacatagcatacaagataaactaaggttcctctgtggcgagatgggagattctttggattacctagaggttttcccagcttatctttgttttgacctggagaacagaatcagtccaaggtttagattccataagtggcttgtggagaaagggtttagcgagaaaagctattcaatcgcaagcattgtagctacaagcgaaaaggccttcatagctcgtctatatgggattcatcctgcaatcccgaaacattggttcgaacgcttctccagcagaaaaaccagagacactgtatcctaactgaacaaaaagactctttggatcttgcagcagttgggagcaatgtacccttgaggtttttcagatttgtggacctgaacacaaagggaaccttattgcctcaactcaaaaacgttacaaaatctctaaatggtagcaactgcgtgtgggagattgcagatgagacgtttgtttgtttgtgggatgtagaaatgatgggcacacttggataattttgtggttaccaattagagtgggaagaacttatctgtaccactcggtggattccgtttttggcctcttcacagattatgaagtgagaggtttacatacattttaggattgtatatactacttttttttcttcgatcagacaacaagaaattgcaactggttgattttgggctccctgaaacaatctgcacgtgtcacaggcccgtgtcggtgatagtagtaatgacttgattgcaaaacgtggaaccaaatcgcacacttgccagtgaaaataaatcaagctgctttgttatatacgtccggatagttttgactacatttcagctttaaagtcttggaaagcaagcaaacgagtgcgtgcaagtcacgtgcgtcttacgtttggagcccttgtggtcagtgtggcagcggctgtaaatccgacgatataggaagggtaagatagtcatttaacatatttctatcttttttttggttaacactttggtttggggtttctatcagcaataacataactgccgctcttcattctctctcatttctttcgctctacattggctctgtgttttttgaattatctattgatttccattagggttttctcacttctttgatcgattgaattatatatgttccgtcaatccatggcgtttcctccaccgatccatggttccgatgcaccgccgccgccacagccgccgtcggtggtgaacgggattgaaacctctagacggcagcagcaacagattgcagcagcttcttcttcgctggtgaaatctcatccgcttcataacttccctttgtctgatctcagatgggctatgaatcacgccaatacacaccggctccgcaaagcatcgagtagatctccgcttcgtgaagctaatactgggaaaggaaatctggtgattgaggaggtgaacgaagcttcaggttcttcgtttgaattgagaccggagaagaagaagggaaacgcgtctggtgttagcgattccgccgcagatagatccgcgacgaagtcaacgacgccggacggtagatcgaagatctttatacggatccgcacgaagaacaacgaagaaacagctgtatcgactgatatcgccacctccgtcgccgcctctgttcaagtgactgatgattcagctggtccggcgatcgatgctgaaggtgaacggatctccgatggtggtggtcaggaagcagacgagtttggaccgaagacttggaatctgaggccgaggagaccaccgccgacgaagaagcggtcaattggacacggcggtggggtattgaagagctgtaacggtgctttaccggagaataaatctctgggaacggtaagaacagagtcaatacgatcgaggaacggtgtagatgctaagatggcgacgacggaaagaaaggagaagaaaccgaggttatcgatatcgctctcaaagctggagatagatgaagatatctacgcgttgactggatcaaaacctagtagaagaccaaagaagagagccaagaacgtgcagaagcagctcgatgtaagattttcacgttgaatcagaatcttacctttgttttactcaaacctgacctaacaatattggcttgaattgttgtatgatcgtttttcaggttcttttccctggtttgtggatgggtaacgtttcttcagaagcatataaggtctcagaacatgcttgaaaggtattaacatttttgatgaatccgattggattacttcttcctgtttactgttgtatagtctgtgattgaggaaataatgtaattgtttctgaatcttgtagggttgaatgagaatgatgtgaagttaatcttgttgaatcggattcgactgaaatcagataggagcgtcgaagaagcttcttccattgattgaggtataaaaggtagtgattcaatgttgtttgtcatttttgagttagactttctccttggtgttatcccttattggttctttgcagtgcaacaaaatattgtagattcatgaatgaaaatgttaaattgatttccctgaagaagagttttagatttgcttgcttggacgatatgtgatgtggctaatatttggtgttcttagatttccgatagttagggacatatcattccttaaggttaaagttcctatcttaatgttaatgatttgcgtcttaaccttacatattttaaaatcctgatttggtgtagagtgaggatgtgaactctgaagttgctatgatttcgaggtctagacttagataaaatggactcactttgtataataaaccttcactttctcatgtctctatctgtactgtgatgatgcagaactgcgaatgattcgtttcttcaagttttggcttcattactggctcgtcggtttcaagagccgaattcaacttcaacttcagatacggtcttaagtcctaactgtcggcagtataaaatgtgaatcaaactagttttctgatccagtcgtcttatttgttaccactgatgtgaggtgttgatacggcctctatttttttttttctgtttaattcattcactttgtgtaataagattagtgggatagcctgactttttgtaaaggtggaaaaataaaatcagaattatcaacataatttatttattccattactaaatttcataaattaaatcattctagttttcattaataaatagagcaaaaaagacggataatttggtcaaacatgtaacagaagaaaatataattacctgcaaatttgatagcgtttttacaaattgttattttaaccccacttccaagttcaaagttcaaactctgatccagtaaattaaagaatataatctggactttaacggtcaatattataatttggactttatacaaggaccacaggcttgatgtgtcactctattcatcatcaattcatcacctccactcgctttgtcccttggtttatccaactcttcatgcactatccgtacacagtaaaaccaaaaaattacggattaataacaaattttgattgtttggacctctatccattttgtatttttggactacttattagtacttaattatttacattagtatattttacatattggtccttttatgtattatgtatcatgcattaattacatattgtagaaagagatttgtactaactagttgacctaaaagaaagaagaagaagagagagtcgtctatatcgagtggttttggtattaattcttatcacgttggatttatatagatgtaaacttcgtagtaataacaatgatgagtcgtgttttaaaagaattttgttactttcttgtgtgataagcttcctcgcaatttcctactgaggaaaagaaatgcaattttaacttccttcaaaagtttatagtaaaaaaaacaaaactcaacatctcattgcttgcatatatgtataaatacctcccacttctagtaacaaagatcacaccgagaaaggcaatggagtcggctaaatcaatcatcggtggccaccaaaatgtcatcctgatgcgtcatggtgatcgactcgacaatttcgagccactctggacttcaacagctgcgagaccgtgggatccaccgcttgctcaagacggtaaggatcgggcctttagaactggtcagagaatccggtctcaacttggggttccgattcaccgtgtcttcgtctcccctttcctccgctgcatccagaccgcttccgaagtcgttgccgccctctcagccgtcgatttcgatcccattgctatgtcatctaaagacgtgctttccatcgacaatactaagatcaaggtcagtcagaatatctctctatatattttttgagaccagggtttgtagtctagtggttttatgctagtgttggtccgtgtcatacatacgttataaaaaaaaaaaacatatattgtggactatggaaatttttaatgattctctaagcaaaattctgttatgttgttcttataaccatgctgatcattttgattgaagcatttgagatgttttatgcttatatatgtcttgtctcgtctgctttaggtggctattgaatttggattgtccgagataccgcacccaatctttattaagagtgaagttgctcccaaagatgggaaatttgatttcaagatttcagatcttgaagctatgtttcctgaaggaacagtggattctaatgtggatatggtttataaagaggtgctctatatgacttgttttgtcgtgtcttcgttcttaatgttttgttttgtgtgactatatctaaactttatttcgataattctcgattccttgtttgtactgtttaggtgccagaatggggagaatctgcacaagcctttgaggatcgatattataagacagtgaagattcttgcggagaagtatccttctgagaacttgctcttagtcactcattgtaagcaaaacagttatggcttttttagtttttaaccaaaattgatgttttcctaatcttgtagttcgtttttttttttgggatgggaaattgcagggggagcagtaagtgttgcattttacaactacttcaaagacgcaactaagtacgtggtagattattgtggtagtgttgaaatgagaaggcagattttgaatggtgatgggtttggtaaatttgaggtagttactagtcatggagtatcttataagtacaccaaaatcccagtccatgatcatgtagttgtaagccgccaatctcccctttaaccggtttatatgtgaatatctggtttaacgggttgcttcaataaaaaaaaatatataagaataatggttcagttattttccttttcttccacaaattttacaaaaatatgtaaagctaaagggttgtaatttttctaacacaaaattgttgttcaacaagaatttgtcagaacgtatttaaattaccattgctataagcaagagaacagtcttagcaaactgctgaaacgacaaaaaaaattgttctttagtattcaaaaaaaaactttgaactatacgtagtcttcctcatgtctgatgcctattgacgagtttattacaatagtaaaaaacaaatgaaaatacaataaaaagtcaatggtcttcttaattgcatgtaatatactatacttgcatcacgccatgaagcagcaagaaacagagcaaatgaagtctaaatcaaacatggatggccaccaacatgttttcatgatgcgccatggcgatcgcattgataagtttgagccacaatgggtctcgactgctgctcggccttgggatccaccgcttattcaaggcggcatgtttcgagcgtttcgaaccggtcagatgatccgatctcagatccattttcccattcaccgtgtctttgtctcccctttcctccgctgcatccaaaccgcttccgaagttatcgccgccctttctgaccccgacgcaaattcgtctgattccttcgacaaacctaagctcaaggtcaaatgaccatctacgtatatatgtgtttatgttaaactatggaagattttcagattttttcatagatcttaagaacagttaatcgtcgtgcatgttgtctctatgtcattgaaagtcctatgcatttgtttttcgttacaacgtgtttgaatgttctagttacattatgctaagagacttgttgtttgtagtgttatagtgtacgtactgtataagtcaatttaagaagcttgatcgtgtgcttcaggtttctattgaatttggcttgagcgagatgctgaactcaatcgcttttaagcctgaagttgctccaaaagatggcaaatttgatttcaagatttcagaacttgaagctatgtttcctgatggaatggtggatcataatgtagacccggtttacaaagaggttggtctctaagaaatctttgcgtgtattctttagtttgaacacaagtctataagtacaagaatttgacatgttctgtatatatacatacagatgccacaatgggaagagactttggaaagttgcaacaatcgatatgttaatttggtcaagactcttgctgataagtatccttgtgagaatctgttgttagtcactcacagtaagtgactctcacattctgtttttttttttttttcttgttttatagtgtttttgagtatcatagtctttttaaaaaactcgtccatggaaatgtaggagaaggagtaagctttacatatgccacattctataaagaggcaacgcacaggttagatttttgtgcttgtgttgaactacaaagacagatctcctctagtgaagttggagattttgaagtcgttacaagtcatggtcaagatggtatcatgtaccctccctctaactccggttaattttgtcattgtcttcgtatgatccctacgaaccggataaaaccggcgttagccgtcgcttgactgattcagtctatattgaaatctctgattttttttattttggttcagaatttgccttcacttagtaattttaaattcaaataaaagatattatcatcaccattatttatctattctcaattgtttcaaatttttgattgcggtttggttttgttgtcgattaacctctgattttctaaatttatttacatcaacatacttttaaatacataaactggttagctaagtctcaatcaattaagcaatgtggttattagtcatggagtatctttcaaattcaaggaccacaaaaatccccaatccatgatcttgtagtttccggtttagccggttttgtccattacgatgatgttaaaaaaaagttgtttttataaaacatagaaaagagaaggaacagaaattaaaaaaaataaataaaaaagcgccatgtatacaacaatcacttccaacgtagtctcaaaggtcacagcagcagcagcaacaatcagagcaacaatggagtctgctaaatcaaaaaatcccgatagctaccaaaatatcttgatgatgcgtcacggtgatcgcattgacaaaatcgatccactctggcttgatacagctgcgagaccttgggatcctcctctcgttcaagacggtatggttcgtgcgtttcaaactggtcaacggattcgatctcagatccaatttccgattcaccgtgtcttcgtctctccttttatccgatgtatacagactgcttccgaagtcatcgctgctctctccgccgtcgatttcgatcctaacgctacttcgtccaaagacgtcacttcaatcgataaatataagcttaaggtcagataatcgctgtaatcgccttcgattttgaaatcttttggtgttccatgtgtatctgtgaatctctgttgattgaattctagtttaagaatgttgagctgaattgttgttgaatgtgtgatattaatcatttaaggttgattattgtatacttctcaggtttccattgaatttggtttgagtgagatgctgaattcaattgctattaagcctgagattgctcccaaagatgggaaattcgatttcatgatttcagaacttgaagcgatttttcctgatggaatggttgatcatagtgtagatcctgtttataaagaggtgaggttttggaattttgtagtatctagacttgtcttgttctgtttctgtttatcttctaatcttcgaagcaatttgagtttaaacttgattctcttgttggcattgtttagatgccacaatgggaagagactgtggaaggctgcacagatagatttcttagtttgataaagactcttgctgataagtatccttcagagaacttgctcttggtcactcacggtaaacaaacacattatgttcttaagtctttttggatcttttacacattctttctgctttgtttctctggagagaacatcttcttctaaggttttattaaagcaaagagtctatgaatagtcccttttatcgatcaaattttgtgtttgaatgtctctttgttgagaaaatgcaggggaaggagtaaggactacatttgcaacctttaaaggcgtacatgtgtacgacgtagagtattgtggttgtgctgaattgagaagacaggtgtcgagtaaagatgggtctactaaagctggagactttgaggtgatcacaagtcttagtcaatgtggaatcaagtaccattccttgagcaccacagaccaaacttctgcttaagtcaatgatgttccggatgatcatggcactagtaaaccggaatcaaaccggatactggttatctagaaacaattctgtagaagatgagaaccttgccggaatactacaatagtaatgtgttgcttccgacagattggagatacggtttcgaagagagaacttctttttaagtgttgtaccggcggttgaaaatgattttgttgtttattattgattctaaacgtaattttgggcagatactattgattaaactgattttgcgtttttatttttacaatgtcatgtgttttgatgtcttcttacttactctgtctccgactaaccaaaagctgtaaacaagaccggctcttcaacaggaaacataaccaccaagtaggttgagtctcatttaagaacaagccatatgccactccttgcactgcaaaaagtcttttcctttttgcttcttctctgcaaaaaaattgttttggagtgcaagtaccaccaaaaacttcgtactagaccatcatcagctactggaatcaaagcaacgatagagtttgagtaaccaaatctgtttgggagtaccagaggttaaatatgatcattatgatgctctctgcggaagatgcagccagtcccaacgtccattggaccttgaagtctatccaaagctctcatactaacatgaaagaagacagtcttgtggttagtatacttttgtggagcggatcataaaatccatctatgattcttcgaagccctttatataagtagctctttcgtacgtgcatattgtaagcatcagcagagaacccaagcaatgagttgattcttcacctctcccgagatgccaaaaacagagtaaacactcaacatgtggttaagagtatatttgtaactggttgttatggtcagagtaaacaaacaacgatggatagtatatttggaactggttgggatatagttaattttttaacacctaacaactacccatcgttgtttgaccataagaaattccgaataaaagataaatttaaggttaaatatgctatatatataaccggtcgactatatcaacaaagatgttatttgatgaagaagtcactagcgtggggtaattttcaactacctcctccattaaggaatggttcgacttatatttatacatttacatgataccgacttattaacatccaaactgtatatcatcccacctattttatttcagactttttgatataaaggatcataatcataagccttgtttcgtcacgtcattcatcatccattccacccatcttcctaaaacaccaaaaagtatattatcttgtaggaatgtaagactagtcgttaatacgatgtcgactgtccacattaatgtaaccccatcgatggagacaaatcaaattactagtttccaagtcatattgaatattaatatgaagttaaaaaacatgtttgtagccttatgtaaattatatcctttttttgtttagttacgtaacacaattgcataacaacaaccacaaacaaaaggttatagcttttttaatgcaaaccaatcaaaaatctttgcaattttctaatgctaaaagtatgaaaaatcgcagttgatattaaaaacaatttaggggatttctcaacaatttacaagttaaatttgttaataataaaacgacttgactttaccatatatctttttcttttttaaattagaaacttttaagaagaagaatacaaaagaagtagtggcactttatgacattttccacaaaggttaaaaaaatcacattcctttataaacaacgatccattagtgtcggaaaacgaaagagaaagaagaagaaagaaacaatggagtctcccaaatctaacgtcgacgatggctaccaaaacatcttcgtcatgcgtcacggtgatcgaatcgacaatttcgagccactctgggtttcaaccgccgagagaccttgggatccacctttggttcaagacggtatgattcgagcgtttcgaaccggtcaaaggatccgatctcagatcgggttcccgattcaccgtgtcttcgtctcccctttcctccgatgtcttcagacagcttccgaagtcgtcgcagctctatcagccgtcaatgtcgatcctaacgccatgtcttccaaagacgtcccttccattgataaatctaagctcaaggtctggtcatatctataatcttaaactcagatttaggaagaaatgtgtgtatgatgaaatcagctgagatgtttggctactttctcaggtttctattgaattaggtttgtgtgagatgttgaactcagtggctataaggcgtgagcttgctcctaaagatgggaaatttgacttcactgtttcagatattgaaactatgtttcctgagggaatggttgatcataatgtggatatggtttataaagaggtatgctttacactctacaggaccttttaaagtgttgatcgttttccttactttggtagacaacttgatccttttgttccttctgttcagttgcctaaatgggaagagtctgtggaaggttgcagagatcgatatgttaaagttgtaaaggctcttgctgataagtatcctgaagagaacttgctcttagtaacccacggtatgcaagtttctgactcttggtttcctattttgacttatgtgtatctgtaaaatgccctcctatcctttgtcatcttgatcaatctcaatcagatgtaaaccatgtcccttctctacattgaactatcctatccgtctctgatgacctttgtgcactttggatgttgttaccttctaaacctctttgatgaattttttcaggggaaggagttggaactacattttcgacattctataaagatacaacagtgtacgaagtagactactgtgcttatgttgaaatgagaagacaagtctcaagtgaagatgggtctgttaaagctggggactatgaggtggttttgagtcatggtcaagctgggatcaggtttagtcatgatcctgtcagttatgaacctgtcataagccattcacctgtttagtcaaattgtcttcagtgtcctctgtttctgtacttttgaattgtatttgaactgcttttgtatgaattatgaaacattgtttcaaagttttcattcaatcgaatcagagtccaaagaaaacaacaacacaacttccttcacataataacaagggaacaagaattgtcattacataagaatgtagttagattatagacctaaacacacaaaggaaaccatctacaaacaaaaaatcaacaatctaaggacttgggattggatcaacctgatcaaacatgtcagctgggaaatcgtctaagaaaacatcagcttcttcatcctttgaaacatgtctgcatcttctcggcacaggcgaaggctcgaagaacggctgagggagagcgaacaatggctcagaagaatcagctggtccaagtatatcatagtaaaaagggtcgtcaagtctagccaaaagctctctgctttctggagagaaagggctgattgcttgctgatttgcatcattctgtgagtcagagtactctgctaggacaagatcagtgccaaaagcgaaaggctgatgctctaacttaacacccaaatccggcaacctcaagacttcatcaccaacttgatcagatgaataaggaaccatctgggaacatgaagaagaaactgtaacctcttcctcaaccaaaccaaaaccctgagaccacaaaattgagaatcaaaaaaccgaaaaacagagcttgtgaattttgtaaatcatcattagtacctgagaggattgacggattggtttgacgtttttgcccttgagtcgatgagaagaagaagatttgggattgaaactcgaactcgatgcatcagaggagttatgaagaatcctagcgagtctcttttgtctgctactccagaaattcttcacatcgttatcagttcttcccggtagatacgtagcgattctcgcccatttgttaccaaactcagattgtaactcaatcacagtcctctcttcgtcagccgagaacttgcatccactataaacaaacacaaaaaaccctaaatttgaagcaaacaaaaccaaaattgaatttgcagagagagagcaacaaagagaaggagaaaaatgtatactttttgagattgggacggagtttattgacccaacgaagacgacaggatttgccggtgcgttgaagaagacctttggatcgaatggagctccaatcacgaggaccgtatctcttgacatggttgatgagtacttcgtcttcttcggctttccatggacctttctttatctcttccttcttcgcttccattttcctcatcgctaatcgatctctctctcgattttgtgtttttgttcttctctgtttttgtgtgcggaagtttctttgggttttgtagtggcggttggatgcggttatcacccacattaccattaccctccactttcagtaccccactccccaagtttctctcgcatttcgaatttgatgttattaccaaaatgcccctgatgttgtaattagaattacaaagcccaaatcatgtgagccagcccgtgtaaggccctctatttcacatgcatatatggtggaaaaaaatgatgtgaaggatcttcgagactcgagagccttgaaagttgaaactacgtatttagataccgtattttacagcaaatgtagaaagaatcaatttttacaggacagctgtccaaacaaaggccagacaaactcagtaataatcaggatagtatatgactttgcacattgaattctttattggacatttaccgaaaggaaggagggaggagacaaatttttaaataaatgaatttggtaaaccactaaatgactttactattctcctctcttaaagacggttgactcaaaccatctaatgtgcagatgcactcactaagtcaatctcttctcatggcttttgtactatgctatctttagattgtagtatctcccaccttggatatgtccaaagtccaatggtggaatgggagaaaactcaaatgtttcaaactttcaaatccgtatattgatataaaagcaaggattataaattactattcacttgttttcgccaattaatatatatttacgtcacattgttattatacgtactgtattttgtataaaagttttacgtcttttaaaaaacgtatataattaagtttgaattgtataaatagtacacatatgaagtgtaaaaaaaaacacatttgagcattgaataaggatccattattgttccacgcatttgcaaaaagtatatattaaaaaagaccaacacaatgtagtaaatcttcaaaaaattaaaaaatctcgaacgacatgatatggctccgaatccacaaacctatattaatagaaaaattacacagtatcaaagttcttataatttgatataagatagggttataagatatattgttacatgtgctatttattactacatatgtaaacaattgactttcatgtatatggtcgtcggggaaacttcctaatcatttccttcctcctcattagtttactaccaagagggaaacttcggacgttaagttctttcaactttcttcttcacatttactctcatttgctctctcaacaacaaacttccagaacaatgaaccgaaggttgaatcatgaaccggacacggtccttgagttaaacgaatcgactcctgggatgtggtggtttcctacaaatcctgagcatcgttgcatctaccgagtccctgaccgtctacgtcgtgtaaatccagaagcttacacgcctcaattactcctcattggacctcttcaccattctttaaaatttcaagctctcaactctcgtggagatatcacaaacacaaagttaatgggctacttaaacatggaggagcataagaagatttaccttgcgagattctcagaaaggcttgcaggtcaaaaaacgattgatgaactcagaagaagaatcaaagaagaagaagatataataagggcaagctactctgagtcaactgcctggattgaatctccaaagttcgtggacatgatcctacacgactctgttttcataatagagttccttttaaggagtaaagattacaccttacttgaggaccaaggatcatgcatcaagaaaacatgggatcctatatttgagcagccttgtcttcaaactactgtggatgaagacctcattttgctcgagaatcaacttccttacttcatcctcgagaaactcttcgatccaatcgttccaatactccgcccaaaccaaacactccgccagatagtcatcacttacttcagattccaaggtaatatcggagttgactccagatttagacatttcactgatctattccgatgtgtccgcgtggagacacttaggccaaagatgccaaagaataaattcagatatttagttggtctgttccgatttgtccatttgggaacacacgggtcaagagaattagaaaagagtcgtcctcaagaacataaagctcttcgcatggagaagacacatgggtcaggagaaccaacaaagagcacattcagatatatagctgatcttttccggtgtgttccgatggagacactaggttcgaaaagagaagaaaagagtcgtcttgaacgactcaaaactcatcgcatggaggagacgtcacatggtcatggctcaaaaaaaacaaaagagctaccgatcatcaaacacatgtataacgcggcaaagctacaaagtgcaggagtgaagttcaaggccgtgacagatgagttctcgatagatgtgacatttgagaatggttgtttgaagataccttgtttgtgggttcctgatgatgcagagatcacactgagaaatataatggcgcttgagcaatgccattaccctttcaaagcatacgtctgtaacttcgtcagtttcttggatttcctcatcgacactgataaagacgtggacttactcatggagaacggtaccctttctacgtatacatatatatattgtttgtgtgttaaatatccattttccacattatcaatgcttgtcttgttttgtactcgttagctatttttggttaaatttacaagatttgacgtttaaattttatattgatgcatagaattatcaatacttaagacgaatttcatacttgagtttgattagatagacatttctagcatttattcttaaaacgaagatattgatgtttagaaatatttgaacccctattatctgtaaatcatgtttttcagcatgttatatatcatatgttgttttacttttatcaatacaaatgtttaaacagtataaaatcttgtaattccaattaagtactgctcgtctccgtgttcgctaggttatactgcttgcttaatttttcttgaataagtgacagtaatatgatatatatggttttgaaagggatactaaacaactggggggagaagagttctgtggcggtggcggagatggtgaacacgctattttcgggggtggtggagagtcgttcttactatgctggtatagcgtctagagtcaacgcctattatgaaaatccagtcaacaggtcacgcaccatcctcggacgccagtatttcggtaatctatggagaggtaccgctactgtcgccgctgcgcttcttttggtgatgactcttatccagacggtggcttctattcttcaggttatgcaaaagtgaatgttcttcccgtacctgggtgacgatgcttcactctctccggttcgtctcttgagtttaataaattagacgtatctacgatctatcatttcactctctcttcataaatttgtgtttaataaattagtcatgtcttcctcccaaccccacaaaatggatcttgtttttctagcttctatatctcataataataaacaaagacttaatggtcgtgaatgatactttattatgaagtctaaaattttagcccgagtaatgtatcgagaagctctattgctgaagactcgctaataaacaaaagaccactattctagctaggaaactgtaagacatcatttccttgattgtgtatagagaagttaaggctcgtccatgagaggaccacctattttatttatcctttctcggaagtcctcaaatagaactctagtatgaaaacagttactaactactagcttcatttgttgccttataatagtaaactgacatgttttggcctttgtatgacaattacattgtgtgatttgtgaagtcgtagagtttgatcctcccatagagagatatgatttcgtcaatcttgagatatgatttattgaaccaatcagagtctcagagcacataaccttttaatttttcacataacatctgatttttatgaacccaaaaaccttataaattatggtcttatcttatataaaacatacataattatggaatcatctaccagagacctaattccatgatcgtctcacagtaattccgatagagcttcaagctcgatctgttcatgataaatcacccgtctctctctgcgaaacattcccaaaaccctgcgattcagccagaagtcgaatttgtaattaaaccatagaataaaaatggcgtaccggtgatttgcttatccggtatttgaggagtaacccccaaattggttctaatgttggctccaagatcaatcgcatcttgaacctgtttcaattttcaccaccaattggatccgatcaatctctctctctctcacacacacacacacacacacataagatagatagagatcaatctgatttcaatacgagaatctgaccgtgtggatccccgtggcgcggactaatgcgacggagctggtggctaacgacccgacgaagagtgatgcgacaccgaaggctttgagcggcattaatcgaacgtcgccggcgtaacctctccgaatcaatcgtattccccacatgatttgggctccacttcccaatgcccaccaccagtgacctgatccatccaacaaactgctttcgccggcaccggttccagcgttctgttcctccattttcgccgtcttttctccgatttggtgaaatgggtcaaaattccgattccgaaattcctttattcgtgtttacgatcgttgctggtttaatgggcccattttcgggctttaggaccataattaataaatatatcaaggcgaggtttttctatatttgtcatcactcaacatgatatcagaatccataggaggcccaacatcatataacagagaattcacaccgttattatataaaatttaatctcagttaaacaagattgagctcataggaggcccaatcgatcgtatcggaggtccaaccctacctcattgtacgtcatccgccacaatatttgaccaacctttcatcaaaacgtctctcagcggccattgtggagtccattaagtttttgagaacacagacttacagtgtcctcttagcacagcctcaacacgcatcagggttgctactaaccactccaagctcagcatggctgtgggaaagcctttcagcacaaggaaagcctatcgaccaaaccagaaaaatagcaacaatgataatagaatatatacactattcaatgatttttgtaggaaaatctggttgattagtaattcaaatttcatcactaatcaaataaaagtgcttcttagttataatggcgccgaatcgaataaaacaatccagacccatgcgtcttcataagaagaaaaaaattactgagttagtagtatattttatattctttcttcttctttattaacaccaattttgtgtaattcttacgtccaaattaattagattgtcaatatattacaaatcaaagtgggccgacacaaaacttttatgtacaatagagatttctttttttgctaattattgataattatgacgtcacgcaatctcgagcagagttgatggattatggtttatggagtggcgtacatacatgatacatgcacaaggattcgtccatatctaacaagagatatatggtcaaataacatcccatttcaacgaatgcatctaaattgttattcgattttttgattcttttctccgttttctttttttgcgtatataagaatattattttacttatataatatattgaaacacgttattttcatttaatttcacatgggggtaagttacactcgattgacaacggacccactatgtataacgaaattattatagtggttttttttctgtctatatagtattactctctaatgtttcctttttctttagactaaagtaatttgcaagaatatttatagcagcccacttcagaccgcaacctacagctttaacactactctctctctctctcaaatgggaaaacaaatcaacatagagagtagtgctactcatcatcaagacaatattgtttccgttataacagccacgatatcctcctcctccgtcgtaacgtcttcgtcagactcttggtctacctccaaaagatcgttagtgcaagacaatgactccggagggaaacggcggaagagcaacgttagtgatgataacaagaatccgacgtcgtatagaggagtgaggatgaggagttggggaaaatgggtgtcggagattagagagccgaggaagaaatcaagaatatggcttggcacttatccaacggcagagatggcagctcgtgctcatgatgtggcggctttagctattaaaggcaactccggttttcttaatttccctgaattatccggtttgcttcctcgtccggttagctgctctcctaaggatatacaagctgcagctaccaaagccgccgaagcaaccacgtggcacaaaccggttatcgataagaaattagctgatgagctaagccactctgagttgttgtctaccgctcagtcttcgacttctagtagtttcgtgttttcttcggacacgtcggagacttctagtacggacaaggaaagcaacgaagagacggtgtttgatttgccggaccttttcacggacgggcttatgaacccaaacgatgcgttttgtttatgcaacggcacctttacgtggcagctttacggagaggaggatgtagggttcaggtttgaagagccgtttaattggcaaaatgactaaaccgccctccacttgcttactgtaattactaacatataattttcttgataaagaacatatatttccattacggtattaactaatcttttctatccttttctcttttcttgtttctacatctgagtatattgtcactatgtgaaaaaattgatctcgttttgaatatttacttttcaaaattgaagtaacgcaagtgattgataagtggaaagtgactaataagtgccagtggcaaaaacgtaattatatgcaacgtacacagaaatttaggcaacgtttattgacagtgacgctgtctcgaacttttaggcttttttgtattctcgactctcgttggcccctagataaatttgtagaatgtcgatggattttgacttgaagagacaaagcctccacttacgctcacacatgttacacatgtatcagtgtctgaaacctaattaatctccattttgctgtctgcatcgtaaattagtctatgttatcgacattaatatacgttcaagtttcattgataaaagtagctatgtagcaattttggtatattcgatccttgactagcaaagttgcaatcactctttctaattctgattaattatgttaccggatactatgtataaacgaatatccattgacaaaatcatgttaattaccaaacggatatttgtttcgtttgatacgcatattcggttagataagcaaatattacgataaaaatcgattcgatgaccttgattgcagtccgaccgaatcgattggaccattttcaattctctttcaaactgtttataaattgcttaatacatgacctatataaatgagattagcgcaggcaccatatatgtcatatgcgtcattgatgagacgatgattgcgaaattgaaagtgaaggagacaagcttttgattaaattatcgctttattatatttggggtgggaatataacatgactcacatgttcatcattgtttctttctttttcttttaaagttacaataagttaataacctttcactttctttattttcatttgtccatttctttaatttgcgtaaaaggtgaaaggatatatgctataacaatgggaatgcttttgcccaacatcttactttgtccactgtgtgaggcataacacgactgttatggattcccaaacacattcattggatccattaagcatattagtaataataataactggatatttcgaataaattagtaaaattctaacaaattgcaaaatcaaactttttgtatattaaagaccacatttttatcttattttatattttattaatccagaccattaatgaaacatttagaagaaggaaaaaaattagtaattatataaatataaattacataaaccaaatgtcattcgaagtttcatgggtatataactttgattgaaaacggaatttgactccggaacaggacaaatcttggtgaaaaatatttcaataaagcaattttaggcaatacatgtacattcttttggttgactttatgaatgttttttttcttgtgtgtgtagttaagtagactcatgaattacgactgaggccactgatttaaaaaaaacatataaagatagtggatgtggtagtgagctcactatcacattagttttacgtacatgtattattaaacatgccgagcaattagtgtgtacttattctatattctcatgatgttaggatttgaattgaatgtgtgtgtgtgtgagcctccatagaaattaacaggaagacataaagagtcttctttttttcattggtttagtggtggcatgagtatctacttgatagcagccaatctttttatactattcttatctaagtaattaatagatatatatccttttttataatgggttcctcagccgtgagtaatatacttagctcccacacttacctaatcttttgtattttttttttcatttttgggggaaatgattatgattattgctgatacattacaatatccatatccgtttccacacgaatacctttagactttggacaatactataaattaaaagcttacaaattacaaggagctgaattcttcttttggcgccttccattatgcacatagactagtccaagtataattgtacacataattaatttatcaaataaaacataattaaaataaaagtgtatatatatatatatatatatatatattaaaacatgcgatctttatctttggaataaagtgggggaaaagaaaaaataagcaaacagaaagaagaaaaatgaaagcaacagcagaagaagaaaacaatggagattcatattgttcactcttactaaacattttttcttacatctcaatcaaaagaaatgaaaaaaagaagaaggaaatttggagagcatgtggggaaagctgaaattgttataccaaaattagcgaaacgtacaattgaaaaccaatcggaaataatgaaagtaaaccttaactaatttcattcaaataagttaagagagttacttataatgtaatttcaaaatttaaaaaaaaattgggcaaacaatatcaaagatttaagctgtctccggctcgttcatgtagactacatgatgtagtttgtgtgtgcgtgaagcaaacataaacatggttctatcagtttctagattcatcccaacatgtttcttgttcataattaagtaatagtaaacaatccaaattaagatgatcataaagatacaaccatatcttcttgacccttaccaaataagcagttttttttttcttttctctttttaaagaattcgatgtggttccaagtttaggaaagaggacggaacttaagaagagacactaattaagtgacttaaaccaagacatggtgacgaaaagatccacaagaggcaaggcatctcgcggaatctgtaaactttttttggctgctcataacagacttttacgcttgatagtttctttagaaatatagttctcgttgaagactttaaatagctgatgattcttgaaatagagatcgaaggattgaaagcttgctcaaaattctctcattgttaataaataatcgtttaaagtcttaattagtccaaatgttgaagaaagtacagaaaacgatatatttgagtggtgctgctggaacaagtaggataaaatacgtacaagcaatacaaatctagtaagtgtacatgcatgatcttcaattcttgaggattttgtgggaaagattctgaaaactgtactggcttgttgaatattctaaatctaaaatacaatttatcagtaagtaagcaaacatgtgcgtcaaagttaatctttccaagctgaaacaacaattgctgagatattaaaaagttcaacatactactcattgactttcttaacatttacaccaaaaagataaaataaaaaactcattgacgtttttccctttgaagttagtagcccaaaaagcatcaagataatgtctgtaagcccatgggcttatatccattataattttttttgtcaaataacaaataatatatgaaacgacgtcggtaacagctgaaacgacgccggtgtttgttgatccagaacgacagcgtttttagttattcaccctctcgaatttttccgaaacctgtgttttcccatcaccaagctttctctgaatcgccgccgtgtttacatttactgttgttaaggccgagagatagatagaaaaaaacatctgtgcgattttgccgcctctccctaaaatctttggagctccttcgtagttagccggaggtgaagtacaataaaagaaagaagaaagtccaagtgtctcttctcatctcttttctccagtaggtacgttttggtttaatttacagagttgattctaagcctaagagaaggttttctatcgattagagtgtttgatttgctgtaagggttgctcaaagttttgatttttagtttactagtgatagcagataatggaggggagattggctaatatgtggaggttgactgttaacgaaagtaaattcgtggaaactgcgttgcaatctgagctcagagtagatggtcgtggcctttatgattatcgcaagcttactattaagtttggcaagtaagtgctcatagaactgcttattgatgccgtttcttttctgcactttgtaggctttgtttgctttctttagctctaaagcttccctctttgtcgagttttgtgataaatttgaatgtagataactttgttcagtctattacctctgttagaacgaatactagcatgcttttcttttagtgtttgtaaccaaagacagcttttaatctcgtttgaattaacagagaatatggtagctcggaagttcaacttggtcagactcatgtaatgggtttcgtgactgctcagttggtacaaccttacaaagacagacctaatgaagggtctctctcgatcttcacggaattttctccaatggctgatccgtcttttgagcctggtcgtcctggcgaatctgcagtggagttgggacgcattatcgatcgtggtctaaggtaaatgtttttttggacaaactttgttgatgctgcaagagtattgctggctgttctggttggagtaatggtaagttggtctttgtgttgattgcagagaaagccgtgcagtagatacagagtcactctgcgttctagctggaaagatggtttggtctgttcgcattgaccttcatatcttggacaatggagggtaagttttgttggctacagtatatctcattgaaggttctggttttaaaatgatctttaatgcgtgtttttgttacacatttatgtataggaacttagttgatgctgcaaatattgctgctttagcagctctcatgacatttaggagacccgactgcactgtaggaggagagaatggtcaagaagtgatcatacatccactagaggttagtcatatgttttcggtttagagaaacttgtaagaatttgttaagtggagaagacagttcttaactttaactgtttgttctatctttactttcttttgcaggaaagggaaccacttccattgataatacatcatctcccaatagccttcacgtttggattttttaataaaggcaacattgtggtaaaaacagttgtatttttagtgagagtctagtttgctttttcttttttcttttctgagatataaagtgtgatgtgttgttatatgcaggtgatggacccaacttatgttgaagaagcagttatgtgtgggagaatgactgtgacagttaatgccaatggcgatatatgcgcaatccaaaaaccgggggaagaaggcgtgaaccagagtgtaatccttcattgcctgcgtcttgcttcttcaagagctgctgcaacaacaaagatcattagagaagaagtaaggtttctgaaatccaaagcatatttcttttgaatccaaaaatattcaacaactcatagtttgttgtgctttgttttcatggtgtaggttgaagcatataactgtgagagaagcttacagaaggtgaagcgacatcccactttggctaaatctgaagtttctggacctactgtagctgtgaaggaggaacataggaagtcctcagatcaggaaagagctgcagagatatctcgagaacatgttgaaagactaaagctctctacggaggaagtaagaagcagtaaggaagaagaagctgccaatttcaaaggcggtccctcaaattggtatagtcttgaatgtttcactctctggtttgtgaaggaacctccatgactccttgtggatctttcttttcaaaatctctgttgtgaaacaattttcagggacccttactcagaagctatggatgttgattcactgaaagtttctcttgcttcaagaggtaaaattttgttttttttggcttcttactcccaatgtctcttcgagtcatgctaaactgatactgttctgttttgtttaatcaggggatcccgttactaagtcatcgagcacgaagaaaatgaacggctctggaaatgcgcagaaggttggtgttgagatttcagttgaggaagtaaccggagaattagggaagaaggatacaaaacacaaggatggagaaatgacacttaaagatgctgtcaaacctaaaaagaagcggaaaaacaaaagctgagttaaagcattttcccgatcactcgtacttttcttcttcccttgaaactcaagactatagacggtttatggtcaattgtatctgaaaaaagtcaaaagttttgttaaattttgtttcataagatgaggcccatgattaaaaacccagtagatgagatttcaacataatatatttcagtaattaaatgggcctcctggaggaggaagcagggccttattaaggcagtaattaaatgggagagaggaggcttggcggcggagctggtagatcggagaggagaaagagagggcggagcggaggcgggtgagagacatgacacctgagttgcttaggggtttgttaattgtttgaaaattaaactctacacttcatttttggtgagactattgagcttaaacctaattcatcgcaccaaattgaattatgtttacatgcaaaagtgttcacatatataatattcatgtatacactaagcgcgacaatgtatggagaaggcatcaaaagcgtaattagtaaattacttatattaatagttattttattaaattttgaagtactatttttgtcaatacaaaaattctgcaacacattctgcttcaggaagaatgaaatcagtctcccaacaaacaagttctttacgaataccaaggggagtgtcggactgatgttagccaagttgattttttttttcatcaagaaactaaatgctttctctgagtttgacaggaaggtcaagatcaggttccgtgggagtcaaggcacagaagtaatcatcaaccatgtcctctgatactttctccaagctcggtggatcccactgcacacccaccaattcttatcagtaatgccttccttatgtacacagtaatggggttattggaaatatgatttaacattatacctttggtgcttcatccttgtctatcaatcgagctcgtactcccttttcagtattgaaacattacgcattagtgactcattactctgtttgcaatggcaagctttttaatactggaaattcacatacctcacaaaaattgccggacattggcccgattaatccttgtagcgacattctgtactctcggattaagcattggtcaagtgtttgtaatcttccttcccggatctgttggattcgttttaaagaagctgcatgagtcatgaaaaggaaatttgaattttttgaagatttttacaagcaaagttgattgtgaacttacagatctcaatgccaccttcaaagataacggtgagctttctttaagtctacgtagagtcgtaatgcaccatgtatcttttcttctactagcctcgatttcctggtgacccaaaacactgttacttctagtgaccgagatggtcatactcgcagaatcattcgtaaagaaacttaccaaagaatcaataatttcttctactgtgtcatggctaaagcatttttcaagtaaatcgatcctaagaaaaatcagaaataaagcaagctcagggagctggtatgagaatacaaggcatgagttttgtatcttcaggtttcagaaaaaacaaacctacgaataacaccagtcttttccggatgggcaacttctgcacatttttctaagcatgactcaacaacagaaggatcatcagtgagcagcttcttgagctgttcttccattacaggaacctcctgttgtaggacaagaaattatactatttagcaggtaagataagttttatggaaacagaaagatctcaaattatataatctaaattacctcacttctaatataatgtgtagcaaggccacatgccaacatttctgccccactgagctttaacccagtcagacccagatactcccctgcatagactctattaaatcgtccatctgagggagctaatgtatactatgaaacagcagaatttgatatttaactttgctgctggatcagcgatttctatggtaattgtccaaataaaaattgctttacagcagttaataacacagtcaaatgagattatgagaaacctagagagaatttaagcagttcaaaacatatcactagcatacctaagcgaccaggtaagtgggagaggttaaaagaagcaccagcatcaggatgaaaaccgatgattgtttcaggggtagcaaaaatctgcaatatccatgagctagttactgcatcctccaagaagttggacatccgaactaaactagaatccagctgtccgactaattgaaaggaagaaatagatggtgaaagatggagaaatagcgtatagatgagaaattacatacagttctatcagtagctacacgaaatgtcccaggtatcgaaactccagttccgcctcccatagtaacaccgttaagaattgccacctgcatgcagagaaactcatggtgtcattctacttattggtgacatcgttattcctattggtaccggaattcagaatgatcaaaaagtaaagagaacttacatgtggctttagatatgtgcctagcaagtatataaaactatacaaactcgagaaaaactccctaatagcatccgggctacctacatatatttaaggagaaataagtaaagcaatgagcagtgaatacagagagtaagaagataccgcagaaacctcgctaatcagtaaaaaaggcatactaagtttcaaacccaaatatagatacctaaagtactacaaaaagtggcaagtattagattaacatacaccctcccacgccatttcatcttcatgaataaaactccctttttcgtttacgaacctaactagcctccaagaaattaaataatcacaatgtatacagaattttcctgtacctctcgttcttaaatggtagagagacacaatatcaccaccagcacaaaatgcccttccactccccttcaacagatcaagagaaataaaagttaggaactttttctcccctcaaacacaagaaagtagaagcaacaatgtgttgcacaaattaccttcatcatcacaaacccaatatttggatcttcttcccaattcttataaagtttctgcaacctatatccctattcacaaacacacacaaatcaatgtctcatgccacgaaatcatatatccatcaaaagtcgaaaccaataatcaatgtaccaaagaaaaacaggagtagtagaaaatccaaaagttgagagcgagagaccaatatatacaattctattacgaaattgaagaatccagcctcgaagagaccacaattgctagtaggagtgaaggaaagatacaaacagagaacagtagagagtaccatgtgagtggtgagtgcattgagagcaggtggtctattgagaatcgcagtacgggaacaaccacttccttcaacgagaacctaatcaaaaattgagctaacgatcattcaaaatttccgtaaattgaaacagagagtgagaatgatgacgataaaacctccgaacctggtaatcaagatcctcggaagtcaatttaagcgagcacaagctcctccgataaccaaatctccatagcttatctcgaacgattcgtcccaacaatcccttcgcgttatgcattcttctttcgtcttcttcttcgttcaaaactagagaactctactctcttatttggcaaaatcaaacatggcggatcgattttccgttttcgtgtcgtggcgagtttatcagctccgatgccacggaagaacctctagcccagacagaggtttctgactcgtctctcactcctgatgacgtgttccttcttttggggataatgggctgatcccgaacctaaatttagtttactgggcttcctatattaccaataactaatttaccatagtaccctttcctatatacgtgtttgctctcaaatttcaatcgtctgtttgtgattcccttttgtctaataaaaccctaattttgatatttcacattgaacataacaacgtcgtcgttttggagtggagacgtagtgacgacctctcatctttttttttggtaaagcaaggacgatctcttttagcaaataaaaccaaatgttttcatgtgattatggtgatgtatgcattattctaaaaaggattagaaatgatgcggtttggtcacatgttttatcactttgtttaagcgaaaatagtttagtgacaaaaggaaattaaaaagagaaaagacatggaacgaatttgagtggcagagaaagaaggtggcagcttttagtttttgttatagtattattttttattttgggtccaaaagaggaaacaagacgaaggactaaaaatgtattaatttctcctgaagaatctcagcaatatatgtggatcgatgttcgtgacactgctttgcctgtgactcaattcatataatttgtgatattttcatatttgggtcctgcacacggtgagaccatgaacagctataaatatgaatgagggtgcatcattagatatgtttttggatctgagtcaagttatatgtaaagcaatcgccatgcgaatttctcatcgcggtggatttaatctactacactatatatactgtatatgtgtaagccttttagtggtcaaatgtctttttcaacaaaactattgatgactactcgactaatcgtatacaacaactactttgttagtatctcaatatttgtgtgactatgacgacgaacatatcgctttgatgatttgaaactaagtttagctagtaacgtttgcatcaaaacaaaacccttatttactagagggccacatggaatacctaaagcattcaaaacatgtactaatgtatgagtcatgacacacattttacatgtatttgcacgaattcttaatccaataaacacacttcttaaaactagctaggaatgactcaatcatgttaaaactcaaatctaataatagtggctccattgattaacttgtttttaaaaaactaaaaaaaaagtgtttaaatgattgttaactatatgtgtggcttttgaatagcgagagaatagtgtcatcatatgctgatcatgaaggatagcaacaacaaaactcacacacaaaattcatcgcttatctagtaaaatcaatcacccaacccaaaaaaaaagagagagatttcatttgttatagatatacttaattaatttatctcaaacacttactaatccatgaaataactccgcaggtatattacattgcttctcaaaccataacaacagctatcatagccctagctagttttatatatcttacagacatgtgtcttattatcatcatcccagatcctaataaactctctatgtctctcttaacttttggttatttcgaaaacattactaacacataacatccttgagaagcttgtacctacgagtggccggtctaggagaaggcacgccagtttttcccttgtcggctgctggaggaatactactactagtggtttggttaatctcttgctgtttgatttggtgatgaggtgaagaatattccgaccggtacgatctcttagacgatccaccattaacaccgtgttttgctccggttcgactttttgcttcacactgacaccaatcacagatcttgattggatcagcttgctctttgtaatagctactacagtacctgtatcaagattatgatcatggtcatgaattgatgatgataatccatgtatatttatcatgtatatgtatatatggtagttgttgagacatttcttgtctagtttgacaatatatacacacatatatgtatatgatatatgcatgcttttgatttaatatgatgatgaatgatcatcagctacatagatataaagcacgtggcacaagatctcaccgtctactgcgatctaaatctgtattatatgctgtaaatatgcatgatgatgagtaaattacacacataagtacatgtggtatagagataaagaaatatgtaagaacatacgagtgttgaaagcgattaaggcacttgctgcagtgaaagagcttgtcgaagaatcccacatcaccacacatgcaacacactcttctttcaagatccaccatttttgtttccttaaattagcagaagacagacggagaatatgaaggagaggaagagttggaagagaatgagagagagagagagataaacaaaataaaaaagggaagaattgattctataaagaaggagaaaaaaagatatataaattggttatggaaaacttattatattcgcaagtcggtccataaataataataatatttaaaaaaccaagaaatatgttaaataaataataaaaaagtataatagcgtaataaggcaggtagagaccgcaggttgctttgcagtcgttttcagttggagcttgggaggtggagaaacaaagaaccttaaattataaaaatcgactatttgtaaatgactattttgcccttgtttttttgtttgggatgttactttcgtagcttttttctgtcttttttaggaatttgagaaagagagaaacttgtgggatgcatatctttgactttatctccgttgagagcgtgatagacactcccgtttggttagaaggctcataattttacaaatagcattttcttctaactaattatacaatttttaaataaaaaatttgttgtatttggtgaaagaaactctgatctcttcgtgaaaataaactgcttcaaatgatttgtataattatggttaaaacaaaaagaattgtttagttaaaacttgaaaacacgagcatttagaaatctaatggtttcagactttcagtctcctaatgaaaaaaacaaattgtctgagtcccctagattgagaatttattatgatcactgtttatttgcacgatgatcttgacacaataacctgtttagttatttactttaacatcccaaaaattatgttttatccactatgaaagaaagtttcaaaatgtttttatttcatgtttataaagagatccacttttatgaatccatccatatctaatctacacctatgcgcttacacgataatgaatttaaagtgagactagtcaactcattcaacttctcgtgcgccacattaatttcttaaatagacttttatcgaatcctaagtctttagttcgttccttcgttcgttcgaatactttttatatcatagcctataggtctagaaaataaatgtgactgatgaaacttcttagcaaatatagcatggaaattaatgtattcacatgaccaatatcaaagaaaaaatggtcgcccatgaccaaataaaactaatcatgtacgaattacatcacgtaccatttccagaacactctaattgtattaaataaaatctgtagtgtatctatgtgacatactattgtgccactaaaaccgtgtgccatgaattatatatgccgtgaaaacttacttatttaggcgtgtataaatgtgattggttatgtatttttggagaactagataagattaatcacactgacttatatatatatatatacacacggtggtattttagtgtaaatcgacaaagtggagcccattgttttttttttttcttgggtgtatatttacattgggaaaaaatgtaagttttatggtaacacatatttgtagaaaagaatagccaattcgagaatcatgctataataatgccagtcaactctgacaacatttcttcccaatatgtttgccaattcacgcgacaaaacaagaacacatctaacgtgtttgtacaagaagaaaatatcataaacctttcagacgtagatttttttcactggttttattcatgtcttagtttagtttacttagttcatatccaaagagatagtaaatgtaatcttactaacaagaacttagttcatatccaaagagatagtaaatgtaatcttactagctagttaaagttaatgatctagtctatctaatttaaaaaacgaaatgtacggatatgtagcaagaattcatttattcaaaaacgaacgatcgatgttcatttcatgaaattgtcatgacattttaaaagaggatacacgactcagaagaaaacatatactatatactatcttcattcttttaatagagccagcgaaatgagtcactttcaactgttcaattatatacaacagtaattttggtgaatattgaattgtaaagtgtatgtatacacaacacatgtatcgtatgtagtattgcagatgtagatgaagatatatatacattgaataataaagggaaagtagggaaaattcataaaccttcgtaagaggctatgtatgtgaatgtgagaggcaggccatatatgtggataatttagaaaatggacacaagagaagagactctgttccatgcatcgtaatatcttccatgcgttcctgttattacctttaaggggaccatttctctgaacaccttttctgtccattaatctacaccttacacgtgtctgaatcgaaatatctcagctttagcgttgtgttaacggcaagttcactagaagtcacagcgcgtgtgacctactctcactataagaagatagactatttccgacggacgaaatcgtcggaataacattggaaacaaacgtattcgacgaattttcgacgatattgattggtcgattctatctcgtcggaaatctgaatgtcgtcgcaaacgtgttacaaattctcgacgggtttccgacgaggtattttccaacaatttctctacgcttttctgacgataacattggttgcgaaaccggttggaaactagtcgaaaatgatcgtcggatcctcgtcgaaaatagtttccgactattttctaacgaatattgttgtcaagcattgcatcaaaacgttgttgaaaatcggtcggtatcttcttcgacggtttcccgatgacgttattcccgatggattcccgacgaagtatttccgacgggatacacttaaaatttttcatattttcaattagtatgacgataaaaggtgatttaaaatccagaagttgtaaaaggtaaaaatagctagtaaactgaaactgttgattgaacttttgattaaaatatgagtaatataacaaaaaattaatcatgttgaagaaatacatgttttttattcttctaaaaaaaagtcacacaacttgttacaatttttaaaataataaacttcaagttactttttttgcaatatctaatgcaacatataattcacatttagtgataaccgtatagaacgtttgttcctcattctaaattgaagatttcgttgaaccaagttccaaccagcagcttctctgcccaacatcgttcatctctattctgccaccaaataagagaaatctcaattgttaaccaaatgtaccaagcctttgaccaaaaaaaaaaaaccaagtgtatcaagcttagttgttaaagaagtatatgaattacacttttaaagtaaagctacagattgaagaagttgttacctcgaagaagaaaaaataaagaattatttaggcacttatgctaaatggcatatgctaaatgccaatgtctcttcttagatgttgtatacatagcgaactccaatagtgattgaatgagtttttggatttgagaaagagagtcagcacaagtgagaagaagatagtgagttcgtcaagggagagaaaaagcaatttcgagtcttttaaagatgcagatgaagcagttagatgaaaatcgtggagtagaaacggtgaagataggagatcgtggagaagaacaaatattctggtgtcaaatgatgtggcaaaatatgatttgttattttacctttgaatttttttcatcttcgttaatttccttacttttctgataaacttgccatatgtcaaaatttgattgcacatttttgtataacgatctcaaatttcttttacagattttatgttaattatttaaattagaaaaaatctatgtggcaaattttgattggtcacatgatttgtgaatcaaatttgtgaatgatggtagaagaatataaagatgagaattatcaatgttaccaattatcaatggtagaagaatataaagatgagaatcaaatcagtgacggatttccgacggacttttgaatatatatatattttttttaaaactaaacgcacggctatttgaccgggcaactatttaaccggcggctacttgatcgagtgtattttgttggaattccgtcggaaaagtgcagcatattctgacgaatattcgaggggtcaaaacggatatattttggtcggaaaattgtcgaaatatttggtcggatttaatttggtcggaatttcgttggaaataactgaagaattttcaatcatttagaattcgtcgaaaaatttcgacaatattttgacgggaaacatgtcgtcagaaatccgtcaaaatatcattacaaaaccgtcgaaaatttccgaccgtttatttaccgtcgaaaaagttgtcgaaaaagactttgttctcttgtagtgtctcttcgtggctcgaatcggcgatgaaatgggtccggccaaatagtagcgaccgttcacccgattctttgtgggagtgggactcacatccacctgtcaccatctccctcagtaagcaattgacaccatcaattcttctgtcttcgatagatattcgaggaaaaaatctcagaaaaatctaaaattgattaatcaaccttaacgtacaaaaaaattgatttgattaatcataaattaacctgcagagtattattgggttgtcccgtaataaaagttgattcagtaaaaagttgtattttagcaaaaacaaagaaaaattcgtgaatgatgttatggagtatcaatgtatgcgttatgaacatggactgttacttttatttgatgtacgatcgaatatacggcgttgtcatctgttacatactgtacttacgtccataatggatagatcttttctaaatgggcttatgatttagatatgacggcccaattcaaaattttggctttgccggatatttccaacgcacatcaactcaccattccaaaaggctactagcttatacgacgccgtttgtgttttctgtacatcttatgtccgacacatgttctgtgcttaacaatgtcccccaagtggtcgtcgttgtcgcattcaatggaggttgggccccacggcccataattatattcacaatacaaacagaagcccatttcacatcaccttctcgctatcttgttgtcttcaaaactgttgaacttgacgtggaaacaaacgaaaccgaaaaagcttgcgtggctaaatcattgacgtgtacttttagtacttcactggggcaagtcttccgctgcagattccaaatattcaatgaaatacattcgttctaactggttttactactaaattctatgctttgaaataaatctagtttacaccacaatggttttatttcacggacgtcaataaaagtcgtggaatcaatcttttattttgtgtttactacaacataatcagattttttgtttcgttttgttctggaacggttctaagcaaagaatacataatcagattcttattactccgatgaattcaaaaagtaatatgtagccatttatgttatagcacaggaacgaaatagattattgaaaaaaaaaaatagattactgaaatgattcaaatatataacaattacaacagactgatccatttaatctattcatattacagtatcacaacttcactgtcatgttgcagcatacgtttttaacaagtactgttgttttattttttgacaatcaataagtactgttgtttaaaattgttatcttttgcattactgattagctcttatattgatcggattcggctcatatctctaggtaatgtttttttttgctttttaaaaaccactaactatatactgtcgtcggttaaaattctgcataagacgtataaaatggcatagaaaacgaaaattaaccacaaaacatgaatatctcaatagtcaatacacaactcaattcacattattaaaaaaaaaaaaaagggggagacaagaaggacagaggatgagcataaggtcatcatttttgcatgttattcgtcagaaggataacattatctcaattagattaatatttatttacttaattaagaggtgattaagtggtgaataaagtacatactctagctagtgagttaacaaacatattattaaaacataaatttgtcattatgggcacatgaggtcgcacgtgtttgctttgggatcaccgccgtcacgtgattcaagaaagccgaactaggaatttgttggagtgaagcacgatgataatattcgtaggtacgtatatcatcaaaatgaatgaataattagaatcagagattcttcttatctcagaggacgaataaaagtaagtggaaccactaccactacgaaatcgaaaaagagagacgcttggggtgaagataatcgcaccgtacgtagatgtacttactatgtatgatacatacgatacgaatattatcatcgtgcttcatcacttcaacaaatgttttctcgcagaagagactgaaccatgacaggctgggtccactaagcattgtcacattctccctacactcgtttttctcgctcgtctttcttgttttcaatatttcacataatttagatatttttgaattaagtttgaatttctttttcataaatcatatctcttcattaaagagaaatctatttttttatgattagtttctttacaattgtgtttctttgtggtcagctaggaattctgtttggtcaacttattggctggatacttaccgacttacataattgcctactggttcttttagagacgtttgaataaaacaatacgataaaatagagttgcctagtggttaagtgtgtatgcaattgtgagacacccataattcaaaacttcaaattcatggcaacagaataagtaagctcggacagaaatgacaacaaatactatacaaaatttacgatgtaactttttcctactacttgtgattaacttttaaaagttttgcaaataaaggacaccaaaaaaaatgttttacaacgaaaaaataatcatatatgggtctacgaaagtgaaccttctgaatgagacagaagttgccagctggaaaaacttttgtcggtagtaaactaaaaattaaattgaataaaaataatttatctccgtagcttttcctctagtttcgtgccatcttggtttagaagttaatgtccactgcagtcggactctcaagtatgagtcatatagtaaacgaataaacgatattcagaaatgttgcgactattataggaaaatatatcacgtcatcttacgattacgattacatttgtttgtagtaactaaaaacctagtatatataaaatctttcaaagccaattctcgcttttttgtttttgtttttctattaccttcttcatggcttcgtcttcttttttttcttttctttttccacaacttcgtcttcttttatcttgtactttaactacaacaaatcttctttatcttcgaggaacgtgaagatgagaacggtccccacatgcagccacgtggatttaccgattagtctgtatttttctcttgtaatacttttacgtagatattataaaaatattttcagcttcagaacttttatggataggccaataattattattgtcggcttcgtatcataaatcactaatttataagccaaacaaaactctactatagaaagaacgttcataggactatcataagaagaagtggatttgttgcttttggactagcatcattcttaaggtttatgttagcttgctaatgttcttagatttggatttcgagctttcttgatatcggcttgaactttatgctttgtatttttagtgtatcttgattccattttagtttccggagaattcactgtttcttccggcttaagccaaacaaaactctactatagaaagaacgttcataggactatcataagaagaagtggatttgttgcttttggactagcatcattcttaaggtttatgttagcttgctaatgttcttagatttggatttcgagctttcttgatatcggcttgaactttatgctttgtatttttagtgtatcttgattccattttagtttccggagaattcactgtttcttccggcttatgactttggggacttttagttgtccgctgacttagtttccttcttttgggcgtttggtttcttgtaaggttccatctcaagttctaataaaatttctagtgacaaaaaaaagaaaaaagaaagaacgtttgtggaacagaccaaacacttcaacacgttgcgccacgctattctgcgaaccttcaatcagtttatatacaattttgttattttatgaattatgatgatatatgtgacttaatgtattattttgtattaaattttaacaaattcatgtattgcagttgtaaaagagaaaagaaaaaggagtcactgttctcacatcaaagccctgcagagatatttctgtgtactctttaaaactgatgcctccatccaaagtacaatattggaatatgtttttactgcatatacacgcaatgtatttacctaaattctaattcaattgtaccttgtaattagatggttaagacataagaaatcagatacatctgcccgaattagagccttatgatgattggcggtgccacataaaaattgaacacaagatagtgatgcatatgaatgtttatattttagccgaatatgaacacaatgttcgcaacaattggttccccattctttatatcatatgcatgtgccgtgcgtgtttgtacatatatgagtagtttctgtatagttgaaaaactgaataaattaatgaaggagcaatgcatgaaagagacataagaagataaatgatagggaaaaaatatgtatatataaacctaaaaagagggccataggaatttatagaaccaaagtgcaatgcacttcggatcgtcggtcgactcatctccttcattgtctccatccattttcccattccccactacatttttatagttatctcttcaatgtttaaaataatatgtcaaaacaactctttatcaaaactaaattttcgttacttctggtagtaaggatatttctaaacgttatcacattagttattaatcaaacctgtgaaagacatgctaggttactgaagaatgatattagatacttgtgtacactctattctacaacgatcgaagctagtcccacttctgtgtctctttctttttctgtaagtgtgattgcaaaatgcgaaatattcatgtaagcacaagaaacaagatagttatacattcgcatcactttgtattaataaattgttgagccaattttgttctctatttccttgttttggtcatgttgaaattcaactctatgattgattacacattccggagaatattattttattttctttgaacaagaaaacataaaaaaaaaaaaaaactcaacgggatactaaatgatccaactcacaaatttcaacaaaattaagaaaaaaaatcggaaaacctttttaggagatggcagaagaatttaattaacaaaagggagagaggcttattgaaaaaaataaaattagtaaccttgcatttatttaatttccccttcattacttgtttaaattaataaaactatagactatgatctataatgagtttattgcaaataaggcatttgtcttagatatatattttattttaggcacttttgaaatgatctttagatttaggcacttctttcctggggaaagtcgtttttacccttacagagagatgatgttgttctttctttgttgatgaacttttacgttttacactagaaatcaaaaatacttgcgaccaacaccaacaactttggagtcattgattacagagtgatgtcagcgacgattggaaattcagacgactaacaatcggtcctcatgagatgtgaatgcgatctagatttttaacatcccacattttgagatctggaaaaaaaaaacaagaaacaaaaaagtcccacgatttagtattacgatttgcacgtttttttgttcagtgatttttgtgcaggttaaggaattcaagaagtgattgatactttgttgattgctcaattgatgttcataatcatgtctacaagtacattgatttttgttcatgttaatggtgtttgatgataatgaggatggttgtagtgttgtgttattgtgtgtatgtaagaattgcatactctatatttgacggtttgggtttacaagtctaattctagggtatagcgtttaccattgacgccgttcgttacccctcgttgtcaaagccgtgaaccaccaccaaatctttgtgctatcgtcaaagcttcatgcctaccgtcgaagctgcaagtccactatctaagccatatatctttggatgtcaaaagaaacttaaaattgaatcagagatggggatacaatttttagaagataaacacattcttttcacctcattctcaactccagttcatagtttaagggcaaaaatgtccgtaacaataaaaattgaagtattatatgcttttactgtttagagtgtctgttttgaaagaaatgttttcaaaatgcttgtttagaatataagctcgatctataatatatgcgtttttaaaaaaagactagtatatgcattatgtaattcatggttaattaatcctctggtaagtaaattaaatagcacatgcatgttcaaagaaaaatgtagacaaatatattaaagtggataaataaatagaaaaaaagggagtggtcaggtcagtctcggtgcatgctaactctatgcacgttctcatcttcgtctctttcctcacttacactaattctctctctctatattaaacctctgaaccagtgaccacatacatactcagtaagcgagtccgagtcaacaatggacgtctacggcatgtcttcaccggacttgcttcgtatcgacgaccttctcgatttctccaacgacgaaatcttctcttcctcttccaccgtcacttcctccgccgcttcctccgccgcttcttccgaaaaccctttcagctttccttcttccacctacacttctcctactctcctcaccgacttcactcacgatctctgcgttcccgtacgttttcaaatttcaatttaccctaattttgattttgattttgaatttctaagttctgattttgagttttgcagagtgacgacgcagctcatctcgaatggttatcgcgattcgttgacgattcattctccgatttcccagcaaatcctttaaccatgaccgttagacccgagatttcattcaccggaaaacctagaagtcgccgatcaagagcaccagcaccttccgtagctggaacttgggctccgatgtctgaatcagagctttgtcactccgtcgctaaacctaaaccgaagaaagtctacaacgctgaatcggttacggcggatggagcgaggcggtgcacgcactgtgcctcggagaaaacgccacagtggagaactggaccgcttggacctaaaacactttgtaacgcttgtggagttcgttacaaatcagggaggcttgtaccggaatacagaccggcgtcgagtccgacgtttgtattgactcagcattcgaactctcatcggaaagttatggagctccggcgacagaaggaacaacaagaatcttgcgttcgaattccgccgtttcagccgcagtaaatttgggggttttcttttcaagggtttttgtgatttggtgacgtgtcgtaatcttaacggtgatgatcacgtgaccgacgggaggggttaaggacttaattatcagtattagtttaaagtttgcaaatctctgctaattaatttgttggtaatttctattgatttttttcttgcttttgtttattggtctcacggctctccttaaagttatatcattaaatgatttcattggcggcatttaattttcctcttttcagatataaaagcttctcaaccaccatggactctgctttttgtgacttatgatgttatatcacacatgacaatgctggttaatcttcatacatacatcatacatgttacatgcttgagaatttgagtttttggcatttcacgaggcaattcagtttactactttcttaaaaaatagtaacctaagccataccaaacctaactctctctggtttaggctattcaaatctaacaatttttcgctttattccatctgaaccaaaaattaccaatactcttatacaaagtgcttaaacctcttataaataaactaaactggttaggcggtaacaccgaaacagaacaaacaaatgatctgaaaattgaaccataatgtggtgtatagtgtcaccgttattcaaatccagaaccccgacagaccgaatcctaatagaaaccaaagcaaggtcttaacattaagatatcgaaccagaaataccatacaaaactaatctaatttggttaattttccgcttaaactatcaactaaaccaagccaagaaaaaagaggatcaaatatatgtataaagaaagacaaaaattcaaatatcaagaaactgcaaaaatgttgaggtcaattgagactactcaagaaaacaacaacaaaactcaaaacatgaatgaaactactatactgacaaaattctaaacagtgaaaaagggtacgatgacattgctctgtatgtatcgtcttcatttgctcttgacaaaatagagcttacccatgacatgaagaacagctacaaaagcaatgaaaccaatgctcatgataagaacaacatttggagatatcttgagaccaggcgcgtcgtctgtgtagaactgaagcattgttccagctccaccaccggcgctgctgctgccaccagcaggcttcctcctcctcatgcttgcagttgcagctgcacttcctctctgtggagctccaccaccaaccatttttgcttcacttcttgtttttcaactaagtcaataacaacacaaacttaagaaagaatgaagtagaatctcaaatgtttataaaaccatagagatcaaagatgaaatctatgaacaatttggcttaataacagtgtaataattcttgataatctgatccatattgtccaaaaatcaagattcatcatcacaaccgaaaaaagaagcaacattgggcatgcagatcaataaagcgtgtcataatcggacaagtccaaatgttacgctagcgaaatcaacatctagaattctagatcagacaaatatatgcgagcatgttacaaaccctatgcatccgatattcattacatctgtagaatcttcgatcgcaaaacaatcaaacattgcgagatcagatgaatcataattgtctcttagattcacgagattcgagtaaaagaatttcacctgattcggcttcaatttctgattaagaagaattcgtcaatgaacgtaaatcgcagacttgtcgactatttttgtttatgaattgaattttttcgtttgttctgaggcttcgttcgcgtgacgaccaataatataacgccacgtggttcgttacatgtaagacatccaattttatattgacacgtggaagacaatccgtatgtaatgtgaacatctttatagtccgcgtctttgcgacgttgcctttggttttaaaattcgttcctagaaatttcttcaaactaattgagattagagacaacttgttataaacaccttcaagcataggcccaaagccattttctcttttcctatttattgggctggggccgttatttgagcatcagtatgatgatcctacgactacgagaaggatgaaaactctcaacaacactaattatcaggatagctgaatctctacggctagatgaattttggaaattggaaaaggtatcaagccacacattcttgactaccattcgacaacacgagtgcatcaccgacggctcagaactcaaaggaaaaaggaccactattttgttattacacttcaagtttcagataaatgggcttatatctgaattatggcccataaaatacgggctgctctgaataatggcccattatccgcacttcctttttctggttactctgcaaggaatggggaatacaattagttagatacgttaattcttatttcaatttaagaaaattaatcaaatacggtttgctctgaattattgccgacgagaaggatgaaaactctcaacaacactaattctcaggatagttcaaatttgtgttttgactttttagttttgaccaacacgaaaacattaatcagtcaccaaattacaactttactgaaaaatatatgattctattgctttgtaaatatattttctttaatcatcgcattcattttatgcacttattgataaatgaaataacattatttcgatacacttaaacaatttttgggttcatccctagaaggctagtgttgtcaattgaaatctgctgtatatgtatatcactgtattgacacagtattattatgaacaatatagtccaacgacaaaggtagaatccaacgaaaaatgagaaatcattggagacaattttagtttaatatatcgaagcatatatgtatacgtcgcatataaacagtataaaacactccaacgaactcagtgtgtatagtttgttgaaaagtagaaagaacataacttcttgtcattttaataaatatagtgtagggatacacagacatagatgtcaatcttaatataagtagacaatgactacgtacaacggtacaagtagttatagtttgattaagagatgatcatatgtggtttttttttttttttttttggaatctgaattggacagtgcaattgatatctttttttaacaatcttaccgtaaactctatatcccttacaatttgatttgatttgtttgcattcagatattcattcgtactacaaaacaagaattttgatatactattagattgatggatatgttagttcgtacggtagtggtagattggtatagcttttttatcttttcgattttcagaccatttagtacttgtggttttattgcgtccacattacaagtagactattattattattacccatacggattttagatttttagttatccacataagaataaaagaatgaaaaagaatgacgtatatagtttctactgaagaattgcgtcctttttttttccggaggtttcgttctgtttctgttgtggtagtcttctttgttggcaattggtttctcctccttggtgttggtttctgtgtttgatagcttcctccttctttcgtcgtgcttgttctcgatgaaggttctcgagaggttaggcttcactccttgtacttgcttcagatcttttctgttagccttttgaaggcttctaactagacgcaattagacgcctcagtcgtcgtcgtcgcatccggaagcgttttcgagtttcttcttgtggtttggcttgccgggttatgaagtcctagtttctggtttcgagagattggctctcttcatgataggaggtggcggatgttatttcgggttggccgtgggcagccgtagtaaatctcttcgcaggtgcaattgaggaggagtttttcttagccgcttgtgactattgtttttttggattttagccttgttgcttctgctattgtatttggatacatcttctttcatttagggtctctgttttgctgctttgtggttttagggtctttgtttccctttctttagggctttgtttccggggatgttttcgttttcctccggctttgattccgaggattttaacttcgtccgtcggctttggtttcctttatttgggcattgtgtacttccttggttccacatcaaattaatgaatataatttcagtttagtgacaaaaaaaaaagtttctacatcactacataaactaggtatttcaataaagacgacagtacttgataagttgatatgtctcaaggcaatatatgcgttgcacatgcaatgtattcttgatggtaaccagtatattatacctatttagacggtgggatttcagaccactctctcttctgcgaccgatgttgacttgtacctttgttgcattaccaaaatctgttattcacataacaagagaaaaaccataaaattttagattataaccatgaaaaacaagttttcacatgatgaagtaaccgcacgtgtgggtctccttctggtatttcaaacttttcgactatgagttgacgagagtcacacgtgtgaatgacagtatacgtgtcatcaggtggttcctgaagctaaagcttctggttgtcaaagagactttgcactacgctgacttctcttcaccttcaccaaactgtcggcggcgattcttagtttgggatttgtttatttgaagtactttggatttggttatttaacataattaaactacaatatgaaagaaaaatgcttagctgttatatctgtacgtttgcttacaaaaaggagacacccaaatcttttaaactattttattttcctatagcagtttttattaaaaaaaataataatagaaatgcttgttttagtagcttctttccaccttcccataagactccaaaaatcgatgtcgtttctctttttccataaaattccatttgaaattcttccagttgtatatatataattataggtaatatattaaatatttgttgagtctaatttatttccgtgtttcagagatttgtacttgtttgtttgtgtattttgtgatattgcatctatttcggacaatgtaaaaactgtacaattcaattcatcactataaatatttgatctcctaaatacatgcatacacctactaattaacgcgatgacgatgaataatttttctaaaaataagcaatacgattgataaaaattaaagatacaaaaagaggcatataaccttttgattgtatatgatttgaaaactttttcttgaatcattaaaatagcttaattaccttttgcataaataaactaaaattatacgattttagatgcaataattaattccaaatcttaaaacatcatttcctcataagtcataaccttttaacttacacttgtaattttgttcaacatggattactgagatccgaatctgaaatatttatacctaatcaatactctgacctaccgtacgtatgaaactgtatttaaattgttactacatgaacatgatatagaactatttttataacgatataatacacacgaaggttagtaagattaacaaacatttaaataaagtaatcattaaaagaaacgacgatgaaggtacctaatcgttacattagaaggcttgtatataaaacctcaacaaaacctctccctttcacttcatcacttcaagtcttctcttcctcgttgatcaaacattttcaagtactttccggcgaaacatcaatggccgtttcgaattctttaacaatctctccgaggaaactccggtctgatctttactcatactcataccaaaacaattccaagacacctctggttatctctgttctatcgtcactgattgatcgaactctgactcgaaacgagaggattagccggagagctttgccttcctccggcgccggtggcaaaactcagatctttgattgccgagaaatccctgatatgaccatccagtcatacctagggagaattttccggtacactaaagccggtccttcggtttacgtggtggcttatgtctacattgaccggttctgtcaaaccaatcccggttttagaatcagtctcactaatgtacatcgtctactcatcactaccatcatgatcgcttctaaatacgtcgaagatttgtaagtatctaataaaaacttcaatttaaccaaaaaagtcttacatatttttctatttaagattcatttttttgaattggttacattctttggtggttttcaggaactataggaattcatattttgcgaaagtaggtggactagagacagaggatttgaataagttagagttagagtttctgttcttgatgggatttaagctacatgtgaatgtgagtgtgttcgagagttattgttgtcatcttgaaagagaggttagctttggaggaggttatcagatcgagaaggcattgcgttgcgctgaggaaatcaaatccagacaaatgatcattcaagatcctaaacatcatcatcatcatcatcagcttgctcgaatcttgttgtagagaaaacaaactctgttttgtttttagtcttagtttttttcttttgtcgtttgtgcattgtggtcttgactttctgacaaacttgttggttagagtttcttttgtttttattttatttggtaggttgtaaatgtagatatagaagcgtagagatgagcggtgatgtaaagtatgagattcaatgtcaattgaattttttgtaacatggttcaaatctatgtccttgcattcagctaatcaacatacttatttcaggtctcctaaggcgataaatttagcctatgtattgtcatatccaaatgtgtagataacttaacttcttgaatatttataaaaaaattgcctatataaaactaaacgatatcttatttgacattttcttttgccaatgtgtatgtatataactatatatctgtatgctaaaagataggatttatgtgttgatttggtgtctaataattgattaaacggtggcttacatacatccattattgccaatagttataaaattctttaacaaagatgttttatactttctatgtctattagacgcgcaccaacttttcttaatataaaatatatcaattataattatagtttcagattaattgaatctttctcatttttgggatgtaggaaaccatgatcgtgtctagtttcccatataaattttcgactttcaaagtggtaaaagaaacgcatcatcaacatatttttgtaggaactcacaagttagcattgtatcttttcattcttatgccagaaaatagtagaaaacgtttacatatatatattaatcaaccctaattaattattatgccatttgaataagaatacaaaatgggttctgtataaatttatcataatccaacacaaaaagaacagtgtagtgtggttcacgagcatttacctaaccaaaggcatcgatcaatcatttggcttaatcctttgtatcaagtatataaaagaataagattaggatcgatgtgttgataagatgtctaataattgcctcaccaaaggtataccacactaatttgtatacccttttttaatctaaccttgacattgtctttattcgatattttaattatgttgatttaagttatataataatgctaacaaagtcttacaaattaaaggttcgaacttccacaattgatcacacacgttaatcattatatagtttaggagaactcttttttttttttttccttttaatgggagatatgtaatttgtagaacgtattaattctgatgaacagacgtaactagcctcttattttcttgcagttatcattttggttagttgtcctgttagttgacttgattattgtttaacaaattaactcaggtgggggataatagggtggggtttagtggttggatctacgctttttaaccaaaaaaggttaaatggttggatatagctgcgatgatggtcttaagggctattgttaaccgaacgagttggtggtaattttatattcgttgaagttggtggatagtagtaataattaatgttcttataattttgtcgtgaaaaactttatacttttgtatgtgtttgaaataatcttgaggatttcagatgacttgtggtttaagttattggataagcaatacttgttaaagcgttgtcagcccatttttctcagttgggcccaaagagacccaaacaaacccttgtatcaacctttacgggttttgattatcggcaaactgattattattttaaaaatcatgataaaacaaagtaattgtacgtatgatcaaaccctcgaaagtagaatagaaagcatcaggagcaaaccagatggaaacacttcgagactcaaagctgtcaatggagaaatcattacaaattctcaggagcatcactttactggtgttctactcaatacaggaaaaacatggcgccgaggtggagaagatgagaaccgatcttgatattgaaacgggcacaaacaaaagtatccaggcaatggatgatcacacaaaaaggctatgcacggcacttcatgagattggagctcaaactgaagttgcaaaacgcgagcacatgcatcatctacggctccaatctcatgaagtcccgctgttagcactcggatttgttctcaattgtagcatctaagactatttctttgccttttactgcgtttttagactatcagtttcatttgaatcgtttagatgaactatacgttttatgagttaaggcttgaattcccatcttatgatgttgtatatatgaagaatttgccaaattcagcttccatatagccacacatcaaccaagcctgatgtcataagaaactattaaaacattgaaaatatgacaacttcattataatttctaacaccttacattagtcatatttagattaagaagtgtttggttagaacttagaatccctaacttcttgtatatattctgacaagttttttacattcatatgtaataccccgtaactttttcttttgagtataatttaaaatcatattcaaaaacataaaaaagaagtgtttggttgtttgtagtgatggtgttttgcatagtcggaggattgtacatgacaacgactgtgtgcttggtttgagaaagaaaattttaggtttagagatcgagttcctttgataccacccgatgatatgaatgtttatgtaattgataatctttattgtatagcaagatgacagagagtagctagagtattgtagagaagttaattacaatattatactttacataaaagagagagtaagaagaatacataattaggagacatgattgatcaaatcatttactctaattgatccttaatattacgttacatatataatccaaaataagtaatatagaatttagaaagtgaatataagaaactaatcaaaattaacctttgtttgaacggtagcggttttagttatagtttttggtttctaaaaagaaaaagaaaaacaatcatagtttccaataagctttttaaagttttttatttcctcaaatctaggataactataagtcttaaaaaaaaaaaaaaacaactagaagtctataattgtctttttagtagaaacctaaagctatttcagtttgttaaattctaacaaccagaaactaattaaaaccttgaaagctaaaaacaaaaatatatatataagctctaaaaaatctcaacccattcaagattctaaatcaaacatggcttcctcatctctcaaatgtttttcttttatcgttgttcttacaactttctttgcaatctcattgaagccatgttattgccacaataaaacccactggaacaccgccggcatcacgtggtatggcgaccgagaaggtcctggcaccacaggtattaatcaaacctttaattgttccaatacacttataaaactcgaaaacattttcccatatttacctatatatgcacggttcgtaaaatatgtacacaggaggagcttgtccaagtcggtgatgccatacttcctctgttgctgcacactgacggtttgaataaagagccacaaactcttgattctccaacacatagagcccatttctacgaggacccgtggttaccactttctgtgtttgtaaatcgattatgcaaaccttattagcatcaaagtaaacaccgcaaggatagtcatcacacaactttgacacagagagaagagatttttgtatatttggaacaaccaagacttcatttaaaggaatcttaccatttgaggatttgatagtggtagatccagtgtgagtaatcgggagataagtgccatcgccaaccaagacagcatcatccccttcgtactctgttgcagactgaagtccattggtcgatgatgttacatgagccgtcgcagctgagtcgggatgccattccttgcctgtatcatctgagacccggagagtagaaaaagcttgtatttcagcctggtaattgttatcaaaccgattgtaacacttgagagcagtgtgaccagtgcgaccacatatctgacacaccggtcttggacctgaaacttgtggggaggattgatgttgggaaaaccctcgtccacgagttgagtagcctcctctgcctttattttgaccagaacgtcctcttcctttttgattggggttgtattgaggagatccagactcagatctttcaatgttgaaggcaaggtgaggagtaacagatgccgcttcttcatatgattgtagcttactgtcaaagccttgaacttctgagacaacatcattgaaagttggagtcggaagcttgctgagagagctttgaatcaccgtggtgatggggtcatagtcacgaccaagaccgttaagaaaaccaaaaattttcattgattcatcgactggcttgccaatggagctgagagcgtcgcagatggtcttgaactctcggcagtagacagagaaaggcttttcctttttggagagaagctggagattccgacgaagtgagaactcacgagcaacactgcttttgttgaagttttcagctagagacacccaaatttgacgagaggtgcttagattgtgaacatgaccaaggacttcttcagacaacgtgccaaagagccatgaccgaactaactgatcggtacagaaccaagattcatacagaggattgggttcctcggaggtgacttcgccattgacgacaaggcgagactgagatggtgcattgacggcgccattaacaaaacctatgagtttttgactcgataggagagactcgaattgagttttccacaagaggtagttactgtctgtgagtttgagagtaacagaacttgtaacatgaacattatctggaaaagggtatgaggtcgccatttgaaatacctgttaaggctacaaaggctctgataccatgaaacgattagagaaagtttcaagcttttggtaaaaaatcgtttctttctcaataattacattagggttttacactactcttttatagacattgtagaaggaggtagatatggaacagtctagaatatggcagatgctgtgtagctggctatggtgagtcatcaggcaaaacgcccctcctctgtacgatcgttgctctgttttgagctggagtctattttgtcttcttctatttgactgggctgagatgggccttttgttgttgttgggccggttacttgtttgttgcttacactccccctcaaacttggagtgggtgaaccagacacaccaagtttgctcctgagatcaacaaatgctcggcgtggaagtgactttgtaaacacgtcagctaattgaaaggtagctgaaatgtgttgtgtttcgatcagaccgagtgcgacctgctccctgatgtagtgataatcggtatcaaaatgttttgaacgattgtggagagccggatttgcagataggtacactgcggagaggttatcacagtaaacttgtgtaggaagatattggggaatgccgagatctcgcagtaagaaagagatccaagtaatttctcgtgctgcataggttagagctctgtattctgcttcggtagaggaattagacactgtaggttgtcgttttgtcgaccaagagatcaagttggagcctaacaagatgcagaatccagtagtagaccttctagtattcttgcagcccgcatgatcgctatcactgtaggcagaaagagtaagagtagagttcctttttattggcaaacccattccaattgtccctttgatgtaccgtagtatccgtttgagcagtccgaagtcagaggttgtaggggagtgcattctctgacaaataaaattgacagcaaactgaatgtctggacgtgtgatggtgagatactgcagttttcccgcaaggcttcgaaaataggttggttctgcaaatagctcagaattgaggttgtccaattgttgtggtagaggagttggcatggggttgcaatcactcattcctgcctgttgtaaaatgtctgtcgcataagccgtctgatgtagaaagagaccattagcataatcttcaatttgaatacccaagaaatagcgaggtggaccaagatccttcatagaaaaccgattcttgagagcttgtagaagatcttctaagagagattgatcactgccagtcaacaaaatgtcgtcaacatataacagtaaatagagtatttttccatcttgatgacacacaaataatgaggggtccgatttactgcagacaaatccataatcaagaagaaagttgctgaaagtatcaaaccatgcccgtggcgcttgtttcaaaccgtagagggctttcgtgagacgacagacatgagtgggtttctgaggatcaataaaacctgagggttggtacatgaagaccggttcttgcagctcaccgtgtaagaaggcattggagacatcaagctgcttaataggccaaccttttgatgttgagacatcaagaacaagacgaattgttgctgtccgaaccacaggactgaacgtttctagatagtccaccccttcctcttgatcgaagcccttagccactagacgagctttcagtttatcgattgagccatccgggtgaagtttggttttaaaaacccacttggagcttagaatattcatatcatcagttggaggaaccaacgaccatgtatgcaacatatggacccggttaatctcctcatgtactgcttcattccaaccaggatgcttcatagcggatgcaagggtttttggttcagcagtattcattcgagaggtgatgagagcatacctcgtgtttggcttttgaattcctgcctttgatcttgtggtcattgcatgagaattgattacttgttcttgatttgcagcaatctcttctgctactggattcacttcttcatcacttccttcattattagaggtaggttcaggatctgtcagttgttctgtaacttgagatcctgcatatgtattaagatcaatcggtttagaaaacaattggactggagctgcaggtactgaaatctcactgatcttgttatgttgccaagcttgaagaagaggtgttgagtactgagggactagagattgatacttttccttgaatggtttttcagactcattgaagataacatttcttgagatatagaccttgcctgttggagggtaaaaacagcgatatcccttatattggctgttatatccaaggaacacacattgcaaggagcgcggatcgaatttgttttgagcgagaggtctgagacaaggataacatgctgaaccaaacacacggagagatgaatagtctggcttttccccaaataacgcttcatatggactcaaattcttcaagacagaggatggtaagcgattaatgatgtaattggcagtgaagaaggattctacccaaaacttctgaggtgtatgactatgaaagagcatagacaatccaagctccacaagatgtctatgttttcgttcggccaatccgttttgctgtggggtataggggcatgagattcgatgatggatgccatgctcactgagatgtgtttttaacttgttgctcacaaactctcctcctccatcactctgaaatactttgatcttagtgtttagctggttctctaccaacttctgaaacgaaataaaaactgagagaaattctgacttgttgtgcaaaggatagaaccaagagtatcttgaataatcatcaacaaaaatagcataatatttgaggccttggttggatacaactggagaaggaccccataaatcacaatgaatccgatctagaggatgtaaaacacgagaatctgaaattaaaaatggtagtcttgaacttttccccatctggcaaggttcacaaactggagatgttctgctcttatttatctgaatcgccttgctgttttgaaggtgctggagagccttagaatttgcgtgtccaagtcggtgatgccatacttcctctgttgctgcacactgacggtttgaataaagagccacaaactcttgattctccaacacatagagcccatttctacgaggacccgtggttaccactttctgtgtttgtaaatcgattatgcaaaccttattagcatcaaagtaaacaccgcaaggatagtcatcacacaactttgacacagagagaagagatttttgtatatttggaacaaccaagacttcatttaaaggaatcttaccatttgaggatttgatagtggtagatccagtgtgagtaatcgggagataagtgccatcgccaaccaagacagcatcatccccttcgtactctgttgcagactgaagtccattggtcgatgatgttacatgagccgtcgcagctgagtcgggatgccattccttgcctgtatcatctgagacccggagagtagaaaaagcttgtatttcagcctggtaattgttatcaaaccgattgtaacacttgagagcagtgtgaccagtgcgaccacatatctgacacaccggtcttggacctgaaacttgtggggaggattgatgttgggaaaaccctcgtccacgagttgagtagcctcctctgcctttattttgaccagaacgtcctcttcctttttgattggggttgtattgaggagatccagactcagatctttcaatgttgaaggcaaggtgaggagtaacagatgccgcttcttcatatgattgtagcttactgtcaaagccttgaacttctgagacaacatcattgaaagttggagtcggaagcttgctgagagagctttgaatcaccgtggtgatggggtcatagtcacgaccaagaccgttaagaaaaccaaaaattttcattgattcatcgactggcttgccaatggagctgagagcgtcgcagatggtcttgaactctcggcagtagacagagaaaggcttttcctttttggagagaagctggagattccgacgaagtgagaactcacgagcaacactgcttttgttgaagttttcagctagagacacccaaatttgacgagaggtgcttagattgtgaacatgaccgaactaactgatcggtacagaaccaagattcatacagaggattgggttcctcggaggtgacttcgccattgacgacaaggcgagactgagatggtgcattgacggcgccattaacaaaacctatgagtttttgactcgataggagagactcgaattgagttttccacaagaggtagttactgtctgtgagtttgagagtaacagaacttgtaacatgaacattatctggaaaagggtatgaggtcgccatttgaaatacctgttaaggctacaaaggctctgataccatgaaacgattagagaaagtttcaagcttttggtaaaaaatcgtttctttctcaataattacattagggttttacactactcttttatagacattgtagaaggaggtagatatggaacagtctagaatatggcagatgctgtgtagctggctatggtgagtcatcaggcaaaacgcccctcctctgtacgatcgttgctctgttttgagctggagtctattttgtcttcttctatttgactgggctgagatgggccttttgttgttgttgggccggttacttgtttgttgcttacactatacgttttatgagttaaggcttgaattcccatcttatgatgttgtatatatgaagaatttgccaaattcagcttccatatagccacacatcaaccaagcctgatgtcataagaaactattaaaacattgaaaatatgacaacttcattataatttctaacaccttacattagtcatatttagattaagaagtgtttggttagaacttagaatccctaacttcttgtatatattctgacaagttttttacattcatatgtaataccccgtaactttttcttttgagtataatttaaaatcatattcaaaaacataaaaaagaagtgtttggttgtttgtagtgatggtgttttgcatagtcggaggattgtacatgacaacgactgtgtgcttggtttgagaaagaaaattttaggtttagagatcgagttcctttgataccacccgatgatatgaatgtttatgtaattgataatctttattgtatagcaagatgacagagagtagctagagtattgtagagaagttaattacaatattatactttacataaaagagagagtaagaagaatacataattaggagacatgattgatcaaatcatttactctaattgatccttaatattacgttacatatataatccaaaataagtaatatagaatttagaaagtgaatataagaaactaatcaaaattaacctttgtttgaacggtagcggttttagttatagtttttggtttctaaaaagaaaaagaaaaacaatcatagtttccaataagctttttaaagttttttatttcctcaaatctaggataactataagtcttaaaaaaaaaaaaaaacaactagaagtctataattgtctttttagtagaaacctaaagctatttcagtttgttaaattctaacaaccagaaactaattaaaaccttgaaagctaaaaacaaaaatatatatataagctctaaaaaatctctacccattcaagattctaaatcaaacatggcttcctcatctctcaaatgtttttcttttatcgttgttcttacaactttctttgcaatctcattgaagccatgttattgccacaataaaacccactggaacaccgccggcatcacgtggtatggcgaccgagaaggtcctggcaccacaggtattaatcaaacctttaattgttccaatacacttataaaactcgaaaacattttcccatatttacctatatatgcacggttcgtaaaatatgtacacaggaggagcttgtggatatggtgatgcagtggcaaaacacccgtacagatgtatggtttcagccggaggaccttcattgttcaaagacggaaagggttgtggggcttgttacagggtgggtatttatatataacaatatcagttcattgaatatgatatttgtaatgtagaactatatactaaccatgtttatatgttatagcttaaatgcgaccatccgttgtgcacgaaaaagccgatcaaggtgatgatatcggatgagtgtcccggctgcacgaaggagtctgtccattttgatcttagcggtaaggcctttggtgcattggccaaacgtggcaagggagatcaactacgcaaccttggagaactaaaagttagttacaaacggtacgtatagtcaaaaaccaatttggttcggttaggtcgggttttttggatagaaaatattcacaaatataaatagtcattttaaactaatgttatattaatttactagagttaatttgaaatataaaattttagtgacttattttgttcaaccaataaattctaataaacttacattgatgttggattgtaaaaccatatactaaattctaatcaatatcatacgtatatttagtgcatgttgcaaacacccgaagactatgatcgctatccatgtcgacgccggagcaaatccttactacatgtcattcgcggttaagtttgcaaacggtgatgggaacttcgcctgcattgaggtccaaccggccggaggacagtatatgaaaatggaggaaatgagatccgctgtttggagactaagccctggtgttcctttgaaaggtccgttcaacatcaggcttacctccgccgtgtccggtaagaagatcattgcgaaaggcgttatcccggaaaagtggagtcctggtgctatttaccattctaaggttaacttccccgttcaaaggaagcagaaatgatttaatttttcttcccctcataaacgaattgtaacgttttaaagaaagaggggttaaacttgtaacggatagtaaactaatttgaattttttttcttatctactcttgttcttcatatgggcctagagttgttgtcgctcggcttaaaaaagcccatgattaataaatggaattcggtttggtttaccattcgatgtggaacataatagagtcatagaccggatcagatcggtttatgagaggcgtttaatttattttgtatgtgagggaagaaagtacttgcacaaagcattgatggactgttcttcacaagtttggtaaataaagacttattaagttcactcataaagtctcttaatttgtggtaaactacctaactacgtaaatttgttgaagttaaaaattaaaaacgcgtttttattagctaaacacaaatatgaacggaaaatatagaacgttgtctttgttgttagaagaaaagaaaaaaacagaactctaaattggtatatggtgttgccataattatggcatcttgacttcttctttttcctaagacaacgctattttcttcacataattaatctaactaagaaagatccagattaaaagggggaaaaaaacatattgttataaactataattaatcacacgtcgcatgttttttttatcgtgattctatgtatttaagcttaattcatctgttatagaaaaatactctgaatctgttacgaatagtaactagtaagatggtcaaatcacattgaattcaaccttaatttttttgatttattgtggaattttgttctaattaactaatttgttaaagttactgctcggtgagagttattaaaaacaaccgtcattggactagtacgtggctgtcacgtactgtaaaactcacagcaaagagatgttaacatttttttggacaacggttttgtttagctggttcgtcgttacaacacaacaaaacaaacctcctcctcaagacttttctcgtacaacaacaaagttttaaaattccgaaaatacccttttcactaaaaaaaactgttttgttttttttgggttaaaattaagaagtttaaaagacccgtcctagaaatagacaaaaaaagacagctgcgttgcgtctctgctatttcgggtgtaaaaacaggaaagttttaagcttaaatagaagggtaaatcgggaaattgaagaaaagagaagggagtttgtaataagaagtttgcagaaacgggcaaggctcgcatgttacattgtcgcttcttcaacttcatgcatacgcttttattagatttttttctcttctttccgttttccagatcaaaaattaaatttaagttttttttttcttttgttaaacagtaagagaaagagagagagagagagataaataaaatttaatttagttgctttcttaatcttctttgagtacaaatattaagttcattggtggagaggaatgcttgtagattccacttctctttacttttatttctctcttctttttcttcttctctgttcttgttattgaagatggagagttacaagtgcagggtttgctttaagagcttcgttaacggaaaagctttaggtggtcacatgagatctcacatgagtaattcacatgaggaagaacaaaggccgagtcaactcagttatgagactgagtccgatgtttcttcgtctgatccgaagtttgcttttacgagctctgttcttcttgaagacggtgaaagcgagagcgagtcgtcgaggaatgttattaacctgactcggaaacgatccaagcgaactcggaaactcgattcgtttgtaaccaagaaggtgaaaacgagtcaactcggatacaagcctgagtctgatcaagagcctcctcatagctcagcttctgatacaacgacggaggaagatcttgccttttgtctcatgatgctctctcgagataaatggaagaagaacaaaagtaataaagaagtagtggaagagatcgagacagaagaagaatcagaaggttacaacaagattaatcgagcaacaacgaaaggaagatacaagtgtgagacctgcgggaaagtgttcaaatcttatcaagcattaggtgggcatagagcaagtcataagaagaacagagtaagtaacaacaaaacagagcaacgaagcgaaacagagtatgataatgttgttgttgttgctaagagaatccatgaatgtccgatttgtctaagagttttcgcatcgggacaagcacttggaggtcacaaaagatctcacggggtagggaatttatctgtgaatcaacaacgtcgagttcatagaaacgagtctgtgaaacagaggatgatagatcttaatcttcctgcaccaaccgaagaagacgaagtctctgtggtgtttcaatgaatgctgaataaaggtaacagactttgcgtgattcgggtcgtccaaattttcgtaaagtttgaatctttttttttcttcttttactattattatttttggggtcgagctagacaaaaaaaagaaagataatgttttattttaaatgcaaaggaggctacttttacatgttctaacgccgattctttttttcgtattggcctcacgtcgtgttggcctaaccacataaaattgaagaacattcaaataagcttctacttagtttatagactattaatgttggctttattattgaaagtgtagacttttaatgtttgtgttaaggcgtaattttgactcttcttggcttcttctactttgttattgaaagctacttctagctagtagtaagagtgcccacttgagtacttatctaatttctctttgtgtaaagagttagtcaatcctctaagaattgagaatcgttttcaaagtccaaagatatttagtctataagtaaacaagacgtttcggttggtaaagttctagttccaactaattccaacttaatcttacaaaattatgtttgtctttaatcattcggctattcagaattttgcttacaaaacacatcttaattaagttcacaaattcttagtgagatacttgtcttaagctcattttgtaatgctaaccagcgtaattatattttacttaaaatgatagtatagaagacttggctgcacaattagattcgcgtttggtctaccacaaatgtagaaatattcttcgagtatactttattctttacttatgacttgaagcaaaacccactaactttcaccgccccaatagaatccaacaaattgtgactcagagtggttgtatccaagtaattgcaagcttgactaatctcacactattcatttggtaagactaattacttgggatttggtgagattagtttccttgaattcattttcgtctgataatttatttttccaaattttggaggcattaaattgcatgaatctggaatgaaaaatatagtgagtgacaaaaatagatggagagttaaatcgtaaaaaatctaattttattaaatgcatcttctctgtctaaatttgtgaggccatttgatgccagccgttggtacaaagatcctgagactgacactaaccttcactaatattcgcctatgaaaagtataaagtaaaagcaaactcaaatcttcaactaaaattaataaataaataaaatacgattagaaagttgaactagtttggtctgctcaacttatggcttacttcacaattatgttgctgttgattggtaatgcactcattcttagggaagactaaaccgggttaaaacaaccaaaacccggaaattgtttttagatttactgtgaatttacaatcttgttttcacttagcaaccaatgatattgcatgaaaggacggataaccacaaagtaactagataaaagaattaaaagaaaaaataacaaattagaatcaggcaacaaatattttgtgacctaaaatgggtttaaactatgactataagctatcgttttctttctcttaatttttttaatataatttgtttgtaatcttacattatattatttaaaactgataacagagaaagaagaaaacaaaggagacaaatcacattgggtgtggtttaaaacagagaagcacaacgaaaagatgtttggttggggcgtgattaaagtgtctctctgactcaatgcaccagtttcagcttcaagtcttcttcatttaattttatttttctagttaaatgttttcgacttctcctttttttgtttgattttcctaacttcagtttgtttgatttaatgaaaaaagaaacctctaataatgactcactaaagacaaccaccgttatctctcaacaagtcaacatagaaaaagtttcaatacaagattctatttggaaaaccaactcgtttgttagaaatttacattagttatcgagaacaaatgtatatatatatatatatatatattaatttgaaaaagaaaaaaaaaaaaaacagtgactcccacgtaatacgctaaagcttaaatggtcaactgattcataaagtaactttcaagaacattaaccgctttgaattacgacttacattgtgactcaaataactgaatcaattgattaatggataacgtgtacatgctttaatacttggaccagttaaaattctagtagatacgatcagtgacatgaaatgataaaagttttcaaaatgaaaaaaaaacgacaacaaaataacagaagtggcaagaaaaaggtctgtaatatactaatataggtaaaaagatagagataccaaacggtattaattttttctgataaacaaaatatgtggtacattatggatacgataaaaaaaaaagtcatcatcaatcaaaaaaaaaaaaaaagtttaatgaacagtcaactaaatcggacagctctctaatatatacttttacctgtcttattgttcccataccccaaactagactaattagaacttgttttaatagtaaaattcaagtttttgtcttgcagttttctttcgagtctcaagttcaaaaggactaaaacggaggaaaagatgcatgcttctcaaaattccgtctctgtcctgttttcttgaagtcacgtctcaactctcaaagtctcctttcccaaaccctaaattcttagtgtaccaagcgcaaaatcgtttcaaaataccctttttgtaataaaaaaaaaatgtatgcataaatgaaaaataaaataatacaaaatcatgaattaaatcatagtaagagattccaaattaaaagaaaacaaaaactcataagtaactttttacatgatccattctgattgtaaatctcgattatgaattagtgcaatacaaaagttggtagccaaacaaatggtttcaataagtctggtttttggatagtgtcgtgacttggtaaagtaacatttcactagatttgcttgtccgaagccaatgagaatgactcacttttacatttctgttcacaccatcattattatcaaaatctcgttatcattgttactaccattccatacgtacctttaatccatacgaccaaaataatgcataaactccctgcagggacaaagagacgtcggaaagtacgagattagaccactccaactgccaaaagaactacgcgggctaagacgtttcatttggcagtgacaaaaacaacgtcaacggtgaacagtgccaccatggccatcgtcttagctttttgaagacacgtaaatcctccttatcaaaaattataacaaaatataaacataagctaccgatctatagtgggctttttaaaaaggatgggccgactattcaagttatcaacacgtcgtcgtataatcatagtagctctttgtatttttgttccggacatgattatcttagtatccaaacacgtcacattcaagtttattctaaagatttttctctccggagacgttaagagaagaaacagccaacggattagggatcttaccgttctgcgattcgccggtgagtgtttttattttatttttccgatttcatatcggcttcttactctttaattcgatttccttatatgttatcgtgattaccttcccgagaattcatggtaaaattgatcggtatatattttgataatcgacttcaatttggtttatccctccttatgcttaattgcttcacttaccggttttgattctgacttgtattgatttgatatcgattatccggtttagtagcttcaagtgtttcccctgtgtccatgtatcgtcttggtcctgatgattttgaaatgttctgttttgtttgtttatgttaagaacagagtttgaagctttttttagagacttcaatggtgagccaaggaatggtatctcttacaaagtctctatgcactatgactccaagagtccgtctcaagaatccgaatatgttgcagaaactaaagactggatcttgtaatttccgtttcagaaatctccgtgtcttatgcacaccaaagctgtctcagtgggaaccgtcacctttcattcatgcttctgcagaagaagctgctgatatagtattggacaaaaccgcgaatgtgttcgaatctattgtctccgagagtgcagaggaagagaaagtagatatgtcagcgcaacaacgaactaattctcaagttcaggtacttaaatggccaatatggcttttgggtccatctgttctcctcacaagcggtatggcgcctactttatggcttccgttgtcatcggtttttctcggttccaacgtggttagtctactttctttgatcggtctagattgcattttcaatcttggagcaacccttttcctcttaatggctgattcttgcgcacgtcctaaagacccatcacagtcctgcaacagcaaaccaccatttagctataagttctggaacatgttttcactcataatcgggtttctagtcccaatgttacttctcttcggatcccaatctggccttctcgcttctctccagccccagattcctttcctctcgtccgctgttatcctcttcccgtacttcattctccttgctgttcagacattaacagagatcctcacatggcactggcaatcaccggtctggctagtcacaccagttgtctacgaggcttaccgaatcttgcaactgatgagagggttgacacttagtgcagaggtcaacgcaccggtttgggtggttcatatgcttcgtgggcttgtctcttggtgggtattgatcttgggaatgcaactcatgagagttgcttggtttgctggttttgcatctagaacaacaacaggtcagcaaccacaatctgttgcttctaagtaaagacagataaatgtttcttcgtttagtttttaaagtcatgtcaaagatttgtaactctttcttcactgtatagcttttattattcgtgggttggtgataaggattaaaaaaaaacacatattctttatgatcatattcgctcttttagttaggtatgtgatgttattcatttcaatattaaaggctgataggttgacgttaaggttgagaatatgcaaaggttgacacagattcctgtcaaagaaagacatttaagaatttacgaaaaatgatgaaaatgtttctcttaagaaagtagagcataatgtcgaataagactagtttatatggttttgtatttttactaagtcatgtcagaaagaagaagaaaaatatatgtactgtgttatagccttataagtaataggtttttgcatttggtgagtacttggtaacagtaaaaaaaagaaagttatacgttacgttgtgaaatatgatcagattataatgtatattctttactttagttgaattgttgttgttgtaattcatctccacgcgtttgcgattagggcgcgtttgcgtttttatcaattttaaatgaattgacagtattacccttgagaaatgaacaagacaaatagcgatgtcccactctattcattagctctgtctaatctctctcgatcgacgactgctctctctctgaaccggagacggtgtcacgggacgaatctaatcgccgggaaaccgttttttttttctctcggaaaatcgatttgaatctccggcgatctgatcgggatgagtaacatcgatctgattgggatgagtaaccgcgatctgatcgggatgagtaacagcgagcttctcaccgtcgagcctctcgatcttcaattcccttgtaagctttattcataactctttcaatatttcgcatgtcttattgccccagatctatgtgttaagcttcttctctgatttgatgtagttgaattgaagaagcagatctcttgctctctctatttgacgaacaagaccgacaataatgttgcctttaaggttataattctcttatttagccttatcaattttggaatcgagaaaaattgtttcgtgtttctgaggcttctcgtgatgatttaggttaagacgacgaatccgaaaaagtattgtgttaggcctaatactggagttgttctcccgaggtctacttgcgaagttcttggtctgttctcgatttgtgtttttttttgttaatttcgatttgctaaattggttattggattagggaatttgatgaattcttaatgtctggtttgatatagtgaccatgcaagctcaaaaggaagctccttccgatatgcagtgcaaggacaagtttctgcttcaaggtgtgatagctagtcctggtgtcacagccaaggaagttactcctgagatggtatattattatatggatggttacagttttcatatggatggttacagtttggtgttggttttacttaaaagcagtatttttcttgtttcttgtaatgaaattttgcagtttagcaaagaggctggacatcgagttgaggaaactaaactgagagttacttatgttgctccaccacgaccaccatcaccggttcacgaaggatctgaagagggttcttcacccagggcttctgtctcagataatggacatggttctgaattttcggttagtacatgttaacttaagtttagatttcagtttctctggtagacatatttatatgtagattttcatgtttaattttagtttgagagatttatcgtggacaacaaggctggacatcaagaaaacacatctgaggtatttttcacaattcttccaagtttgtcaccgtcaaaaccatgtgacatcatcttttgcttttgctctgtttaaaactgatttttggaggtagctttactggaaagttgccttttaggctgatttactaggttgagaatctttctttatgttgattacttaaaaggttcactacatttttagaagcctgtccagtgctcaagccgtccattaattgtctttttgtgcaccaaatcctcgtagatgttattttgacacagttaccacttactatacactattttgcttcagtcattctacattatttctattaccgctgaattttgtatgatttcaggcgagggcactcattaccaagctaaccgaagaaaaacagtctgccattcaactgaacaacagacttcaaagagaactggtaaaacaactctcacttggatcctttattatctctgaatctcctccatgctcttgttactttgatgattagcaatctgtagcgtttgtagtgtttttccatggttttgagaaggtatgcttaaagtcatcatttgtttttgtgaagagatgctttaacttatcttttgcattggcttctgtttccatggttgacttatctcaccataccattaatcaaaaccagtcttgtatgaatattccacaagctt

SEQ ID NO: 1375 - DNA, 107865 bp, Arabidopsis thaliana
aagctttttttagagacttcaatggtgagccaaggaatggtatctcttacaaagtctctatgcactatgactccaagagtccgtctcaagaatccgaatatgttgcagaaactaaagactggatcttgtaatttccgtttcagaaatctccgtgtcttatgcacaccaaagctgtctcagtgggaaccgtcacctttcattcatgcttctgcagaagaagctgctgatatagtattggacaaaaccgcgaatgtgttcgaatctattgtctccgagagtgcagaggaagagaaagtagatatgtcagcgcaacaacgaactaattctcaagttcaggtacttaaatggccaatatggcttttgggtccatctgttctcctcacaagcggtatggcgcctactttatggcttccgttgtcatcggtttttctcggttccaacgtggttagtctactttctttgatcggtctagattgcattttcaatcttggagcaacccttttcctcttaatggctgattcttgcgcacgtcctaaagacccatcacagtcctgcaacagcaaaccaccatttagctataagttctggaacatgttttcactcataatcgggtttctagtcccaatgttacttctcttcggatcccaatctggccttctcgcttctctccagccccagattcctttcctctcgtccgctgttatcctcttcccgtacttcattctccttgctgttcagacattaacagagatcctcacatggcactggcaatcaccggtctggctagtcacaccagttgtctacgaggcttaccgaatcttgcaactgatgagagggttgacacttagtgcagaggtcaacgcaccggtttgggtggttcatatgcttcgtgggcttgtctcttggtgggtattgatcttgggaatgcaactcatgagagttgcttggtttgctggttttgcatctagaacaacaacaggtcagcaaccacaatctgttgcttctaagtaaagacagataaatgtttcttcgtttagtttttaaagtcatgtcaaagatttgtaactctttcttcactgtatagcttttattattcgtgggttggtgataaggattaaaaaaaaacacatattctttatgatcatattcgctcttttagttaggtatgtgatgttattcatttcaatattaaaggctgataggttgacgttaaggttgagaatatgcaaaggttgacacagattcctgtcaaagaaagacatttaagaatttacgaaaaatgatgaaaatgtttctcttaagaaagtagagcataatgtcgaataagactagtttatatggttttgtatttttactaagtcatgtcagaaagaagaagaaaaatatatgtactgtgttatagccttataagtaataggtttttgcatttggtgagtacttggtaacagtaaaaaaaagaaagttatacgttacgttgtgaaatatgatcagattataatgtatattctttactttagttgaattgttgttgttgtaattcatctccacgcgtttgcgattagggcgcgtttgcgtttttatcaattttaaatgaattgacagtattacccttgagaaatgaacaagacaaatagcgatgtcccactctattcattagctctgtctaatctctctcgatcgacgactgctctctctctgaaccggagacggtgtcacgggacgaatctaatcgccgggaaaccgttttttttttctctcggaaaatcgatttgaatctccggcgatctgatcgggatgagtaacatcgatctgattgggatgagtaaccgcgatctgatcgggatgagtaacagcgagcttctcaccgtcgagcctctcgatcttcaattcccttgtaagctttattcataactctttcaatatttcgcatgtcttattgccccagatctatgtgttaagcttcttctctgatttgatgtagttgaattgaagaagcagatctcttgctctctctatttgacgaacaagaccgacaataatgttgcctttaaggttataattctcttatttagccttatcaattttggaatcgagaaaaattgtttcgtgtttctgaggcttctcgtgatgatttaggttaagacgacgaatccgaaaaagtattgtgttaggcctaatactggagttgttctcccgaggtctacttgcgaagttcttggtctgttctcgatttgtgtttttttttgttaatttcgatttgctaaattggttattggattagggaatttgatgaattcttaatgtctggtttgatatagtgaccatgcaagctcaaaaggaagctccttccgatatgcagtgcaaggacaagtttctgcttcaaggtgtgatagctagtcctggtgtcacagccaaggaagttactcctgagatggtatattattatatggatggttacagttttcatatggatggttacagtttggtgttggttttacttaaaagcagtatttttcttgtttcttgtaatgaaattttgcagtttagcaaagaggctggacatcgagttgaggaaactaaactgagagttacttatgttgctccaccacgaccaccatcaccggttcacgaaggatctgaagagggttcttcacccagggcttctgtctcagataatggacatggttctgaattttcggttagtacatgttaacttaagtttagatttcagtttctctggtagacatatttatatgtagattttcatgtttaattttagtttgagagatttatcgtggacaacaaggctggacatcaagaaaacacatctgaggtatttttcacaattcttccaagtttgtcaccgtcaaaaccatgtgacatcatcttttgcttttgctctgtttaaaactgatttttggaggtagctttactggaaagttgccttttaggctgatttactaggttgagaatctttctttatgttgattacttaaaaggttcactacatttttagaagcctgtccagtgctcaagccgtccattaattgtctttttgtgcaccaaatcctcgtagatgttattttgacacagttaccacttactatacactattttgcttcagtcattctacattatttctattaccgctgaattttgtatgatttcaggcgagggcactcattaccaagctaaccgaagaaaaacagtctgccattcaactgaacaacagacttcaaagagaactggtaaaacaactctcacttggatcctttattatctctgaatctcctccatgctcttgttactttgatgattagcaatctgtagcgtttgtagtgtttttccatggttttgagaaggtatgcttaaagtcatcatttgtttttgtgaagagatgctttaacttatcttttgcattggcttctgtttccatggttgacttatctcaccataccattaatcaaaaccagtcttgtatgaatattccacaagcttagtttagaatcttgagattgtttatctgacaaagattttggtttgatgtggcaggatcagttaaggcgtgaaagcaaaaagagccaaagtggtggtatcccattcatgtacgttcttttggtcggactcatcggtctaattttgggatacattatgaagaggacataaaccacccaccttgaaattaatccctcacccgccacgaaggaaaaaaaaaagacttttaactcttttcagtcggacatttttttctcttctgtatttgtcaatttcgccttaaaaaggtgtcctagaagatttgtgtttcgtaactcagtttgctatgtttttttcaacttttgtaatccaaatgactttgcgttggttctttctccactaattctcttatatttcttaacttcattttccatctcaaaccttcctccgtgtctgcattagtcagtgtatgtatatgtttgttccaaatgcttttctcttcctttaccacataatttcttacatcaatattgaacagagatgaactacaacggcaatgtttcatgcttatgttttttactgatgaggaaagaaagagctaaatcatgtgcaacttttagtatcttcttctagtttccatctaagaaccatggacttggacaacgaatagaccaacaagactcggttctccattaccctgttgcatcttcttggtttactattcatttgtcctagtctggtccatacacccgacgtgctacacaaataaaacttgaagcaaagaaagatactaaatgggagaaactacaagagaaaagagcgagaaatagaaactacctggatcagatagcagcgctaagaagaagaaattttggagaattgatcaaagattatagataaaacaaatttacgtttttatatgtgttgagagtataacgatgagactatttctctctgtttcttgtttctctggtttgtttatgatgatgatcgatgatactaaaacgatgagagtacatctatatttttattttcgtttcaaaaagtgattcaaagactgatcaaacaaacaatgtcttttgtctctttagtgaccgaagaaaccttaaaacagacatgagatagagaaagcagtttctttccacctttgtatcatttttacacttttattgctcggcttttcaacacttgtaagcttgtatctctgtcttgcatattttagatcttcttcagcttcgagaaggttcctgactctgagaagtgctttgagccccacttcctaatcctaaagcttgctgaggattgcacaactctattccctgcatagaagtgaaagccaagcttgatgtcaaaccagaggtagttgcaccacccgcatactgcctttctttaagctttttggcgaccttggcattaattttaagcttgctctgaacactggatactcgcagcctcttgcttcctgcctgtccaagcattccataaccttctcctagtccatcaccgagggagctctcttcaggtgtaccaaaggccgtcctgttggccagcttcctcatatctgttacttgataccttgctttcagttttcttagacggcgaccaccccttcttttcttcggctcagaatgaggaataggaagtggcttaggctgccttgcaggaggaggttcttgccacttgtcaatcttcttacggatctcctccctgaaagcttttccacttatccctaacggatcctctctagtagcatcaactctagctgccaaagttgattttgcagccacgagcctgccagcgcgagcctcaagtccaggaggcgtgctttggaaaatctctgtctgctccagataacccacacgggactgagacgttgcagaagaaaacccaacaaggttcttcctcttgtggccaagaacttgaacattacaggcaggcattttagcaagtgctgacaaacctccagctgtccccatgagtttggctgcaacagcactcccaacaatggcggaaagattaggagcaatagaacccatcttactttcaacaaactcaaggaccttctttcttgcggaatcaagatctaaatcccgatcacaagcctctaacaccttttgctaaacatcctctggcagtgcactccctttcgtagttgaagcagtaactgaaatagccatgataatagctggagtaagatcaaggccagcaaaatcaacaagagtcaaatccgtctcattgccaatcttcttgacaacacatgcatagtcaatagggtgatgaaccaacgactcaagctcttgaaacctaagcttgtacttttctttgataaagttgtggacaataacgatttcatcctcaatatcaaccgaaagcttattacaatccacaataagcttatactcatgatcatcagaatctttcccaagagcctcctctactttgtgcataatatcatcatatctctgagtcttctgaagcttagaaacactatcgagatcatcatagttaagtgtctctaaatccgccatatccatatccacatcttcttcctcctttccaacatcaccatgattctcgtccaattctgcttcattctcagataactcgtcaaggtcagcaaggaaagaatcttcaagagttgccatatctttctacttggaacacaaacgcttcagtgattctcttgacgaatccaaatgagaaatcaatcgattagattcgagaagataattgaagagcagcgaccgactactatttataaactctctcatgtgtttaggtttcaagtttccttttttcacatgtgtttgggattcaaatttcctttaaacaaaaaaagttaactcgtgttaatttccttttttcacttgtcggtttatttgacaactactaaaccatcaaaaactaattaaacaaatttaaattttagttacttaaccgtcacgtagcatcctctgttcgccatttattgaattctagtttctccgcgtaaaggatttgattgtggttgtaactttttttctttgtagatagtgttaggctttgatcatcttctttaatgggcgtatagaacgtaagtgtaataatagtttttgttcattgttttcttctgcaattttctcaagcattcattatcacatcatgaagagaggattaattgatgactcatatcattaagaatgaaatgatcagatatttttcaagtacttcaactaattaatgctgatttacatagatactatatcgcctctacttctgatcactaaagatcagaagaccaaaaagaagcaaagtttaaatctttttcttagatattaagctttcataagattagaatttagaaaccattgagacaagaccaacaagagtttgtgagtaccgctgtcaatgttctcgtgggaattagattgcaaggaagagcagagtctgttgaatcaccttcaagatcatttgaacatggagaagactctgagccatggatcgccacagtaacctctttccctccacaggaatttgttgagctctttaaaagtgcaaaggatgtagacgttgtcctcgagcaagggctttgactagtagttgattcatctaatagagcaatatttctgaaagcaattcaccaatctcatacattttccctctaacatgaacaattggtaaatttgcatattactccaagacaagtttcaaggttataaggttccacataagtcacagtgctcaaaagttgcttgtccttgagaatctgttcaactcgaagactaacaaagatcccaaaatctactgatcaaaagttgcttgccctttggggtcttcgctcttttatgccctaccacagtctccatccgattcctctgtttcttcctctgatactaagatgtaagatgcaaacttcttcactcctgtaggactaacaccatccacattgtgaagaccttgaggaacgcttaaaacacacatgaagaacaagacaatcctttatccaaggaacaaacaaaacaatatgccacttgacactcaggtcagcttccagttccacgtaagaccttcctttgcagccagagactttcgggcaataacaaagaaggagagttatcaacgcgctaacaggggcgcgtgggtttcagatcctctctcgtcgtaccaccaaggtccaccattagcatctccaccgtacaaaacgtataagctccgattagattcaccgaatcacacaatcttcaaaatctcttccttccatgattccgttatcgtaaagatttgtcctttatccaaattttaggattttgaattcttcttctttccgattaccggattccaatggcgccttttgttgaagtctgtaggtataagccattaccgctttcattgagctctctctgtacatgcccttgccgttcctctccaaggaaatatctaattcttcctcaattctctgaaaagtacccgaaaccattgttgtctcattctcgctttactccgatttctgttaaccggagagttatcacggccgttgctcgagctgaatcaaatcaaattggtgacgatgccaactcaaaggaggtaactttactcctctttctcttgatgtgttagcttagtagtacgaataatcgttcttgtggattgctatgtgatgctgagaaacttatcatggcattgctgtaactattgtctgtttaggaacacaacatagatcaagaattgcaaaatgttgaagaagattcgagtttagatgatcagaagcaaaaatctagaagccagtttaagaaaagagtaactttcggtctaggaattggattgtctgtaggaggtattgtattagctggaggatgggtattcacagtagcagtagcagctgcggttcttctaagtgcccgggaatatttcgagctggtgagaagtaaaggaattgctcaaggaatgacacctcctccacgatatctttctagagtctgctccattatctgtgctcttatgcccatacttacattgtgagtagtttcagtcagtaaacaccgcaaaagcctgtgatcttttctcttgttctgaataaaggttttatcttttttgtaggtattttggtcatatagatatctcgataacttcagcggcgtttgttgttgcaatggcattgttgttacagagaggaaacccgcgtttttctcagctgagtagtacgatgtttggcctgttttactgtggatatcttccttgtttctgggttaagctacgttgtggtcttactgctccagttctaaacaccggcaagcactcccttattattatctttcctagctttgatccgtaaagtaatcaaagccaagtctcctgagcagtttaattacttataggaattgggagaagctggcctactatcctcggcggccaagcacattggacagttggacttgttgctatattgatttctttctgtggtataattgcctcagacacgtttgcttttcttggtggcaaggtatgtatcttttcagggcatgcatatagtctcgcaagaacttctcctggctgaagttaatcaactaatgttgcaggcatttggtagaactcctcttattagcattagtccaaagaagacatgggaaggagcttttgcaggacttgttggttgtatttccattaccattttactctccaaatcgttgtcctggcctcaatctcttgtcaggtactcaaatcctatagaattcctggagtctattatgtctttattctgactggttcgatttaaacagcaccatagcttttggagttcttaacttcttcggatcggtctttggtgacttaactgagtcaatgatcaaacgtgatgcgggtgtcaaagactccggctcactcatccctggacacggtaatgacacgtcaaaccagaccggaatttgtctatcattgcctctctaaccgagtcctctgtaattgcaggtggcatattggacagagttgatagttacattttcactggtgcattagcctactcgttcgtaagacttcatggagtttgattgtattgctgtatcccaagaaaacatatagcttcaagaagaaactgacaaagttttcccctcgcaagagtgaagttcaaagcaacatatagcaatgatggtgaaatggctgcagattttctgagattggtctgttctgttgtttgattgaaccggtatgcaatttttggttaaatgcgagtaaactggttcgttaggcgaattctcggaccgttggtctgtcttgcctgaccggtaatggaacggcggcgtttggtaattgatttagagattcattcttgatttactttccaaaataatttcctcctgttttccagataatggattaaaggaaaaaggcctaaaatcatgtggggatgttaatgaaagcgttgttcccaagcagactttttagagtgcaattataaaaaaaatctgaaatgaaaaaaggaaactatgtaaatgaataatcaaatatcaatgatactaataaagaggcgaaaattaagaaatgattgggaagaggaaagacatgggtggattttgttatccaatacaataaacaaatgttatactttcacaatttcactgcagaatcttactaaagtggttgattaataagtaataaagtggtcgtattatgataatatcaaatctaagcagcaattctgcgaggaccatgtgattgattacacggacaaaactcgtattacgcaatctctttactatactaaaaaggtaaaaagtctttaaacacaagttatctcatcgtttacaacattaaccccaaaacacaagttaatacatagtttagtaatatgaagtttgtttaccattagcttaaatttttagtagacctaattaacacatggtaaattgtatgtctctaacaaacatttcaaggaaaatgataaaatatactccataataaaggtaaaggaaacatatttcaatatgcagaaaaataaaaaaggaaaaagtaagaataacataaggaaattatatatatattatctgattggttaacattacactcaaacatattaaaacatgatattatctaaattaaaaagctaaaaagaaaattattccctgaaatatcatttttttaataataatttttagaaaactatgtttccatgtactgtgggatatagagaacacaaaacaattgtttgaggtacactcacctccacatttttatatggggacactgtgagtaaaaatgacagtttttgcttcgtaaatatgtgtaggactcgttacaaggcaaatacttgctaattagtatttgtgacctgttttgacccgtacaagtaattgaaatttaggtttgatattttatttgcctgctctgtgtgttaaggtgtatgaaattgttagtcgggatcgttgtacaaatatgatttataaatgatgtttatttactgttgtggttttgaactctattttgatgagctttctccactgtttaagattatgttgattcactttcacaaacgcatacaataatcatttacatctttttgttttgtttttaaagttaggtatgagagtaaacacgacatcgccggatgatttgccagcacaagccaatatcatcacatccaatttccaaactccttgcaacatcatggtcatcacgggggacatcgatttcaaaagaccgatccggttattaagagcttgtggaattactatcttcatggaaaaacttccaaaatgcaagactaaacttataaacgctgctactgccaaagaccctcctggttaccctcttggttacacgttcgaattccaagacattttgaggatctgattgagtttttttgcattggtttagagctttctccacaaatctcttatttatcagtgttcgtttgttagattaaggttaaggattactactatgcttagtatttgaataaagaactacgaatttagtatagtcgaccttccaagagaaaaatgaaatttgtgtaaggcagcttaagttttagttttttttttttttttttgagaaacctcttaatctttagtacctataacatattacatgtcaaatcttctgtctcttaaaaaatgaagtattaaaggatccatatctcagtatgcagaaatataaaaaggaaaaaaaagaaagactaacataaggagattatatatatatcatttgattggttaacatcacaatcaaacatattaaaacgtgatctaacccaaattgaaaagctacaaaaagaaaattaaaccgtgaaaatatcctcctttttcgtcttaacatttccaagctgagacagtaacaagttctttcctctgccaacacaagacaagtgaaggcgacgaagactgtctcttctccaagtgaaaccctctcattggattcctctgcaacaaatactccgcttgtgtctccgccgtctgactcagcgtcacaggagtaaacccacattgcccaaataagcttctccacggcggtgatctctccatccaacggtaacgattcgtcaacagtttctgtatcgacggttgcacacaaaacctctcaatactcgtagcagcttccgcattattcagattcccagagtcgagagactcgagcagagatgtgtagtactgaagcgcgttaatcacaccgttagggaacggcgcgtcgttgttacggtcgcagcttctgtctgagcaaacgacgacgtttggtgagatttgcttgaggaaacgaagtatcaatgggaggtaaccggagaccatggagctgattgggagattcacagcgattgcttctttctccgatgatcggaataaagacagtggccaataagttggattcaagagaatctccatgtttaagagctcgatttcgaaggagacacctgtttcgccggcgaagcttctgagattttcttcagtgaatcggagctcgaattcgtcggagacagttgaaggagaagcgaaagctgtaatctttagcgacggagctgatgaagatctgtttctttttccggcgagctcttgaatcagagacgcccattgacctccataaccgatatcgaaatcgacaatgtggatccgatcaaacccttcgaatgactcgagaatcgtttggtttgctgtgaagttgacgaattgaagaaacggtgacgtttctgagaaagctctgtaagctgcgatccgaaagattaggttttgaggaggtgagagagacggtggtgataatgatgagtcttgaaggagagagtgaagagcttctgttatatacgaagctgctctgtggaacggaggtttaggattgttgttagtgtcgtcgttgttgttgttaaggttgtgattgagccgcgccaatatcccttgcgcgagaacgggattgttatctccgccgtttgtggtgagctccgccgccgcagagaatagctggtcgatgattaccgctgactggtcttggtcgttttggtcttctccggctatctttggcggtgtgagaaacgggtcgtgagattcgtgacccggatccgagaacgggaaaacccactggaggtgttgagatccgggttgacccgaattgagccgtttcgcaggaggagacgacggaggatccgagaagaaacccggatttgggtttattgaaatctgaaacttttcttcttccggtgcgttttgaaaagggaagccatatccaaagagtggattaggattatcaataaccgggtcggatccagaaccgatgtcgaaacccacaaactccgaacccggatccactacatcgccagccatgattaatctaaaaatactctgttcttgtcccggcgagccaccggagagaacaccatcgagatcctcgaaacccatttggtcgcatttcccatcggcgccggaaaaagtagcagcagcagcgccgccgccgctgggaccaccgtgagaagaagacagcgtggtggttgaagaagagacgaaagggcttggacttctaacagagtctaaaacagacgtcggctccgagaaaccaccattgttgacaacaaagcagagatcttcttctactcgtccatggagcttctctggattagcccagattttgtatcccggagaagaagaagaatctaagaaacccagaacccccttcccttgaaattgctcaaagggcaggggcatgaccaatcttacagagtcagaaagagaatttaagagtgagaacaaagaaacccagaaaaaccctagatctcagaacttaaagaggaagacgaagatgaaagcttgaaactgaaattggcgcccacattatctcacactcggtattaataacaatctttcttctcgttgcttatgtatattgactctggatgattccaacaacattccaaagtgatgatcttcataaaaaatgctctcttttttttttttttaagtaaaggatttggtttttgctgtgtgtgtggtgccttgtgtctgtagatttacttatctacatctgtactcattttatatcccctcgtttctaaccctactcgcacttacggcgcgtcactcttactctccaagagatcattgattatataagtttaagccatgaaaatcgaaatcaaagtgtcattaatcgaataaatttagccttaatcataaattgactaaattactatgatgacaacataataaataaggaaaacactggattgaggaaaaaaaaaacaaggaaaccaataaattttatgcatatcgacaaaattactattctacatttttcgtaaattttgttcgatttataaaataaacttgcatcttgtaaaataatttgttatttagtgaaatagcaattgggtgatttaatatatatgtgcagtaacatgttttatattaaatagtatgatagtaaaaatatacttcattatatatgtataaaaactaagtcaagggtcaaatgaaaatgaaccaaaagatttttgttcttttttcttcaaaccaatagatttgtttacttaaaggatgtgtcaaatgtttgacaaaaaaaaaaggatgtgtcaaatttatttttgaaattacaggtaaaaaacattttgagagcgaaatcgtaaaaatacttaaaatagtcaaaattatttacttatttattaagaatatgggatcatatagtgtataattcattagatcaaactaaataagtaataggagtatgaagaaaagaaagaaaataaattgaattgtcgaaacccaaaaacctaaaagagtcagttattagttgattgtcttacagtaagtaattcaatagtccagaactgttgaggcgcgttagataacgatcaatctgaaagacagtactattaaaaaaatcaaaaacatataccgaggtttcagagcaaaaagcgaatttgatacagatggctttattgttaatcattgttttccataattacccttgctttctattaacacactctgttttttttttttatctaacggttgaaattgcatgaactctggagaagatctcatggctctagtctagattttttataaactaactaataaatgacatattgactataaaatcttgcatttgctaatcaagtttaattttgaacgacaagtagacacggtcaaaactaaaattatgacaaatctttagcctatgttagttgatgtttacacgtgtttgcgataatcaaatcgttttattccaccattcttttctaaaatcatctatatcatttcttcttctttttttcacttctttgacaaacttgaaatacttaagtggccgtttattggtggcggtaatagaatagaggataccaaaaggagattaaaaagaaaagaggtggagctggattgcgaagacaagttggaacttttggtagtttgtgtgtgaatggaagggagacatggcttatgtgattgccctaaacatatttctattttttaagccaaaataatataaaaacaaaaatctttgtaattggacattgtaataatgggagacatgttttttttcctccaagacaaacaagaaacctccatgtgaatttccaccaccttgtaatatgtctaacaacatgtattctattaaactagtatttctttctgctttgttgttatattttaggattaaaaaatgaccaatttgcgtaatttaatcaactcattctatacattctataggttgatgactggctagtggagggacacatcgaccgtgtgttaccttgcatacatactcgtgattcggtttcacggaaattcatgtaatttggttacagtgatataaaacaagtaaaaaaattaacttcgatgtagaaatatattaaccctgtaaccaaattatctcagtttatgtcaaatgtcatatttgcaattcacttccactatgtttttagatttgctaatttcccaaaataaacttaaagtcctcaaaatagacggtatatagtctcctttgctaacctcgactcacgggcaaagctttctgttttctctttatttaaagttttcaatttttatgttcaggaatgctagtggggttaacttatgtgaatcatgtcatatcataatatcttaatcaaatcacaaacactaaacaaggacaatgtaactttttcttattcataacaaagcatgtcacattttggttggtttatatattattaattagatcaactatatatttaggagacacattacaacacaaacgataaaaatttgtctcgcttagcggatagatacagtgacggcggaaacaaaagaaaaagtaaagatagtgatagattgtatgaacttataatttgtcaatacaacaaccaacacaaccatgtagtattatctttaattgtttggtgaaactatataaattattagtgtttgaaccattgttaacctacaaaaaacaattagacgaaaaagtcctaccgccgcatggcactactggttttcaatgacttaattactgggagagttcctcaaaagtatatgataaccatataggttacgttacgtaagctacgagcctggaactagtgtggatattgtgctagaatcttaatgactatcataaatcagttttcaattctgttgactattaaaagttcaataaaaaaaagctagttttgatccatcgttgatttgaagtcaaggattatgatatacaatctcttaaaactatattttaagtatacgatcttacaaatttgaatgatcaacattcaacaatgtagattttttgtccttaaactttagttattgaccttttaatacagaaaaaacttctggtttagatatgtcctgctggtttgatctcagctgaaccaccaaaaaaaaaaaaaacgttgggctgggtttcttatcttctatgaaaacaaatatacggaagacttataatgggcttcatagagtaatgagttattattaactagttatgggccttagtgcataaataaccactacaattgtatttggtaacaacatcacttaaacatttccttaaatcatgctaatttacctcgatttttggtttgcattgattaaattaaattatcagctgacgtgtcattcactaattcgataatctttcggtaaacaaaaaaggaaaaggttacacgaattgtatatatacacatataactgtgacgatcgcagtcgaagattaattgaatcacacaaagtcgaatccaaagtttttgatcttaaccaagtcgcataatccagagaggtaagttttctccgatttgatttcgtttatgcatataatttatgtttgatttctacaagaatatacagagataagtgtattacgacttgggtagtagaaaaattagggttttgtgttgggatttggtaaattatcgtttttcttttcttcttatttgggttggtgattctggaaatttgttatatatattcaggaatcaaaagaagatgagtaacgtcagcttcaggcaggatcatgatttcggtatataaatcttcttcttcttttttccagtaatttaagttagtatgattggttgatgattgatttatattgcagagaagaggaaagctgaggctttaaggatcagagagaagtattctgacagagtcccggtattcttactctcttcttatgtcactgccatcgattttgttctgtttcctagttttcctgatattgctcacataggaatataccctatttgagaagctcttgtgaggcctgattgattgaaatcttgcaaaaataacactttttgatagatagatgtggttcttgttgagagttcaatgcatagtttcagaataagatggttatattaatgtctctcttttgtaataggtgattgtggagaagtcagagaaaagtgatatcccaaacattgacaagaagaagtatgatcctctttttctttataatatcaaatctgattcttaacattggagtctctcttgcttaattttcatgttttggattttacattttacagataccttgtcccagctgatctaacggtaggccagtttgtgtatgtgattcgtaagagaatccaacttagtgcagagaaagctatcttcatctttgttgataatgttcttcctcccaccggtactgtctcctcctctcaatctctacttaaacaactctttagtccttacataaacctgttggtttttatattggaaactcaattgcaggagcgatgatgtcaaccatttacgatgagaataaggaagaagacggcttcttgtatgttacctacagtggggaaaacacttttggatcgtcaatgacttaatttggtgttcttgcttttaattgaatgtaaatattccattttcttttcttgtccgtgaacttgcttagatgcggatatgattattatggcttatgtaggcacaaccaatcggtttgcaaacaaagtgttggtttttttatcctctgtttttttctttggtctatatctatctttctctttctgtgccttgctcgagcatcacacacatcatatgttgcaccttcacagaccacacgagctacaagagccaggtacaaagtgttagtttggttttggtttgagaaattagagttttgtcccggcaattccgggtcgagcccacggaggctgttgggctttatctagaccacaatgaagaacgattgtgggctaggccgacgtggcggtaaaagacaaatcacatggggaagcgccacgtgttaaagttagcggcaatggcggcttggggttgcggttagggcacgaccttcacgaacaacacaaaaacagagcggtgatggtccacgcacacttgtctgctgtttctcgaccccacacgttcttcactctgcattttccttccataatgtattctcccatgtcatgtcaactactaatttataactacactagtacgtctaatctattattttttcccaatagttgacaacaagaaatgccaaaatatctattttggtttgggtacgttctcgcttcaccaagtaacaaaatcgtgtcttgtgtatatgatgtgtatttaaaccatacactaattttctcttgaacacatttattactctttttccccggattgccttattaggtattattcaaaaattgaaaagagtttctcggaaatctactccgataaatcactgcaccaaattcagcaccaatttgtttgtagtgtgtgtttaagatttagtatcaaagttttcagatatttcactacaagatgttatcgtgtttgggagactttgatcataaggcttaatcatatttgtatattcagtacaattttgcatgtttgcgaacataataacttcagacttaaatgtttttggctattgaaacagtcaaacagatataatacaaaatttgttattgacttttgagggtttagcagacatgtacactaccagtgtccacttgttgagaacatcatactatgtcccttggtgattagaagcgaggaaaccattactttattatgcataaaatatatataaataattccgagataagtcatcgcaatgcaacgaaatagctaggtggttgtaacgtcattgtgttcacgtatatgaacaaatatcatgtgggaaatgatcattttatatctcaatgtgataattacatctaacaacataactaatcacagacaagaccgttgcatacttattagtcttgatcaactatagacacatacacttaggataatatatttacacatggatatcatttctttgaataatgtgttaattaatggataagttaagcatatataaatgaatgctacgtacaaataactggaagcaatatggaaaagagatctgcttttactgcacattccatgaatacaaattcaacgacaaaatggatttataacctaatgtccattatacagatgatcatgacgatatataggaaatatttttatttgttcctgtcaggaatggaacaatccgttttgaagaatgtttggttgaaaatgtatgcttactttttgttacgcaattaaaaatattgatcgttacgcggatgttaagcttcccgagaaacacacacatgtaaatagaaaaacgaggagacaaagttagaaaggtagcgtaaaaccatgcaaagtgtttaaaggcctcaacgtagagacaaagagttaagagatttaaaacctcttcttaagataaacaaataagcatatgcatcaaaaaccctaattctcccttttgctcgtttcgatgactagctagattttcgctccatttttaatgtaaattacataaaaaaatatatagataaaatcagtgagcggggtcaatctgagaatgctataactacgagagagaagacataagtttggtcttttctctttcgttaggtttctctagtttgggtcggtggattcctcagagacagaagagggggccactcaacaccatatctgaccttcactgctcttttcttcttcacacccatacatttgcatgttctctccttctcttctaccatcaacgactcattctctctctatctatatctgcatttattacacaatctctcttcctttagcatttataacaatcacgatacctttaaaccgccatatctttctctatctctctatatatatctacaaccgtctcggttataatctaagtcatctctttgatcgatactactcgtatggatatgttgaggagtgcttgtttctacttcctattaatagtgtttgtcatcctttcttggtctcttttatgcgattctcgccatcttggacacatggagaagaagcttagtgtaaatcttgatcttttaaataaggtaagcccttcgcttgtgatgttaagagtcatggttaatatggtgttagttttttcataacacgggcaattattttttgatcattgatattaagatgcgtatggtatatagtcttttaatttgtttatatatatgtgtgtgattttcactttttaaatgtcttttacatagatatgtagaagaattgaatgcatatttttccttttcaaaatcaaatatacctctaatttaaatttgtaggggggctccaaatacttttaaatgattccgtatgtatgcatgtatataaacactagatatagtgcacaactaagaagttcgagggtaaacactagctagtttcacttattttcataaaacaattcccatgtaaaatgggtttgtattcaacatactccacttttagtgtaatacttattaataaatgacaaaaaaaaactaaaaaactaaaaaacttaagtcatgaatactaactcttattccatggcacaggacaatgaagagattacaaaactagaagctccatcaacaaacaagacgaacaccttattgagccaatcacatgcggtagttaatcatggtgataatggtcagatcaacgggaagaagacgaaggaaattcacagagtaaaacgagcttcagacaaaaaggtgtcgtctaaaagagtctcaagaacttggaaaatccctaagtatccaaagaagcagcctaaatcagatcaagaacatccgggtttcaatcttgattatatgcagcccactacacacccgcctcatcataattgaactcttaatgatcatgtaataactccatgcataaacaaatttcatatcgtggtttatcaaatatcataactcaagtcacgaagaatttccactttttactcgtttgatatatcatgatgtatggtcagaaacgacctagttataataagcttttatatttaaaattaatacatatacgaattagattatagtgaaactgttatcggtattaattgttcaatactactccgttgggtttcttgatgttgctaccatatcacacttgcaagttgaatgcatatcatcatgatgtacaatatatactttactcctctttatatgcacatgcatgtgtatgatcatttcgttgctaaattactatatcaatatgtatttttgttgttgttcacaattgtgttatagtattagctaaggttaacaaatgtaatttaaaaagacttgcaggttaatagtaatacatgtggttttctgctaatcataaatcttttaagttagtctgttaattttcgtttctaatgttgacaaaactgatactaaatatgtatgtatataatatacatagtatcttgaacttggtggaccttaaaaatagtaatacagtacttgcaaatttgcaatattttcatccgattaaagaatagtaatactaccactagtcaaatgcattatttatagtttgtatatatagatgagtccgcgtgcaaagtcactgttaacgatgtccaaaaaggacgaagatcccgcgtatggttccaatgcaatcagatgtcccaaatccacgtatcttaaatttaaaattgacttgtacaaaacaatatactactaataattaatcaaagacaaaattgtctatctcatttcttatcaaaacgttctgttattttattttccataatttcttctttctcatatgtcataacgtaattttgttacatcgagaggataaaattcaaattttgcggaaaaatatataaggcccgtttagatatattagtacgttgaaaagagcgaacttattagtataaggcccatttagatataatagtgggtcataagcccataacatatcctgcaacagagaacaaagaagctgcgatctggctaataaaactttcccgccggaaaaagtttctgcagtttccaacttcttaaacctaagcgaagcagatagtctttgattgggagattgagagaggttagtgaagaatggagggaaatcaagctggatcttctctagattcgttgattgcttctttcaataaacgaatcggcgaattgcaggaactcgtcatcgccagaaacagtgagtcctagttctaaacactcaatactcaattcgttattcaatatcttcatttgatgacctaatttcaatttcctgcagtgtatcctgcaagtaccatcccggatttatcggcgattgacacagcgttgagctcaatggagcttcaggtacaatcgatcaaggaccgattacgtgaagaaaccgaagctattccaaaagctaaggtacgttttatttacttccgagatttctgaaattcagattctagaaacgtcgttacactgtaagatgatttgaatttgagtaatttagggtttagaatctggacctgggtttttgactttgagagttttgtgtgttgactgtagaaacttatagaggcatcactgaaacaacaagggaagttgcagaagatgtctatttatgcaccttcccattttcctgacaaggctactatgttgaattcagatttaaatagatggtatttacatttacttgcatcttcttttttcaatttctaggtatagcctttgatttttattactactccagaagtttgattaagattagtggtttctcattccagtctgctccaagagaatgccaagcagtacgagcaacattctactctcagctctttgaaatttgatgaggaagcagctgttttacccaaggtagaacttgcatatactttgttttcttcaaagagactttatggcctctaagactcaatggcgatgaatgataaactgttgctattgtgtatttctgttatctctgtctatggttgatctttggttttgtttccaggagaagaagggtcgcgggtctcctcccctttggtacataactgttgaggaactcaattcactctcatcgtaagtacattttactttctcttctccttgtttatgtgaaatgcataccgcttttctgacatttttccaaaaaacaagatacatgagaggaaggctcacccttgagaaagtgaatgctgctatcaatgacatggcctcatatgctgaagcaaatgctcatcttattgcagcctcaaaacagaaggtatatttaccagctgaaggaattgagttatataggctacaattgtactgacgcttttgtcttatattgccaaagctagcggaaaatctctgggagaaagcacttgtaagctaatataactcatcaaccacactgtctagatgatagtatccgttcactagtgaaaacattgttataatctttgattgtcttgaaactcttatatgcagaaactacgagatatcgtaacagagcaagcagtgaagggcaaacatttctttcttgaaactgacatgaagggaccaagtttgaaactagacaacacaggaaaagcaatacttactgtaagtaactaatatatcttcccttcatttcaaaatttcaacaaaaaagaaacaacattttcatgcttccttaaactcttcaccagagttagactaacatcgataacacatgcttattgtcaaattttgatgtgtctattaacaggttcttcgccaccttggtcgtattagtgagactcgcattggacaaaaccgcgtcatcattcttatgaagcctcactagaaaccaaccaacttgcctcaagtaagttgttcattttcacaagcgtaaggggtaattccgtcatttttcaatagtttcttgcttcttctgagctccttgtaccatagaatcatagaaggtctactggtcccttaaacatcattaagccttaatcttaatccttaagaccggcccgcctgacaggcccagctaggcccaggatttgaatttataatatggacaaaaatgtttaatgcaattttcacatttgcataaaagtagaaaaactcgatttccgttattttcataatattaaaaaagcaatttctctaagcaatctggttcaagttccagtgcacaaatggcctgtcccattcaaacctacaaagtagcaaaactcggtttccgtttttatttagtgactttttacctccacatagttttcttaatactccaatacctttaaggatcttatctgtgtcactgtctattcgtaaaatcaatagatagtaaattgtagctgccatacatttatcttgatacggacaagtaaatttggcaacattattttccgaacagaagaagaaaacaaatctaataaccaagcgaaaacgacgatccttgcattattgttgttcatatgtcctgaaataaaaatcaagaggcactacgaaatgggaagaagaaagtggtccagggaaacaggagagaaaaaaaaaagactatttgcctcagaaacattcacaatttcacgtttatccataatgtctgttccaatctctttgtcttcttttttcgtataaccaataaccaattttagtcgtctttcgttcgtgcaaaacccacaaaatacgttatgcataaagacaaaaacacacactatacagtcttatcgcatgcattttttaaagaaaattcacatttattaccaaccaactgatatcaaataattaattaacatgtttactattttgtgagttgtgacctaaattttatatacatacaagaaagaaacattcataaattttctgcagaccacatttagacttatagagttctccatcactaccattttacttcttttattttcaaaacgtatcatttaactcagccaagaaagatatggtcggtctaatgcatttaatgacaacaaatattaatcctttaagaatttacttcgccgctgtaaatgttaaatcaagccgtctcaatagtactgaaattgctattcgtggaggaagaggtatttttaaaaaattataaaaaatgggaagcaataaaacggattatacgaaaacatgtttcattatacgaaaagtatttaaattaaataacatagagttctctcattacgcggtacagatatcagagtcagacaaaaccaggagagatcttttcaactattcttaattccatttcttaaaaaaacctaaaattcgattcgttatttagagatattgattaacaatataaaataagactatagtagttacgtgtattcattctacttaccacttggaccaaccaaatttcgccaaacgtcacgagttaataaagcggggcgcgttgcggcggattcttccgacggtttaaaaagttcaccggagcttccgtgttagtcgttgaaaccacctccgtgactctcctgcaagtcgtcgacaagctgcttcttttcttcctaacgatttcagtagtggcggtgcaagcgagcgcctgacaccagaacatgtcttctccttcgttaccacttgactcggaagatgttcggttcgacccggtgggctcgagagtggaactcggtgtcgttgtcgtgacttcgtcggttaaatcaagaacgttgcagacgcggagaaaccctgagagtcctctttgtctcattatgacgtcactaatctacataaaacaaacaaaccatgtgtttgtgttttcagcgacaattacgtgtaaatatgatcgtacacgcgtgtttatattaaaaagcagaaaaacaacaaaaacagaaagaaattgaattgtgtattttgaaagaatttgaaaaataaatgagacaacaaataaaaacgttccttttttatctgacgacaatttcgtgtactcgtgcatcaaaaaatgaaatttctaaaaaagaagatcgacccagatgaagaaaagtggtaaatcggactgggtatgtgatagaattttaaatgaaaacttaattaacgaagaaaagatgttccttttaagtaattagaacaagaaaaagcagaccttgcaggagagacagcagaagaggtaaggagactggagactccggtcacaggtgatacaaatgttaccggaaccacgaaattgtcgagactgaggccgttcattgatgaacacaacttttgaactgttcgttgtgtatggctttaatcatcatcaacacatacacacacacaaagaaaaagaaaaagacaacgagtattaattaaagctgtcaaaattttagggcacaagaaccaatgaaaattggacttttaatgtatacaataaacggattaagagttttatcatgataattaaatacaaccagaaccgagttatacctgaattaaagagcaatccattagcttagaaccatcttcaaccctcaaaacgtctctatacacgtatcttcttatctgcgtaaagattcccagaaacacaccaagttcatatttttcttccgacaaatatgaagatttttgaaaccattaaaaaaaagtttgtttattttaagagagagacctgaagaagacgatgagaggtatgagaagagagacagtgaggacagatggtaagacaacaatcgatacataatatgttcttctcgttcttcttatcatcttcatgatccaaacaagcgttgaaaaacttgtcttttaacagaacctcaagccatgcaggaaattctccagattccatctgcaaaataccaaaaaaaaaacagtaaactttaaagacgaaacccatacatgaatcaagacccatgtttcaatttcatgttttttggactaaaaaggtaaaattgagaagacccaccttggcttatcttcttctggttatctacactgggaggtggttttctcggggaagagatagagagagtaaggtcaaggtcaggcgattttgagctctctcagtggtgaaattgactgaccattctcagagagagagagagaaagaaagaaggaaagagagagcggcgcctggagagagtgaccactagcttaaattcaaatgagtcttctcttctttctctccttaatgatgtgttgtaatctttagtattcgttaattaatttgttttgttgattatttactctcatttagttttatccattagttagagaagtggttcacttagatacgttactaacttactacgtaatgactactactagatagcagaattcgattatgagtgttgaaaagtaacaattttgggttatttatcattattaagtaccttttcattgacagatacagttccaacttgacaaacagaagtgtatatttattagaattcagcttggcaataataataaattttatatttactgtcatatgaaaaaaccttttttttatataccgtgtgaatatgaactttatattataattaataattaaatttaagaaagcattttcttcagaaatagtattaaaaaaaattcagtcctctggtatgtgacagtcgtcaatatcaaaattttaaagccaaattcagagttttaatctctctttctttagacagaaaaaaaaaactctctttcttataacaatatgagttgggtttttaaaaagaaagtaaaacgagatttctttatacaaccaatttgattttcctgtatcgtctcttcatgatataattgtatgtgttgtttttgtttagaaggtctgtctggttcactgtgaaaaagtgctaaatgacaagactctccccaacagtctacttttcatttgatcatttctaagtggcgatttcgtaaacccaatataacctactaaaaacaaatttctctttttactactacgtgtatttcgttcagtaaaaatgtgagaataaatacccaaattaaagctaagcaccgttttataattaaaaacattaccatccacacaaaaaaataaaaataagcttcattaataattaagaaaacataattgtaatagctaaatgaagtatatgattgatacattgaatagaggaagaaatagagagcaaattccaagaaccctaagacccattgtcacagctgtagactgttctcgaaaaccagtgcaaagttgatgggatttattagttattgcttatactactaaacttacctacgtacctcactagaccacctattattattttcattttattattataagtaaaataatctctcaatttttgcatacaaatttttaaaaatgaaaaaaaaagaatatgagtgtatgtatagaaagagagagagagagagggacagagaggtggatcagagttggtacggaggagcagcagcagcagcctcaggcagagaaagaatgcgacgccactgctttcttttgatctgatccgattcgatttcgatccagctgtccccttttctcgttagccttttagttactattgatcatcaggggtattttagtcaatttacgatatctacatgggctggggcttttatcctttatttgggctacttacgattgtttgttatggttgatccacatttctccttaatcgaatttaaaacatctggggtggtcctgatcacaacagcacgattggtgttattgatttagtcaaaaccgacgtcgttgaagaacaaactttgatctaacaaccgaaatcgttggtaaccaaacggtcaaatgaaatcaagggaaagtgacatacgaccctcaattttgtctttgtatttgattttatgtcccacaatgtaataaaaaagataactatttctatatgtcattgtggaatttagacagaatgatataataaacaaatgtatcaatgtaaaatgttattttttttttagcgggatcagattacaaaaagttacacaaattattaacttaaaaacctttcactttcagcatatactcgaacacggtaaatgtaaggtgcatcactaattcactacttcctctcttaaaaaatataggatacttacatattttaagatttatttatttatatcaaaaactataatctaattttttattttttttaaccaataatataagagacttcatgatacaaatggtcataaaatatcaaatgtaatgaaaaggtacattaaaatttgttctatatataaattaacttaaatatattattatatatatgaatatttcactaaagtaaatctaatgtaataaattcagggtgattgtaaatatgatttagcaattatacaatatctaaatagattaggtgaagtaaaaaagtgataataaatatcattgaagtttaaattgtcagtagtttgtacaaaaaaacatctagacattaatatttgataaatttaatggtaacagttcgaacatagtctggttattctcatcggttttgaacacaaaccactgatactggtctttattaagctgacaacgcaaattttgaaagttacttgatactattaaatcttttagatacctttgatagtcttatggcgttttcgaccgtgaggcttgttcaggattgtcgatcaaatctttttttttcaaatgtgttgttctcccatttgtactttctttgactataccactcacctaacacacaaatacatggactctctatttagcttatgcggcaactcttgaatatgacaaaataaaaataaaaaaatcaaacttgtttgatatatttttaaagattttgtacaattatcttgatcttcgagatataatttagaatattgttagtggttaaaaggatcacaaagtattgtcaagaaaaaagaaagaattaaagcaagaatttgagagatgagtttcgaaagacatttgttaaacaagaaaaatagaaaagatgaaagatgaaaaaaaacacaagtatcgtttctttctagtggtatatgtgaaaaagatacaacccttaatttgcgttatgattacacgaaaaggaatataggacataattaattataaacaattaaccactaaaaatgttagctaaaagcatcacaaagacgtgaagaaaagggaagaaataaagcaagaatctaggagatgagtttcgaaagacatgtccttgtaaaggtgtcttcaaagccatgattagtcttagtgggtcaattaataaaagttttacacattctaatacaacaaagaaatcaataaaactcttaaattcattttcttatatccaaatcatacaataatgactaaccggacggttaaaatatttcttactactattagtattagtctattagttatcagagtattcaagtctaaatgatcaaagaaatgtttgaaagtggatgccacacttaattttcgtgccgttcacatttatagatacgagtgttaaatatgtaacgtagacgtaaggtcctgtttaattttataaccaatttatatgtccaatcagtagcaaattacaaaacaataattcaacccaaaaagaaatgtgaaaacgttaattgtgtacgcactagaagaagttaatttcacttaacgaaatgatataattactttgccaatatatgttgtctctgttacaccatttgcataaccggtttagtcgtgtcactaaccattattaaacgaaatggtattaatcacttgttaccgttaaccaaatcatcatcaaactaaaaaaaagtcagcggaaaaaaaaaaactctaaatgtaaaaaataataatacagcgaaaaggtaaaggttttttttttgtgtgcattcgtttcttccaaatgcatccaaagcaaagcaccattaaaatccttcaaagcaaaaaccttctctcaagtttttttgactgttattaactcttaggttggtcaatcagaatcaagtctttttcgtttcccaattcgatttggattttgttttcttcttcttcttcttcttcttctcgagattgcgtattttgagcgatgcgggaagtggaaacaacggcaatcacagcagctcctccacaattctctcaaatgtttcagaaattagccatggccgtcaagaccaagacctacgagttcttcaccgaagacgataatgagagaaccgatgctgagggtttctctcttctcgattcctccgaggattttatcaccgatcagaaagtcgtcgttcttaaacccgataagcctcttcttagtgcttcttctccgggatctcctattgaatctccggtgaacgatgttcagacgaagaatttgggtgtggtaagtgttgttaaacctaatcaaaagaagctttctcaggttaggaaattggatacacagatgggattgagtttgatttcttctgttttcgctactgcttcgtcttttgaagcttcgtatcttcaattgcaagctgctcacgcgccgtttgttgaggaaaatgtcaaggctgctgatagagctctcgtatctaacctccagaaattgtctgatttgaagcagttttataggaattatcgccaaagtttggattttgagtctgatttagctattgggtcttgcttagaatctcgtgttcaggagaatcagagcaagcttagagctttggaaaccgtctcaaatcgtttacaagctgagatggatgcaaaggatttgcaggtttggagtctgaggaacaaattaggtgagattcagaaatctacttccaagttgtctaagagattgtcttcaaattcatcgttggatgttctgttatcggttagggtttttgagtctctgttgtatgatgcctttaaagctactcagaaattcactaagattctgattgagttgatggaaaaagctgggtgggatttggatttagtggctaagtctgttcatcctgaggtagattatgctaaggagagacataaccggtatgcattgttgtcgtatgtttgcttggggatgtttcgtggttttgatggagaaggatttgatctaaatgagaatgattatgaagagtctgagagaagttctgtagattcttccttgagggaattgatgcaacatgtatcgagtaatccgatggagcttcttgatagagataaagattgtgcattctctagattttgcgataagaagtatcacgagctgattcatccgaacatggcatcttcgatattcagtaacatggatgaaaacgaagctgtgttgagttcttggagatctttgagcacattctatgaatcgtttgtcacgatggctagctcgatttggacccttcacaagttagccttgtcctttgatcctgcagttgagattttccaagttgaaagcggagtggaattttcgattgttttcatggagaatgtcttaaaaagaaaacaagataagaagttttcgatgagtcctactcgagccaaagtaggattcacagtggttcccgggtttaaaatcgggtgcaccgtgattcagtgtcaagtttaccttaccggcggctccaaaatgtaaatgaaagagaccgatggttaagccggcgctcaagtttcttttcacaaagctgcttcaagaacttggcagctcacgaagactatatgagttataacttttttaccttcttccttttctgtgattaattgtgttcctttaagtctgatttgagttcttgatttcgttttaaagtgtacagaaggttctaaagctatggtgatttttttctttgtttgaattgcaatgaattcaattgtttctctttatcgtagtaagatgtaacagattgattatcaaaatatagtcagtttttcacaaagtgttcctatttgtggtctctgtttgatcaaatttcacattaatttgtaattctgggttttcttgcagtttttgtttttcagagtagcactacgtgccggtttattcgtgaaattaattaaaagtccattcacggccttgctgttactaactttgggccctactgtatcatatgggccgattagtgatatcatgcgattactcacgcttatatgattgttgggcttttattaggcccattgttcaccaattaaattgaaaagtattgcacgtgtgtaaaggtccatgtggcattaataaggaaaacattcattcgacgtacattcaaattttggttggcatggctgacttgaccaaggagtacaagtcggtacgacgtcattttacgtacaacgacaagcttaacgactaacgaggattattgaatacgaatatacgatcgtcgactatgataaataaaatatacagttgtgtatattatttggtctttttttctctcgttgactatcgatttgttgaagtaagtagttcaaattaaaaccaaagttattattgttctaaaaacgttatacttattcaattgaccgcatatctaggaaccgactaatgtatttagaacaaacgattatctttgcttttatgtgagggcaattaagctttaacgacgtgttattttattaatcggacgtttttgtatgaaaccttgaattgcccttcgaggcatcgaaaagcgtttatggacacgtcaggtacgattatccgtacgaatagagacaaaatatcgctaatcgaaattttcacctttaatacccactatacaactttttcgtctcaacagtcagcacccaaatatttttaattattaatctttgtttaatatttgaatagatttcgtataagacaaatatccaattctataaagaaattcaaaacccactttagtttttcaaccatgtactaaatgaaaattaactttatataaatttgtttgttaagtgatagtatttacatatgtcatgtactatatgctacacataattagttaatattttttgtttgtttgtgttttacatactcaccacgattaaatatttaatataacaaagcaggtaatgaattgaatcgcactgaaaaatacaattcatattctatatttatcagctaattaagaatatttgataaaccaactaattaaaacaacatcatccgaattggtgactaagttataactaatttgtggttgacttcctatacttattttgtaaacctcctactagtggatttttttccctattttagttagattgataacaaaccattcccatcagtcggcgaccagcaaattgaaaattctgttttttgtcaacaaattgatatatttatttaaaattgtattagacgtagatcatatgtagcatggagtaattaacgttatgaatgcgtgacttttctaagtttgtctttgtctttctttcgttgaggtcttccttatgaagaaaaatatacaaaagtttggtcttacatgaaaggttgaaactcgaagcattattcgaacgtcagcgcatatggtgttgttcgatgttcgaggaataaactcagagttgacaagattttgttcttgctatcgcatatagttgaatattgtacatagagaaaattatagaatttgtggttcgtagcataacttatgagagaaacaactatactatgacaattacataaaccattagactacatataaaatcagttttctttcaaaagttttgtaatacaatctgctaatatcatccatttactttaacaaaaaaaaaagaatcatccattttttaacattttcgtgagagtaatgatatgtttaaataatttgggaaaaataaaataataataatttggacatacgtgagtcaaatgagccccacacatttaaagctgtgagcggcacgttcgtgtacgtaatcgacttgtacggagtcatgagcgatgaatagttgatcatactattataaagtatcgttttcacaatgggaaagaaaaaattagcattctcgcacgcaaaccatattctatagcgtaattacacatcattttcgtttttcgttggaatataaaacaacatatatatacatataatggaatatatgtgtatataggtatcattatgcatatcaatatgccaattatttgctcaaaacaaagcaacaacacatgaatcttgagttcttgactataaaaactaaaaaatatagataagttttggcatcatcccatcgttacacagacgaatctactggatgaagctcaaatctattagtaacgataatcgtcttttagtctgaactctgaagacaacagaaatatataaatgaatactcccaaaacatttttctgacaagattagcacaaattggtctcaagttggtctaaataaaataaaaattagagccaaaactcagatctgtactcttcagttatcttgtgtgtttcttgtctgcatatgaataaatctatagagaggcatctaaaggacatccgtacacaaattaaatttgtaaaaccttataattgccaacataacgtgcagctaaattgatcaatgacaaaaaaataaaaataaatgagaagatgtttttgatatcgtgtggactgttgtagtgtgttacctaatcagggcagaaaatgtttgccacgtgggtatcacacgtgtgattgcatcataattgtcatcaaacaaagttgaaccttccttgactcatcctcttctctgcatctacatatttttttggttataagattagatatcagttataaatttaattcgcaagtaaaacgtcacgaaaagaaattgaaaatgcttaagagattgtggttaatgtgttaaaaataaagtcgtttaattaatgagtggagttaatgacgaattctctaggtgagaaaagcaaaaaggggaagtttcgtttcctacaatctaatccaacggttgtgatactttctttacatccaatcgtccattgagctgactcagtctcgcttggcttcttctctatttaaactgctctgtctcttactctgctcttcctctttagcgtttacacagccacaaattcctcaatactctatatttctcttcccgtttgaaactccaaagcttgtttgatgaaaacagagtaaacggttctgttcaaaacatttttcaagctctgttactttgttttttcaacgatgaggaagttaagaggaatcaaaattagaagaccgattaaacaaatctcaagatggatcctccggagaattaagattcgtcgttcaagatacacccggttaagcccaaaccgcccggtttgcaagccgagagccatcacaaaactcataagttggggtcgaagtctcacatcccacagcgccaggtttattgggtctaaatgctccaattcagggtacataccaattggtcaagaacccattcgagaaaagcccgacccggttccgaaaggtcactcggcggtttacatcggtaaaaaagacggcgactttcagagagttttggtgcctatcgtttactttaaccatcctctgtttggtgagcttcttagagaggctgaagaagaatttgggttttctcaagaaggtggaatcactatcccttgtccttactcagatttcaaacgggtccaaacccgaattgaatccgggtcgggtttctgtaaatttccctggagccggcggtggcaataacgacggtggaagaagatgatgatgatgaaaaagttctttaactcttttttactattttctaccttttcacttttgttactatttttacccttttgttagatatgtacatattctgtatgtgaaaagtgaggtttgaatttaggcgataatgtaaataatatagagattttttatttttcatgattgtttttggtatgattatatgattgtgaatttctgattaggatagtgatttaaaggtgaattatgaaaatgataaaacgcaaagaaaagtttaacacggttctattcatctgtggacctacacaagattttgctatcaatcacaataattcatcatttgttaatcccactaattttctacatatattgggaaattaatcaattagttagtgtttttctgatcagaaattttcatcaggaagagtactaatactggcaataaaaatgatagccttccaaatttaattggtttttgtgattattattcaatctagtttcgtgcaagtgtagaattgttgaagacatggttggggaaaatactgccaaaaggagatagaaatattatagctttgaagtgttcgtcgccattagagtccctttcgatatatctcaatacgtagatatgacttttttagtggagaatccacaaaaatcaatgattttcacggcaagccaaaaagatatatttcaagaataaatatatacgtagaaaaaacacattcatatgttattagtttaaacaagaactaaatattgagttcgctcaactagaatagtcacgcgtggctatagcataggttttctttttacaattttgatttgtatttttgtccagtttatcggaataatgataagaaacacagttaacgtatgcaaataataagataaattcactttatgagatttagtttacttactacttgtatatttactatcatggaacaacaaacgagtgttgatcacgtgttgttctatgaaacttcgtaattgtctcgtttatagattggatcaaaaagtggactaatttgctttgttaaactagcattattacaatttagtgttttttaatatataaaatagttacttaaatttcaaacaaactaatattatgtggaatatcttgccaaagttataaggctgaaaatgcgttatttcccgtttgaaaataaatttattcatatcagtgggtatttcagatttcttatggggttacgttggttgttgaagtggcaagttggttggttcatagattggtccaattttccatcgagttgaaatgaatatggataagtagtggctgtaacaatcaatggttgatcttttccgaaggcatataccaacttgagaacacaaggttagaccttccgacctattaacctaatccatctttgacttctataaccaaactcaagcgaaccggatccagttatcgtcagacaacaaaatcttagtccaagttattgcatataatgtatgtataaaaacttcgggaggaagacatcctaatatatctgttggttatgccagtaaaaaatagatttgatctacatatagagttttttgaccaaaaaaataatataaatatagagctttgaattactaaaagtctaaaacatgatcccaaattagttaagaatcttggttaatgattagttgaacttgacccaaaagaaagtaatagttatgctcaatagcgtgtacaaagcagtccagtgaccagcaaattaaaccatcaaaacatgggcttgaactcattcgcaggtcaatagcccaatagttgtatcttccttgaacatatattttaactcaaccatttctataattttcattgtaactgacatctaaactgaaagttaaattaattttgatgattattgtactaacactacatactaagaattctgatacacaccataactgtataggatttagatttagtttaatatagtgttggatggaaaaaacttttgagttaagaaaaacaatatatgacctaactaagttgatagatatcactttaaaatattgaagtacattttactatccattataacatatgtttagctccgatgataatttatcaaaaagaaatagagtccagcttttgaaatatacctaaatcttattttcttaaatgttacatagtatatatgttcaatttttataatattagagacctaattaatagtattttataaatgttttcctttaataaatggacatacagctagatttttcagtagaagcatttaataaatggagatatggctctttcatataaagttctgttagattttaaattaatagcacaacctatcaaagttaagaaacaactcagctttttcattagagaccatacttttgaaattttgttggattttaaattaatagcacaatctataaatttaagaaataactctaaataacaaaaaaatagtaaaatatctaaaggagatagctagatcttatatatggaagaaaaaactaaagaagtggtgtatcaaaatctggtgtgtatatataaacatgttttataatacatttttgtacaatctctcatcttcttcgtgcactccacatttgtttttctctcttccttgatcttgtttggtcaacgatacaagatggacctcgaaaaagaagcttttgttgataaagaagaactcagagaagaagttccaaaaaaaggggaaccagcagcaacactaattttctgttgtttttcccaattgttggtagtatgggtaacgttgtgcgccgtgaagttttcgtgttcctatttcctatcgaaatctataacaactaatcatgtgccgtatagtacaatagcttttatgaattttacggtgtttgatataaatactcatcttagtgcaaaatggaacttatccattagagttcccgaaaaccttcctggttcctatatatgtctacaaggagactttcaagcttctttactttacaagaatattaccattgctacttcacccccaagaaggttcaaatatctattttaattatttaactttcttcatatatattatattattataacgaaaaatctatttttttttgcttgatcagttacaacaatcttctgtttcattggcctcaactgctcaaggtttcaggggatgtctctgaagaggatatcaatggcgcgattggaaaaaacattgtgaacgacattaaagagagaagcgaagtgcgcttggggttgcggttgtttcttccggattgcagagaaaataaggcagggaccatgaaatttgcttgtgatgaggtcaaaatgaaatttgagtcgagttatgaacagaagattacatcaactgtggttggctatcctaattgcctctatgatgatcactagtttcttgtttaactttatatgaagattggaccttctttatgtgtaatatactttggataacgcataccatcagatataaaacatctcgtagagtttaccaaactgtgtttgatatagattttgtgtggatttctcccttgactaacaatcttataattttttcaatctttatttgctaattgacgataatttattaatttgatttattttgttcttctacatttcgatttaaatattataacgctagtgctactgtgctatatatggattaacaagctcttagagcatttacattggtgggctcttgatataatttttagagatattaaaatttaaatttaatatttaattggtaaaatagttaagatttgactcttatataagagacaaaatacacttttaaaaaatttttttttattaaaactcttaatttcaaaataaattataaaattattgttaaaaatatttgctaaaagctcaccaatgtggttgctcttaggttaccgactaggatattggttctctcgaccaagtatcttgatttttgtgtgtggtttcatgctctccagtctccaataagataatgactaaatatacaactttttcttaaaacataattaataagaaagaaagagtaacgaaaaatagaaattaacctcatacataataattgtgatatacgtataccctagtcatgtctcgaaagctcgttattgtaaaaaaagtagaaacactctctttagaccagagtctttagaagataagatacttttttaacgtgaaaccaaaacccttctttccataaactcgtctcaaattttttggtttattaggttttggaaatatctgagagtgctctgctcgtacgttgattgtgaacttgatctcaacttaatttgctttctatgaatgcgatttcgtgttaactggtctagaaatttctacgactcatgttgcagaacgcggtttaattttgatttgttttcttagaccttagctaataaataccgtgtctttgtctctttgttctgttgatcaatttagggaccaatggaagatttgataagccaattgcccaatgagttgctgcaagagatactcttgaatcttcccacgagtgagtctgttaggacaagtgtcttaccgacaagatggagaaatctctggcaaagtgttcctggtttgtacctaatttctcgacagattcttaaatttgtaaacttgcggttagaatatgtaattctggatgattttgatagttgtgagtctttctatctacctcaccttgaggttatgcatttagggtttcgcagtacaccgagtgatgtggttctagagatgcttatctcgtgctctcctgttcttcaagtcttgagcatttgtgatgttggagttgactttttgaaagtgcgatctcagacgttaaggagcttgagtctatggacatttatctttaagggagaaaatgatgatgtctccttgggtgatgatggagaatctggacttgtgattgacactcctagcttagagtttctgcgtatcagagattttccattggaagacttcagagtggaaagtgttatttcttctatcaagatgtgtatcgatgtacggttttatggggagatgacttttcaaacacgcaaactttgcacaagttttttgctgagttctcggaggtcacagatcttagcatctctggccatactctagatgcatgtatttgttcttaccaagtgttggttcttgacagggaacctatgcttacacaaaactgcaacaactgcctgaattcaagaacttgacccgtttgtacgcttttctccataccgactattcagagatgttgcctatatatctctccagcagtcccaacctaaaatctattgacttggtaatgattccttctcttggtattgagagtagcgagtgactatatatattatacatgtcttatggtgttttcctttgtaggagcttcatggttatccaaagatggaggaaattgcaagctcaccagtgccaaaatgtctccaaacatccattgagaatgtcaaaataaaaatgacgcccaaggctgaccaagagaaaagccgaaaagctgaaaccgaggttgctaactacatcttagagaatgcaacacttctgaagctcactctatggttagatgatgaagaagaagacgagtctagcagcgtccttgagaaaattctcacctttcaaaattactcttttgtagaggtgaagataggtcgagaagcatcgaaatttcgcctaggttatacatttgatgaagctaagcactttagtcgtcgttttctttaaatctcttatgatcaatctaattagcccttttggtcgtggtcaggatttaaagaaagttgtttctatcacttgaaaattctccactaacttgatgagaatatgtgtgatggaatcgatctagcgaacatatactaatcaaaaggacatgcctaaaatgggaccctctttgcacaaaagaagtttcaagatattattatacccacaaaaccaaatcttctttaatcatgtctaaatcattttaggcactcttaacaaaacaataatgttatcatccaatttgtctacactttggtattgattcgttacaagtgaatgttctagaccacgtttgttgatctattatgtagttttgtattcatcctagctacatttatatatatccacttatttcttaactacggtatgcattatacatgtttgtattaatgtcgccgataaaagtttcggacccatagtgatgaataatcattctcgattattattgttaaataaaacactacaaggaataagatagatcaaaaacgaaagctcctttgaaaacaatctcaaagaacaagaaaatatgagaagactctttctcttctctctcctctttttattcttttactcatcctcctcctcaagatcttcatcagaatctcacatcttcatctacggaggatgttcaccggaaaaatacacaccaaacacaccttttgagtcaaaccgcgacactttcctctcctctgtcgtcacttcctcctctgacgcgtccttcaacagctttgccgtcggcaacgactcctcctcctcctcatcctcttccgccgtcttcggcctctatcaatgccgtgacgatctccgatcatcagactgctcaaaatgcatccaaacctcagtcgatcaaatcactctcatttgtccttactcttacggcgcttctctccagctcgaaggctgcttcttacgttacgaaacaaacgattttctagggaaaccagacacaagtcttaggtacaagaagtgtagttccaagagcgttgagaatgactacgatttctttaagcggagagacgatgtgttgtcggatcttgagtcgactcaactcggttacaaagttagccggtccggtttagtcgaaggttatgctcagtgtgttggtgacttgagtcctagtgactgtacggcttgtcttgccgagtctgtcggaaaattaaagaatctttgtggctcggcggttgcagctgaggtttacttggctcagtgctatgctcgttattggggctctggttactatgacttctcttcaggtcagtccataaattaaaatctttatttcatttattagctattgctctaatttacgtaagttctttaattatattcgtgaatcatgcttagtgccatgataatataattgaaaattgtagtaatgaactgtatagaaatgtgtgagaatttgacaaaatttaaatttccgccgcttataattgagaaaatcacaagtctagtcgctccttggtagcacgagaaagttgaagaaatcataaaattttcgttgcttttttttttttgtaatttccactggaaagacaccattaagtattgaataaaatagaattaatcttttgaatcattcgttggaaaattcgagtatcatgattataatatcattggtcagaaaagaatgtttttgcaatatattattcttttctttataggcatagccacccatgtccccattttcaactttattttatatattctttatagcttgatcaatatcacatagtccaaaagtcattgcatcttagaaaatctaattcttagcttgatactatattgtccttatcttatgtactttaatttgtcacatacaatattaagatctttttaaatttgatctaattttcgttattaagatccaacgaatggagatcacgtggggaaatcaatcgcgatcatcgtaggagtcattgctggattcgcaattcttgttgttctcctctccctttgtagaaactccatgcgtaagtctatacttacttgcctaatcttcacatgattaagatttaagatcaaatcactcatttttagtatatatttagaaataagtatcatgatctcataatttttcttatctgatttgcagattgatataatgaaaggcatgattcgggatacaagattctagggacctgtttttttttttttgaactctcttgtattccactattccttttattttgtaggaggaacacatccgttaccgttccttgctgaaatttttggtttatcaaaaggaaaactattagtgactgatgatataatgatttttagctttgaggtattaaatatttgtatagtgtgacccgtattgtctgccttaaaaagatgctaactttattccattaactagttttagactaaaatccactttccttagcaggcgcaattattcgatactcatacttagataagtagattatcatttccggagaacaacgtgattcgatcgattgagtatcattaaactttaaaaggttctgccggcaaaaaaaaaaaagaagaaggcttataagacttgagaggttccattcaatcaattctttggttttctacgatccggatctacccggttctcatgggtttcaccacatattccattgagccattaaattattatggactgggcctcggcctactaagcttctaagccgtgtaacatatctaaaagactaaaacattttccatgcaaccattcctttttttttgtatttttttaaaaattaattcaagaaattcttttaccaaaaacatataaacccatgacaaaaatagtaattttcactaatgttacaacatattactccaacaaaattattactttatatattattctattaaaatataactgatcattcatggattttgttttcttttctttttgactccaaatcctgaaaatttcttttatttatatatatatatatatatatatatatatatatatatatatcttatccatcgtaaattcgtaataatgggattatgattatatatcactataccagtatataaaaatttaggtttaatccagtatatatagtagtctctcagctcttgaagataataaacttatgatgaagaagaacaacttaaggttgtgttcttgacacatagacgtatacgtttactcactttgatacagagcgttgcactaatttacaacctgaaatgtataacgtaattaatgaagttagtctcatatgcatgggccatcaataatcatataaacaaaagcttacacatactctcacacgtgccttatctctctctccatctgttagattcctcgccaccatcttcatctacatttctacgacaagttccattcttcgtttgctgttaaatacacaacaacatcaataattatttacttaaaacgcatttcaagaaaattactaaacactacaacaatcttataataacatttactaaaaatgtccacgtttgtaaaagtcaccgacttaatcactatcatgttctttctagccattgctgccgtcataaccgcctcaaacacagccgagttggatgtacttgaaatggctagaactgctgtggttgaagccaagactagttttgggtcaatggctgtgactgaggcaactagtgaagttgctggtagttattataaattggggttaagtgaatgcgagaagctctacgatgagagtgaagctaggctatcgaaactggtcgtagatcatgagaatttcaccgttgaagatgttagaacgtggctaagtggcgtgcttgcgaatcatcacacttgtttagacggtttaattcagcaacgtcaaggtcataagcctttggtccatagcaacgtcacgttcgtgctccatgaagctttggctttctacaaaaagtctagaggtcatatgaaaaagagtaagaaaacttacacatacattcatgtatacataattaaataaaatgatacaataaatcgctctgttttatcactaaataacgattgtagactccaagataagtgtaaatttttgtttgagatatcatggtttatctattatggatctctaataacatttggtagggctgcatggaccagcgagacagggccatggaccaacgagaccaaaacatagaccaacgagaccaaatcatggaccaggaagatcacaccatggaccatcaagaccaaaccaaaacggtggaatgttagtgtcatggaatccaacaagttcaagggcagatttcgtggtggctcgggacggttcggcgactcatcggacgataaaccaagcattagccgccgtttcaagaatgggtaaaagtcggttgaatagagtgataatatacataaaagctggtgtttataacgaaaaaatcgaaatagatagacacatgaaaaacatcatgctagttggtgatggtatggaccgtacaattgtcaccaataaccgaaacgtcccggacggttccacgacttatggatcagcgacattcggtataaaatatttaaaattctactattaatcttcatacatagatcatgcatgttgaataattactgcgcttactcgttatataggagtgtccggggatggattttgggcacgggacataacgttcgagaatactgcaggaccacataaacatcaagctgtggcgttgagagtgagctcagacttgtctttattctatcggtgtagtttcaaaggatatcaagatactcttttcacgcactcacttcgtcaattctaccgcgattgtcatatttatggtattatttttaatctatgtaccatttgtttaaactcgtatggaagctagtcatgatcatacatggattaagaatttttgggaaattttggaataggtacgattgatttcatatttggagatgcggcagctgtttttcagaactgtgatatatttgtgaggcggcctatggatcatcaaggcaacatgatcacagctcaaggaagagacgacccacatacaaattcaggtaatgttttgtttggccatcttttgactatcaatcaggggtcatcaactataccgaaattattagaaccaaccgattctaatcagattatatttttaaaaaaattgttcatatgaaaatatccaaaaactaatgcatgcgaaagggaggaaaatcgaattaaaatttaagtgtaagtttgacttgataataatcaaacttgaacaaattaccaaaaaattaaaataatcaaacttgaacagaaatcgaattggaaaccaatttttaaccaaccccaaaccggaattcatattgaaaactcctatcgttaatagatacccatggttagtgttaaccatgaattttttgtttaccttactggattaggcatttcgatccaacactcacggatcagggccgcaccagaattcgaagcagttaaaggccggtttaagagctacttgggccggccatggaagaagtactcacggacagtgtttctcaaaacagatatcgacgagttgattgacccgagagggtggagagaatggagtggcagttatgctttgtcgacgttgtattacggcgagtttatgaacaccggagctggagcagggactggtagaagggtgaactggccgggatttcacgtcctacgcggtgaggaagaggcttctccgtttaccgtcagccgattcatacaaggagattcttggatccctatcaccggtgtgccgttttcagctggggtttgagtcacttttgaatgaataaatcatcaacacaatataacatatttaagaatattaccaaaccctagcaaaactagaagtatgatggataataatttagcacatataagtgtactacgaagaacaagagacaaaaactgactccaggacaatgcgtaaaatcagaagccagaggagtcgaccaatgaagagtaagacgcattttcgtcagcagccgatttatttccggctatatccttaatcaccaatctgtttctggtcttgaacactacttcatggtctaaaccagccaactcgcacaattctaacctctgagtcttagtcgtttccatgtctgcttcccaacaagattctgaaattatctctatcactttctccatcttctcctctgtcactaagattccgttttgaagtagcgcaagatagacttgttccgctgccgcctttcggatctggatcatgtgaaaagaaaatgtcgagtaaaccaaaatgcttttaagatttaggtagaattgtgtttcatattgaagtgacaagaaccattgggtatcggtggccaaggaatgatagaagttgagagaatgcttttgtgctgatgaaatgcgagactgaagcaatatatccaagtattgcaaggcctgcttttaactttgtgaaatccttagaagctcttagttcgatggctagagaatccatgacacccgcgtagaaactaaacgtatacgactgaaataaaatgatgacagattagctttgtatggaatgtgtttagaatcaatctataacctttggcaattttaaaccaacctcttgattcagaaagatcttgctgctgaagaggatctcaattgtctgtgtaaaagagagaagttaagacataacaacatggaagtagaggttaagacggggagtttttacctgtagacagggtaccataactctgtcacatttcttgtactcttgaagtatccagagaatgtcatctcccagggcagactctctggattgttgttctttagggtctttagcttcaccttccctcatatactccaacaatgcaacgagagaagcctttctaagtgaatcttgtaatcctccaattgaaattactaatccagacatcacctctttgctgtaacaacggagtttcaaaagctgcacaaaccgtgggaaagagaaagccggaacctataaaggaagatatataatttatagtcagataagaaattccatcaaataatcgatgaagcaaccaagtctccaggatcagcttaccgcccattgtaagtttgccttgttgggaagaatttcttccagtttttctctataaggtacatgagggacggaaacagatttgtgatacaaaatcctttgaagaacctttgcagctgtttctcttaatttatccattttctccactccttgcttcagcatacctccaattagacgggtcgcaagattcgaatcgaaaagtgaggacgtatcatcgttataatcaccctctgaatatgtttccattttcttacagaggatatatgtacacttctcaagaccatggactgcagcttcacgaacccaagaacctacatcacctcggttatcaactgaatagtcatcaagagctttcagtaaagtatccatcacttcagtcttgataagaagaaaaagagacaggtcatcatttccaggatcgctagcccttttctgagtaagagtctcacacacggatgtgagtccttttacagcattcacacgtgcctctgcatctctgtcttcagggttcacctgcttggaagaaaaacatccatcaaatcaattatttcattctgttttccaaagttaattatatcattctgtaatgaagtcaaatatagtcttcattacctctatcttacacgcactgcagagcttcaaaactatatccttccattttgcagtcaatagttcatatggcaagacacctagtgcaagtgcagaacctcttcggacagctacatttgggtccgttagatgttttaggtgttttaatattaaatcaacagatttcttatcattgccaacgagataagattgcacaagctgtttaacagcactgacagctgcattctgtataataagtgaaacttgtcaactattgaattctgctaataggatgagaataacttcatgacttttagaaagataggtacctgtatttgagaattgggatgtcttaaattctcagtgagagtatcaagcaagatccgttctgttctttcagctaaagtcacatgcgataacgaaatacactcgataaatcgtgagacagccagtcgcattatttctccaccttttccacggtaaaggcgtgctttctcaatggaaggaacaataccagccatacgcttttggctatctgtaaaaattgagtgcaacatgaaccttaaatataagggataacgatgccaaccatcaaactctgttaatttttcatctgattaaaaatccgcttacaaagtctagattccaagatggtgcccatatttttgactttccatatgcaaaggtgccacaaaagccaaagctgaaaaaatagatggtactaaccagcagaaaggacatagccacactggtgcagagctaacacaacctctccagctgccaatgttgcaccatggcgcatgcacaaatcagttgaaagggtacaaggaattagtttctccagcacatagttggcaaagtgcttaggctcgtacttaacaagaggagcaagagcttctgcagcaagttctctcaagcttttatcctgatatcacaatattgaataattaacatattataaaagttatatgatacagttcccaatcaagctattggctctagttcatgggttgttgaattttgaaattagttgttgaacacttaaaccgttcccacagtaaatacaagcagggcattaaagagatattagatttgcagataaatcagagataaaccaaatatcaaacagtgtttaagataagcatacccagtggcagatcttgttgtatagcaattcatccacaaaaggatatagatatccttcatattgagcaatggaaacagcaacctgaaggtaagagttcacccgagaagatagggaaaaataatcagctatgctcactatgtcaatcccatgagggtaatttccttgtcttccaacattctcttggaaagcagcggcagcagcccttctacagttcacctgacaaaagaaataaataaattatacgcaataaagagaacttcaaaataaagcaagaaacggcgaaaaaattatagtcaaaagagggattagtacctctctatcaaaggaacccactatcaataaatctggagcaagctgatccagcacgtttttcatatctttgtgggaataggcgcgcccaaatgcccaacaaacataggcagctgcatcacgcacatgagatccaacactgtgtggacctcggcgaacatcataatggagtgcctgtaaatgaaatttagatgtaaatccacagaacttctgcactattgtgggtgggtgatgccatttcttcgtatgcgatgactatagatataagtattcatgtgcatgaaatagagtacgaccttcacaataactgggacgactagtggaaaacttctaggcaaaagtaaccctctacgagccagttcagctaaggccaaacaacccccatgccatgaaccatctccctgaatgccatgaaaaccacaataactgtcagctagataatgcatgcttttaattggatttaagtacacgcaagccatgctgccatatccacaacgagtacctctcctggtgaaaaaagctccaatacagatgacaacacctcatcagacagaacagatgttagacgtgaagtaacacgacctataccctttgcagcagaccaacgaaccacggtgtcctacacagttcagaaaataataaatttcaaaaggacaatgcttgcagatactagtaacatgtgcgattgtctggttggcagctgaaagtttcaagaggcggaaagttcacataagatattaattcaggccatcacagctttacgtgccatctcagatatgtataacattcaagatctgtttaagtactatctggttactcgagtctacaacttaatataaagcagcctacttatactcaaattattgtgtgggcatctattcgtataagtttagagataaccacctaaagttatcagcctaacagtagtatctcaccctttaaacataccgtgtccctcaaaccagatagtagcatttcaataatctcttctaagatttctggaacatccatatcttcatcctcttgatcatccaaactttctggttgtaagatggcagtcacagtatgatcaggcgccaatctttgagatgaactcgtagacatattctcagaaagagaggcggtttgagcctgcaggtaattcaataaataagtctcggatgactaacagaaaatgactaccaaacattatgtcaatattgacattattcatagagtaaaaatataaaaacacatgacgaggaagagttcctctttgcactactattctacaagctaaaaggtatgtaccacatagcgccaggaaggtgagcgatgaggaagacaaacaagccctatcctctgagttaacttgatcaaatacttgcgaagcagagaacttttagccgccgcgtttgatttgcttagcacagtcacatcattcaaaacaataggaagcacatctagcaacactttccggctagcagtctgccaacatgagtagacatattagatccagatgcaaattggaacaggttaagtaatagaaaccagtaatatttctacaagatacaaaacagataagtcaaattgattatgtactttacagacatctatatatgtttgacgtgttaagtatggaccaaagttaaaacaaagagaattccaggttacaaacagaataaaccttaaaaatggcagatagagcttccattacaccaagcaagcgaaagtggttcgtgacactatcttccttacaagacaaaacttcatatgtccactcaaaaaagctgaaacggaaatgccacaatagaataaagaaaattagttaatccattcacggtgagtaaattgtacatgttacaattgaaaacagcagtttagaaacaatcttaagtgttcaaagtgaaacaacactgaagcactgatggtggtaggaacagacctcgaaaaagcttttcccatatccggacgagttaaaagcttagagagtagcaacctcgatatcctgcgcattggtccagcactgcacagatagtccttacagaaacctaatatcttcaataccaaaggagcaaggtcatccacaccaaaggtcttgtcatcagcaatgcttgtatcaacagaagaaatatcaaacggaaccaacacaaggattgaaagccacaaaagagtaacacatttggcctccatttctccagtgctttcttgcctcaaggcagaaacagaatttgtactatggcacttctcgaggagcaaaacggcgagttccagatcggatacttgatgcggaaagaacttgataacagctttgtacccacatacagtaactaaagcatagataatgatgcttattggcttaataatctcaagaatttcatcaggtttggcctctaaatcaactgttttggagcggatgataaacattaatggagaaactatactctctaagtaaggttccactaattgaccttgctcctggtatttatccatctacaatacaacaaaacaaagtcggagaaagtaaatcaacatgatactgaaacatgggttggatcaagtagatgaagtcaaaagactaagaagcgtacaatggatcggatcttatgaacagaagtaggatcaacaacacggccatttgaaacaatatcatcgagaagagatttaacgagcttccattcttgtaaaaaatacctctgtagaactctctccttagaatcatgctcatcgtcttcttcctcttcaatttttaccgccgtttcgatttcgatcttcgtcggcgacatttcctctgctctagatgccattactggaaagagaaaggggttcaataaattcccgcccgccgataatactctcagtgtagaaccaccggcaaatcacgagatcggtgacgtcgacgatgagtttacatgttaaggcccatagtaatttattgggcctatatacccatgttcctattttgggcctataaccttcctcaatgtagcttcgttggtctagattttccatctttgggtgcttttataaaccggcttaaccagagttggtaggcttgatacttgaatctctttctggttttgtatattcaagaataagcaaacatttccttaaaaataactttttttttgtcgtacctcattttaaaaaagatattttatcctatttcattatggcggaatatccaaagaacaaaaaatggtagtaataaaaatagcgaaaggcatagaggatcactaaactcttagccttaatcagcggtcaagattataccttttagtgagatccaacggtcatatttgatccaagttgtcccttagtgaaaacgaagagatggcgaaattttgtttgattggctaaaaatcaacacactgataaaataagagttgcagagagagtctctcatcttcttcatttcttcaccaccatcatcacacaccttcttcttcttcttcttctctctctatcacaagagagtcaaatccatggcttctacttcttccctcgctctctctcaagctctcctagctcgtgcaatctctcaccatggttctgaccaacgtggatctttaccagctttctctggactcaaatccaccggttcacgcgcctcagcttcgtctcgtcgacgtatcgctcaatccatgaccaaaaaccgatctctccgtcctcttgttcgcgctgcagctgttgagactgttgagccaaccactgattcgtcgattgtggacaaatcggtcaactcgattaggtttttggctatcgatgcggtggagaaggccaaatcaggtcatcctggtcttcctatgggttgtgctccgatggctcacattttgtatgatgaggtcatgaggtataaccccaagaacccttattggttcaaccgtgaccgattcgttctatctgctggacatggatgtatgttgctctacgcgttgcttcatcttgccggctacgacagcgtccaggtctgtgatctcttctctgtttaattgctttcgatctgatcgtaattgatgaatgtagtaactttagtggatagattgaatctgttttgatattcatctgatggctgcttgaagtagattcactgaaaaggtgtttggatttgtttattaggaggaagatttgaagcagttccgtcaatggggaagcaagacaccaggacatcctgagaatttcgagactcctggaattgaagtcactactggtttgagattttgcttcttttggcttatggttcatgtgaaatttcacagaaactatctataactgtatttacaattgtgctctctgctttggctgctatgcaggtcctcttggacaaggaatcgctaatgctgttggtttagctcttgctgagaagcatttggctgctagattcaacaaacctgatgctgaagtagtcgaccactacacgtaatatatataacccatagttatgttgtcgttcttggtttgtatatagctctgataatagaaatactgtttttgattgattgtctagatatgcgatccttggagatggttgtcagatggagggtatttctaatgaagcttgctctctagctggccattggggacttggaaagctcattgctttctacgatgacaatcacatttctatagatggagacacagaaattgccttcactgagaacgtggaccagcgatttgaagcccttggatggcatgttatctgggtgaagaatggaaacactgggtatgacgagatccgtgctgccattaaggaagctaaaactgttactgacaagcctactttgatcaaggtaactacacaatttcttaaccatcaaacatcggttggtctaaagacctttgatattgatttaccatattgcgtaatccaggtcactactaccattggttatgggtctcccaacaaggcgaactcatacagtgtccatggagctgcacttggcgagaaggaagttgaggctaccagaaataaccttggatggccgtatgagccgttccaggtacctgacgatgtaaaaaggttagtaaatccaaagcaggcttatgtttggttttattgctttgaagttgccttgatgacttactgtttgacttgcacttctctagccactggagtcgtcatacacctgaaggagctactcttgaatctgactggagtgcaaagtttgcagcatatgaaaagaagtacccagaggaagcttctgagttgaaatctattatcactggtgaattacctgctggctgggagaaggctctacctgtaagtagaactctctttgcattctgtacaattcaattggtattctagatatgagttatagaacatctttctttttccttttttagacatacacaccagagtctccaggtgatgccaccagaaacctgtcacagcaatgtcttaacgcccttgctaaagttgttcccggtttccttggtggaagtgctgaccttgcatcatccaacatgacattgctgaaagcctttggcgacttccaaaaggccacacctgaagaaagaaatcttaggtttggtgttagggagcacggaatgggagccatctgcaatggcattgcccttcacagccccggtcttatcccttactgtgcgacgttctttgtcttcaccgactacatgagaggtgccatgagaatctcagctttgtctgaagctggtgttatctatgttatgacccatgattccattggtcttggagaagatggaccaacccatcagcccattgagcacattgcaagtttccgtgctatgcccaacactcttatgttccgtcctgctgatggaaatgaaacagccggtgcatacaagatcgctgtcaccaagcgcaagacaccatctatcttagctctgtctaggcaaaagctgcctcatcttccaggtacatccatcgaaggagtggaaaagggtggatatacaatttctgacgactcttcaggcaacaaacccgatgtgatcttgattggaactggttctgagctagagattgctgcacaggctgcggaggtgctcaggaaagacggcaaaaccgttagagttgtttctttcgtgtgctgggaactatttgacgagcaatcagatgaatacaaggagagtgtgttgccatcggatgtatcagctagagttagcattgaagcagcttcgactttcggatggggaaagattgttggaggcaaaggaaagtccattggtattaattcattcggagccagcgcaccagcacccttactctacaaggagtttggtatcaccgttgaagctgttgttgatgcggccaagtcattcttctaagagatttaagatcggaccattctctctgagggggttttgtctgaaacttgatttggaaacaaggctattcacaacattgtctcatatctcgaaataaagtgcaacaagacacaaagactttcactttcttttttgtttttgttttttgtacttcaggtcaagataggttttcggtttgagaagagaaacaaattagaaagacaatgtaaaactcccatgatcattcgtgtaatgctaaatgcttgaatttcagcaaaactttctagcatttgtttcttggggtgtagactaaattacctacataagcagacataagcattgggtggacaagagaaaacagggtttggttcttctttaaggtatatctacatttgggggccctatttatccatattgaaggaatggtgaagtttctaccttgagatatccaaatatccatatctctgggggttttatctgaaacttgatctggaaacaaggctattcacaagagtgtcttatatctcaaaataaagtacaacaagacgcaaagactttcaccttttttttttgtttattgtaatttgggtcaactaaggttttggccttttgggtttgagaagagaaacgatttagaaagacaatgtaaaactcccactatcattcgtgtaatgttaaatgcttgaatttcagcaaacttcctagcaattgtttctttggtgtagactaaaatgacctacataaacagagatacgcattgggtggacaagagaaattagggtttggttcttcttaaggtacgtttacgtatatctacatttagggtccataattatcataagaggagatattgaaggaatggtcatgtttcttctaccttggcatatccaaatatccatgtactaagcctaacaactaacaagagatgaagaaagctacgcttgtcactcgtcaatttgtcattactcatcactcatcagtgacgacaacacaagtaggacccactacttgttggcatcccaacattatagtatgcttcaacagtaaagagtatattcagattccctttttgttccgatagttaatgggctataggcccagtaaagcacaatactgtccaatggaattaaactctaggcctagttaatgacactaatttgtagctcccatgcacgtgacaaaacatccacacgcatatgtaacacgtggcttaatgctgattggctattcgaaaacgctggaccatctctgattgacggcgaaccgaaattggtcatgaatgcaactttggtgttaagttttgataaacaaatacaagacttcggatttttgaagatattgtaccatgatattttaattgtattgtggagtaaatttttttggtttgttaatattatggttttgtcaaattcttaatacaaatttattataatatatgtgttgttaagtgttatagcaaatggttgaaatgttagatttattgattgtattatttaagtgtattttttttttatgtaattaattggatgaaattttatatttgaattttggatagtattatatattataatatatgtttgtcaagtcttagagataatattttgattacatatagttaattttattaataatgaagaaattatgtaattctagcatattttcttgctcaagatgtattggtgtgagcaaatgtataatactataatccctattttccatagcaagtaaatattgcttgaaaacgcccatgtttctgattctgtgtaagcaacttttgcaagtagattgtgtaacaacaagaaatctcttcctttaagcattgatggcgatgtcaaaactgtttgtaactctcacaataagtatgtgtctcttaagttctggattccaaattgtcacatctcttgaagccttcaccatatttgatcgtccatatctattcctcaatggaagattgacccgaacaaacctctcaagtgctgaaactaccacaaatctcggaactctgttctgttcatccacgaaactgttttcgaacatcaactgaaatgacaatagtccaagtgctgcagttccttgtttctccaaagaagccaaacttagaatcttgcagtcccaaggtggtgcttcctattccaatattctgcagtaacaacatgaatacttgatactttcgttccatgaatatatgaagaccacattacatatttgtccttccactatgcttatgcttctcatctttctctgtttcgttttcctgccataactctctcattccatcaagttgcaatttcaacacttttaactataagccatgtctactcataagttcttaggcctggacctacaactagatctgagtatgcaaaagccacagtgaaaaactctctcatcaaagccatcccaaaaacatgtctacttgctgattgtttttccaagaagttgattatgttgcacgtacttgtgattcctccaagtaaccaatggctacactgaaccaaaccaatccaccaatagtgacacgtatctgtacttacctgcctagattttatggtcgttctcttcattgtctaaattcaccaaaagttgttgacacttgggactgagacatgtgatcttgtatcataaactgcagactttgaaatggtttggcctctgtgagaaacttcacatgataagaaggaactctctgcaacaacttataagtcatgttaaaaaactcctattgattgagcatctttctatttcatcatccattgatttcgactcaagtcaccttccttcactaaagtctattgacaatccatatgaccatattctttgcatgaccagagcaacctccaaattatatctttctcctgtttgtatttgaacttactgttgaactttgcttctttcgttacttaagagcaaaagaaaagagaacatatttaggtttatgatgtaaccagaactgctctgttttatctgtcgagagaaggagaacaaagtaagtgggaacttgtttttatttcactgagacacgaaagcaacgacttgtaacttctcggacactgatacccattcacaaccgacacgattgtgttatgacaccgttagacttttacatacacacttaattataggagtataacataaaacggaaattctattacaaactaacacttacaagcttacaaatttttttatgtcttccattaacatgtccatcccatctaggtgaaggatcatcaagaactatacttctataggattccttcatttccaaggtattagccaatctgatgattacaaaaaccacaagaatgcctgcgcttgtagactcggaaatttgttttatcatcgtcggagttttagagtctttgtctaatttgctaaacaataagttaaaaggaacagacattaaaaacatgcaactgaaagaagtattaagacaatatctaagcccaacactaaattatcttcaacttggacgctactagcggagataatctgtaaaaattctctgagaacgataattaacgttaattgaaagataagctgtaacgataatggaaagattcgcataaacaaattcgttccctaaaatcaaaatctcatagcaagttgtaacccatcaaaactagcgaaaacagatacataggttcaaaagaagaagagctttgagttgcaatgcagacaatgaaatggtccttcttgaaggacatgatcaactctattcttctcaagccacaagagtgcttgcagttgtagactcgctgcaaaagcaagaacaagagttggcatcaaaattcaaagtcaagagatgataatcaagaactcttagatgttcaagtacttactacttccagacgggtgggagcttcttggtcttcttgtagtaacgagcaagacgatggattctgctctctacaagaatcagcctgaatttggaatccttatctttcctgttcctctcaagatgcttgcggatagcaacagctttcttgatcaagtgatacagatcctcagggatctcaggtgcaagacctagagagaattacaaaagatctcttagtttcagtgattattcaataagcaaaaaaaaaacaaacacttacaaaagaatcaagagagattgaatagtaccatgagctttcaaaattctgagaatcttgcttccagtaacacttttcacctgtggaattccgtgagagtcacgaagaatgacaccaatctgcgatggggtcaaacccttcttcgcaaatttgcagatggactcatcaacctaattcaattatcaaaacaaacatcaggaccaatcaaagtaaacactttattctcaaagaagtatcaagtaagctaacttggagagtgcaagcaaacacatcaatattgattgcatcacagatagtactcatcaacagattaaatcactaaaacgaactatcacatcaagatcataactctatttcttaatatgtcacaaaaggattgaaactaacaaacaacaaatcacatcaataaaatcaaattcaatgacaaaccaaaactaaaatgcagaagattctcatattccaaatttcctaaccaaaattagaatcaaatcctatgttcagccatgcgagaggtagcgataacattttcgaaacacaaattgaaaatgaaatcaaacagaaatctagattaagtctacgaatcttacatcttgaggggttgtcttgagccagctcggagatgaacgcttgtacggcaaagcagatgccgagatacccttactacagaacacacaacaaaatgtaagagaacaagttttcaaatcaagactcaatcagatacgagaaggaaacgaaccctctactatgcattcgacccatgactgcgacggcgaagtgatcgtcctctcactgagatcgttcttcctcggtttctttcttacggctgctgctgcgcttcagagaatccacaaaccctaaattgcttctttatatatacctcgtatcttatggtcgtgccacaggtctttttgttccctaatctatatgggctttagttttcatacataggcccaattaaaattaaaagtctacaaaaggaggccttgaaactcatgtataaaacaacacatatgtaaacgttaccgtttcgaaaatagataaaaactttcgttagttttaaattagttagcatttagttctttttcataatcagtattagcaggtttaagtatacaattttgttagttgtttattgtgtaatgaacttttaaattgaaactatattattacaataggatgcataagaaagtatccaatcgttctgattagaagtctaatcaagtagtcatcaacctaaggataagtgaacaacaaagacgcattaatagcaaaactcattttaaacaaaaacggaacctagctaaattggtttatgcaataccgatctattcacaatgtatgtagacacaaaatagggataaacgtcattgtatacacattaacctaacaagcacgttacactacatatatatcacagtcccaaacgaatacttaacacattacacatgatcataatcaaaagtcatttaatatgttgcacagggtgtagaatttaaaccctagacctaaagaaataaattcgctatcgacattaaatgttattcaaaacaaaatctaagaatcgaagtgagtaaataaatgggaagatagaagggaatgaaggacacgtaaatgattgggttaaacaaatgtcaacgctaagtccattccttaaagccaaaccacacccatttattaacctaactgcctaaccgtcttgtcatcaccttcctttcctcaacttctctttatatagaaaccctttcttctctcgaaagccaaacatttttatcaagatattaacacaagaatacgatcatgaggctcgtctggtcgccggaaactgcctctaacgcttacatccacaccgttagatcagtaagaatcctcctctaattcagatggcgcattttgtacatcatcttttgttttcttgttcatgtttgttcaccgtcaattcaacttgttgacctaaattgtattttgatcaaggaaatcttcaatatgtatatgaattacaatttttatagttcttataattaatattttcttcgctgtgaagtatatgtggtttttatttagtcgatcttgatgtatcatgtacatatatgaatttagaatcttgatgtaattatttctatatgtgtgtctttgaagtgtaaaagctacagagactcgagcgtggcggagtttttatcggctacggcggcgggatggaacacgaggctgatcgttgagacttggtcacgtggagatccgatcgcaactagcgtcggactcgccgtggcagcgatacacacatgtggaagacacgtgtgcatagttcctgacgaagagtcgaggtcggagtacgaggcggtgatgagaggagccgttacgagtgactcaacggaggttatggtcttagactcggcggaggacgtggtggagagaatctccggcgtggatttcatggtggttgattcgaaacgccacgagttcgtaaacgcgttgggattagcgaaaacgagcaaaatgggcgccgttttggtgtgtaaaaacgccacgctgaaatctatccctgggtttaaatggcaaggtcttttgagacgaggtacacgtgtcgtgagatcggtgttcttacccgtcgggagaggattagagatcgtacacgtgggagccagtggtggtggtaatggtttgaggaagattcctagccgttggattaaacacatagatcctcgatctggagaggaacacttgtttaagcgttagtcaacgtttttgttttcccttttaatcaaaaacaatgtcatgtattttttccataacaattaccatttctaatcatgtaatagatagaaaagaatatcaccacatcaagaagtaattggtgatttgtttccaaatgtatagcttccttttgcttctagatttgtttcccaaaaatgttatttttgaattagatgagaacaaacccatgatacctttaatattcctcctgatttggccaaccaaagaagtctaattttcactcagttgctaatgaaacataaataattacttgggacttgattttacactcctaaaagaagtgatagacttggtcttggactttatgatgtaatgggattgaaaccctaaatgtgtgtaatctcaatcaaacacaacttttaaaaacaataagaagaagtaatatattcgtctgtacttttgaaaattgttagttattttagggtttttttgtgggattataagccatcactacttgggagaattatcttaaatgtgtgatttttttttattttaaaatgtaacgcatctcacgcctaatagagtaataatcgttcgtacacgtatctaagaatatagtctacaatttactttcatttgaagataatcttgtatttacacagaatcaatttaatttgtccaacttcaatgtatttgggagaaattaatagctcaaatggatattcttctccttataaatttttaaaatgtcctttaaaagtaatttccttatatcttttttttttcaaaaaaaaaaagtcaaaggaaaattaaaaaatttaatagctagtccaaacaaagaaatctattacaataaataaattattataatattttattttcttattcttcgagtgatattataaacaatagtcctcaatttctcctccctctatcaacgtaaactccatttctcttgtctctcgagatagttctgtcagggtacagtttatcacctctaccatccaatatcaatgacgacacaatcatcatcatcatcatcatcattgccctcgtcactatcatcaacaccaccactattagcatcaaatgcaagatgcaaagttttaaggacaggagcatcatctaaaggaaaaggaaaagggatcaaatatccggtcgatcggataagcatgcttccggatgaaatgttacaaaagatcctttcgacactatcaactaaagatgccgtgataacaagcaccttgtcgaaaagatgggtggatcagtggaagcgcataccacatctctgcgtggacatgagaaatattatgagaacaaacccgaccagctatgttcatgaattatctttccgctttgctgaatcaatgacgaaggtttgttaatttcacttctttttttcccaagccctttctcttataaggtttcattttaatccttttctttctgaagattttctacattttaaataggtctaccaataaactgatgtttggatagatcatttagtacttttgaagttgtggtagaagaaatgttctacacaacgtttggtgaaagatatatatgttatagttcatcaactaagagatttgtgaaatacttttcttatttcacataacggtttttcgcgccaaaaatctagctaacttatgatctatcttgtattagataacgatttttcgcggcataattttcacattattaaaaattacaatctagagatatgaaattgattagtgaatgtattagaattgtatagtgaatgaagatctatacagaatttacctcttgagtttactcatcatagagaaaatatacccacaaatgtatcaattgaatctaatgatatacctctctctttcaattaacagatttaacttattgatgtttgaaagtgaattaaacatataaaagtcatgcataactagctatacaacgcatctcaacctttccaaagcgttcaacatatatatgtaaaccaatgtaggatttattgacaaagattattgcatgcatatgtttaaatattattgtataacatataacagttcaatttgtgttgtgcagactttaaacaatcatcgtggtcatctagagagctgcacaatcagccatattcagttcatttttttgttcatcgataggtggatccaaacagtgactcgtgagaaacaaaccaaggagattactcttgtcaacaatataggttgcatgacaccttttgttagatataatagtcttcacttgtccccaagtgcattctgtcatcctagcctcacttcactctcacttactcgatataagttactcgagaaagccttcaagaactgctgcaatcttaagatcctgaagctttatgacatcatgtccgatgttagtgtccttagcaacgttatcaaagcttgctcctctcttgaggtgcttgtgttgcaaatcacattcttaaaccaagcaagtgcgttgaagatcgaaaacaagaaattagaattcttgcaagtgacttggccttgtctgatgaataggatggaagtgaatacacctcgtttggtgatttttgacatcaaatctatctactgttttggctactcagttgaagcccctaaattaagcatgtttaaaagagattattgggttggtgggatgagttaccctcatcttagctaccatatatcaagtctcgctcaggtacaagtacaagcaacatgcatgcctttggatataattttgaacataatattttgttttgacatggtttgttgtattatgaattcaggagaaaataagaatttggcttgagcttatggtgagccaaatttatcatatgaaacggactggatccttatccgtgagtgtcgatgtgagaaatccgaacgaagtcgagattttgaaggaagtcttacttttgtgggatggagagatgatggatctggagatcctcttcaaggtacattttacttgatggttttttttttctatgtggataaataatttgatcactcacatgtcatatttgcattttagaacaacaatgctcctatagaagaaggtgaatcttttattactggtggagcacgtaacaaatggtgggatggtgaaaaaccgtttccagatgatttcttccgcgtttgtactgtgtggatgtataatttcgatggttctaatgaagaggaatttgcattagcgtcacgttttgtgacacaaggaacagtgactgaaaagttgatgataaagacatcgacgtatcctccagtgaagcaattaatgacagaagcaaaagtggccaagctaatggaacttcctaaaggttacgagtatttggacattgaatgcttttgatgatggttttggttcgaatctatccattggtactctttcctttattactctgaggattatatggttttaaatttcaacaactgtgtttttttgggtatttgttctctatttttaatgtgacatttggatatgtattggtttggatattatttgaggtttttgttttggtcaaatgggattatgttataattgcataacaaaaccatattgggtaaaagctgattcaaacaaaagagtcaagaggatttagggtaaatcatgtgtgttctacatttataataagatcatatctatatatgaactattgaagatgatgaacatatatgtggccaacaaagctaaattgtaatcatcctcttttcaaaacccacaaatttgatgatgacttagccttccatgggaagacatctacactgcctaaagtgaagcatccatcttcatgttagtagatttctccttgacatgccacttgctctgtttttctacgtattgctgttttacatgggatgatgatgatgatcaaagtcttcttgagcatcactgggaatcaaagtcgggtttcgaagggtattcaagtccctgcagctccggcattcgccttagatcttcttctgtgtatcctgggattaaccagtatctcttatccattccaaatacctaaacacgatgaatccccaaaaaagaaagccatagcagtgagggagaagagaaagcaacttaaaaactttgaagtgctacattcagatggaagaagaaactaagccaatgactttaactagctaacctgttcaaagtttttctttttaccgaggtcataccgccattttgtagtggttttcttctcatatgcctgttacaactcaacaccaagaaagtttcatgagaaagagtaaagagtctaaagacctaaattctcatttgagcaaaggaaagctcaaagcagcaatgggatgcacctcaaagtgtaaggagttgaaagatccaaaaatctcatttaagcaaaagttcaaagccttagccatgagatgcaccaaaactctaaagatccaaattctcgtttatgaaaaaggagcttctagctttggccacgggaaactttataggttcaagtcaaaagaaaaaggaaaaggaattacctctatagttgtggtattgccagctaccaaggaaatatgcataattaagaaacccatcacgctcaacgcaaatgccaagttcaaaactgttgtacgatgaaacaaggtgagaatgattaataaatgaaaccaagttacacactacataccatatatagtataaggaagtaggaacataccaaatgcaagaaaagtagtagcaagagtgcctggggttccaggtatttcttcatcactaaagaatgcaatgaagtgcggcataagaaccaaagtcacaagggtcgtctctaaaaatgtgtagaactgcatatgaacataagaaaaacacacacaagttatgacaagaggaccagattacaagctgaagaagattctataacattagtagtggtagaaaacaaacttaccaagaaaagaagaaaatacttatagttcagtgctcctacacagttaacaacccaaacacaatggtgatccatcttcaacacacaccgaccacctatattggaatcaacctcacaacaattcagtttcaagactcttaagtatacatggtaagaaaagaaaagagaaactgaggaagcttacaaacagaacaatgatgacaacgagaaggttttagttgattgcacttccgacaaaaccgaactcttgggtttgaagaagaagaatcggattgtaaaccaacaaagtccaaactatttaacggatcagattcacctctttcttcatcagtagatggtctccaattaggaggcacaacaccaggatcagtaaaaaccactgagaaatagctccacaaaagcattgccagctgcaccaagataaaaacacatccttgtctaaattcacaaaacttcaatctaaaacagaacaagacttcacatctaaagcaataaaaaaggaccaaactttattgacagaattgagtaaagcacaaagctttagtattttgaattggggaagatgattgacttacgaggaaatggaagaggattaagatagtgagagcagcaagagaatcaaggccaccttgagagagtgcaggaccataattagtcaaaacgacagcgtaataagtaacaccgacaacaccaagaaccaaaaggatcatgatcgatccaagacctcgtaaggcagtacagaacttgaatacgttccacgccattgttgtaccagatctatgcatagtcaaaagcaacgatcgaaagaaaacctttctggatcttccttccggagtaaaaggaaagacgcgtagtcaaggccaaggaagaaatgaaataagtgtttctggggagatttcgaagaggtcttagggtttctttaaatctggaaacaaaatcaaaacaaggggtttaaggaataataatatgagagtgctaaattgtaagatgcagagaccccatgaaggaggaatgatgcggagcttgaggaatgagactttttctccttcttggattcgttttcctcttttggagctaacaagaaatttcagacgaaacacttttaactttagatttgtaatttaatgacttttagtcaatcaatctttcagaagcccaaactcaaactgtgtaaataatatgtattttttactactagcgtcagaaaatgttacatttcggtaatttccccggttgattcaaagcaacccaagcatcttgcggtgaacatactttacatcttgaaaattccaaatttttgttttaaccttggttttggaagattataatataatcggaaaaattaattgagaaattgattcataagcatttttatgcttcgtgtggataaattagaatctcataataccaattacaacaaaatgatggtgaacatatacaatgaatttgatataaaaaaaattttcgtttcatggtcgaacggtgaatagtcgaagatgatgaattttttattaatcttaaaatcataataaataataaagtaatgtaaatttaaattaaggtttaaaatgttagcaaaattatattagtggtttataatgttagtggaattctttagaggtttaaaatgttaccaactgacattttgaaggttttttttttgtaaccctggtatgatgattttatttctcaaaggacttgacacttgactagtgaaggaaaaaacaaaaatgaaaaaaaataataacaaatcgcccaccgtggggctcgaacccacgaccacaaggttaagagccttgcgctctaccaactgagctagacgggcttcttgaaaatatttctacattacgctattaattaacttggtgtacctattaacaacattttacagctatcataaaaaaaaaaaaatcctatcatatcagtttggtagttatatgtgggttttctgttattgggctcctgaacgaacgagtaaaactccaatgggccaataatagattgatagtagtaagccctgtaagaagtaacaaacttcttcttcttcttctcttactccaaagagtaaagagaaatccgagctagtgaagatggcttccatggcgtcaccgaccacttgcttgtaccaccacaaatgccggagaaaacttgttttctatgcccgtcgtatcagtgcctcgattccagagacttcatatgacaaacatccgaagctaattggtcgaaggtactagtctctttctctcctgcttgtgctcgtgtttatcaccgaaccaagtatctgattttgagatctttgtgaaattggaagagatatcattcttaggagcagtgaattagctatgatcggagccatattccagcttaggtatgttttcttcaccggaattctacatccccacggctgaggtgttattatgatgatgaaatatttgtgagtggttttagtgggaaaaaaccagattatctaggagtacaaaagaacgagagattggctctatgtcctgccactaataactgtatctccacttctgagaatatcagtgatcgagtgcattatgctccaccatggtaattcaagagctttttgtgttcagatttgggtcttctggtttgaaatgtttgatcatcaaacactgtcttgttgtcctggtgggcaggaactataatggaggaaggaaaacacctgtgaacaggcaagttgcaatgaaagagcttcttaatgtggtacaatccttaaacatgaactgcaatctcaagatatgaatccagtcaccatttgaagttcttgtaatcttccagtagttacagcggttttatcaccattgttgcagattaagtcggtgaaaccggataaatttacaccgcggattgtggagaagaaggatgactacgttcatgtggaatatgaaagtccaatcttgggggtaagttaagtaagctttatgttgctctctcaacctccatacctcaatatattggacaagaccctttggtttttgacagttagtagacgatgttgaattcttgttcactcctgggaagaactcgaaagtggaatatcgatctgcatcccgtaaagggaacttcgactttgatgtcaatagaaagcgaataaaggtaacaactcggatactcaagtgatatatctctgttattgccactggctaatagataatatgctcacacttttcttcattttttacctatggaggcattgcgacaagagctagagaagaagggatgggtatcagagaacagcttctgaagaaaagagtttccagattctattcttgtctattaaatatcttaatgtgatctatgtaaaaacattgccataaatagtgagagaaacattgatttaagacaaggattcgagtgattctcatacataaggaaacagttttggagaaacttcaaacacgagtcatgattttaactgtaaaatatcaaacccagtagcatttcatacgagttctacaactcaggaagctcgatgttgaagtgaaataacaaaccgataaggttggctaaatgcactaaaggagcttagtctttcctcaggtccatgagttcggtcttgataccgtcggccttaagtatcataatctcaagcttgtctccctattacagtaaacaatccacaaagcattagttagagaaaaaaacttgaggaagatgaagtagttgtgcaacgtaagggatatagattaagtaaatgttttggtaatattttgaagacttgaaccaaatgcaaatgatatgagcacaaaggcaagctttaggtggcgtggtgacaaaagaagacacaaataggacaacttacagtgtagatatccctctctgtggcagatgcgaaaacagttttaaccaagtcaactgcttcagcttcggaaaggggcgtgtttgaatcctacatggtggcagaagacgaacaaataagcaacagaacgattcattttatctttacaatgcgaaacgccaaaagcacgaatgaagaatatcaacaaacctgtttaggtagcaaaagaggacttggagacttgagctgattgtcaaggaaaggcatgatgagtgtggaaccagaaccttgagcaccgtatccaactctctcgtatgagccaacagcgtcgtaagtaaagacacacccttttcctggatatattcaagactaaagatcacacaaagtaccctcttctaaagtcacatcataacggagaaaaaaagaggagcattttaccttcctcgtcaagccctcctagaacattaaaggcatagtaggggaaaaaccgcttgaaataaagcgtgttggagagaagctgggccattgcaggacagctcatctgcttgttatgctgatgttgatagatctgaaggaaaccaaacacagagaaaacactcttacacaagtctttcatcattttctaatactgcgaaggatgaaagataattgatcaaacgaccaaagtttaactcaccaagtgtctggatttgagaaccttctgcaaagctttcacatcagcctggaagccagaggaagacaaaacagctctgtccgctctggaaaagttaaaagaagacaacagcttaacaagagtcttacaagttacataagatgaaaaacacgagaattctatctatttccatacgaatgaatacttgtggtatataagatcaacaacacagtaacaaacactctttacgtaaggttgaacaaactcaaagaactacacacattgtcaataaacgttataagaaaacgaataagctaagcaataaaccggattatagaatgatcaatgtaatcacaaagtttatatagagataattgtaaccactatcaaaagccatgtctaataataattaagaaacctattttatctccacccatatataactggtttcacccagatctacgaattacgattgcaaaaaaaccctaataatctacagcaataatagttcgattgccagcatggaatcactctcccaaagaatcaacagtgagagaagaaagagaatgggtacttacagtttatggattttggagtaatcgcgactaagaatactgtaaccagtagacatccgagtatcggcggcgataacacagtaatccgatccagcgatggccacacatgttctgaaaaacacacaacgattaaattcacagtaagtgaatcgtaacacaatcgcccagatagcaaatcagaataaagaagaaagacactaagcgaagaaacccagcaggttgattaaaggtcacacgatccgtaccctccattgttatcgtaaggagaccagttcgcgtgctgtttagtcatggcggatttgagagagaaagctttgagctagggcttagaagaatgaaaaatggcagacgaagctttccgggtttgtgttttgatgtcaaagaaacttccgaatcggatcttattagctctggctttgttaacaagaaaaagacggagactcaaaacaataccgttttggacgtggaaattacgggctgtaataggctttataatgggccttatttgggctttgaattccaaagaaataatctttcttttcttttcttcttcttcttcgtcttcgattttctctctcaacgcaaactcgtaagctgcttccattttcccttctagaccattgatttgttcttcgaaaaaaccgttctttcttttgcctctcactctagttccttctctcatttctacttctctagcttcactgacttgctgctaccactaaatcttggcatttgtggaaagttgggaatttagggtttttgggtgtgtgtgtgaaaacaatggaagcactagttgttgatgctggctctaagttcctgaaagcaggagcagcaattcctgaccagtctcctgcaatgataattccctctcaaatgaaacgaatggttgatgatgggtcttcttcagctgataaccccaccactgtctttgaggatgtcactcttgatcctattgaaaggggtttgattagagattgggatgctatggaagatctgttgcgttatgttgtctacactgggcttggatgggaagagggaaacgaaggcaatatactttttacagatccactttgtactcctaaggttcttatctccaaatttcctcctttgttcttaatttaaaagattacaactttgagtctcttttcaattcccataatcctgttctgttggattatgaaaaggaacaattttgttcttttagtacctcattttagatagtaagacgttgttatttttaatgtttcgacctgatttggctctgcaaatgtttgtttgtggacaggctattagggagcaattggtgcagttgatgtttgaaacattcaatgtctctggattttatgcatctgagcaagcagtgttgtccctttatgctgttggacgcatctccggttgcactgttgatattggtcatgggaagataggtattataacttgcttggcctttgttactctttgtgtctttcactttgtcataaactcataattccatgttttatgtgagttatgatgttacatgagatgctgattccctatactaacctttttccatgatcttaaacgttttgttaaaccaattttttttggattcttcttgtgtttatagctggatatgatcaggatgttgttatgtctgatgttttaactttgtggttgatccaactcttttcagatattgccccagttcttgaaggtgcagtacaacacattgcctcgaaacggtttgagctaggtggaaccgagctaactaaattatttgcccaagagcttggaaaaaccaacccgtcgatgaatctcagcatgtctgatgttgaaaaactcaaggagcagtatgcaaactgtgccgaggacgaaattgcttacaaaaaaacccaaaactgtgaaatcgagcagcatactcttcctgatggacaggtttgtgtgaaatcaagattctacattttgtgttgttaccttatacatatagataacaaaaccaatggccttataggtgataagcatcgggcgagagagatactcggttggagaagctctgtttcagccatcaatactgggactggaggagcatggaatcgttgagcagcttgtccggattatctccacagtgtcatctgagaaccataggcagctcttggagaacactgtactttgtggtggtacaacctccatgacaggtactaacaacacttgatatcatagtgtgtttgaatatcttttgggtcggaaaactgaagggtttgttggaatggtcgatggcaggattcgaaagtagattccagaaagaagcaaacttgtgctcatctgccattaggccaacactggtgaaaccgccagaatatatgccggagaatttggggatgtattcggcttgggttggaggagccatactagctaaagtggtgtttccgcagaatcagcacgttactaaagcagattatgacgagactggaccatcagtggttcacaggaaatgtttctgaaaccatagactataaaacgatgttgttgttgtagctgaggattttttttttggttggctttggtttgaagatgtggaccagattatgtagtacatttcaaattatggcttccaaatatcgactaatatgtgttcaatgagcccttttctgaaaacattgacaaggtaactttgccaatgccaacacacacccattgtcagtggaactctaaatggttttgcagatatgtaaccagtgaaactcttggttttgatgcagagaatggccaagatcctctttttcattttgttttgagatctttagtacttgtacaatcaaataacacagtccctttttgttttgttggtgttgtttgctgaaattcgagaaggaaagggtcagtgttaatgtctaaacagaattcaattttttttattttgtaaattggttgcctctttaccttgttacttgttgttagcttatctcatcccttctctcatctatataatcggaaaagtttttaattagtgaaatttaaaatggaaagataattagtagattttctttgactttcttgatttttttttcataattaaaaaaaaactattaattcttgaaattttgcacgcaacccgttagattctaaattggtgacgtatataaactcagaagaagtagtagtaccttctttcacaagactcattttttaacgttcaagaacagaaacaaaattcactcacttataaggtctgtgaccaccagaatagtaaccatctgttgacgtcacaagtaaaggaaaccacccaatctcactgtattaaacgcatctctcgaaaatgttcccaaacgaatcaatgttaaccacctaaagatacggtgttgttgaaacaactcttttgttagtatgtgttagtttagtacaataaaacctttataaattaataatgttgggacaaagatattttattaatttagagagatattaatttattaatttataaagagaatttttggttttcagatttttgaaacttttctatatgtaaaaataaggagttttgttataattctatgatttcaaaatttcacttcataatttttttgatgcgatttgatgcgatttgaaaagacaaccccagaagtttttaatgcagtaaggaagattagagatgaactccaaaaaagttgaagaataagcaaacaacaatataatcatatttcactaaattttcttaaatatatatatatatatatatatatatatattatagaattattaatttatgatattgatgagactatattttacttaagattttcaaaaaaaatattatcttattaatttatcgatttgtgttgttttttatagtagttccaactcggaccggaagaatttattaatttatagaggttattaatttatcgagtattaatttatagtgtatgtgtgaatagacacaaaagggaagaaaccagttttctttcacttgtctcatcaaacgaagtatctgacttgaaatttctagaaaaagcagtaaatcggatacatggtgtagcagctttctaaagagaggagaccagttttttcacggtttagcaaaaaccggccctaacctcttcaaacgaatactcaacaataacgtcttcctcatccattctcttctccacagcaggagtgaacggcgttgttgcctctgtcatagcgactgaagctgcaggagttgttggaacagctcttttcttttcttcgttggttttaggtgtcaagattctctcctttgttgtgtaagcatccttgtgatgatcttctggggaattcaagatattggaagtgacaggtgaaagaggcttcctaagcattggagatctcgcagcttttcctgcaaccggaacgttctttgatctgatacgaccaggaagctctgagtttctcctccctacacatattgacataattctcttaacacaaatctctctcttggtctctgttaagtgtaaaccaaaatcttgtgttattattatgtacctgaaagagttggaagagctgaatctcttctactagtagcgttctggtcatagtacttcgtccttttgctattgagtgttgccttctcatgctttaagctttgatgaagcatggcaccaccaagggagagttttctgttcatggcagcatttactggtgttctcagtggtttctttccgcttttatttgggcttggtttagacccataaagagcttcttgctctgttatgagttgtccatgaagtttcttcatatcctgagatgaaagtaacaatgtcaaattgccaatgatgcttttggctcatagtgaccttggttcctagtaaaaaacagttttccttactctctgtctctgtttttcatgctctttctcttcccatacagtcttgtactgaccaagcatcgataagactcggacctgaaatatttacgtgcttttgtgtaaagatgctgatttgataattgtgtagaacagatcattgatcagtaaaaaaccacttaccccatcatataagaattcatttcctctttcattctcccaagcagtgactttggcggtcaaagcttccaccatccctgcatcaatagcagcagaaagcaatagacaaaaaagatcataagttatgagtttgtaggtttttgtaatataatctaaagagcaagaatgttaccaggaagtttattgacaagtaaacgggctttttctgcacgcttcaatgtaagatgagctcctcttccagcgttgtaccggttatcatcctgcgaagccaacgatgtgagaacaaaacaaaaaaaagattgaggcaaaggaatagatttagatttaaatgtctaacccgattgtactcttccagccaagactcttcttcacaagctgacatccatttctccactttttcaagaatctccttcctgcttgaagcttcctctttgacctttgcaatctcggaatcaatttgctctaacaactgctcaggatccttgacacctaaaagatgagtggaaacatgttattattagcatgttcatgttatctaccagtataatgagcataacatttctggagtttgtgcacatcatattatgtaaagaataagctgttcctaataatggtttaccagattctatagcttcaactgaaaagttttctgatttaagaacttcggtggccatgtgcatcttccttgatatttcctcaagctcaagcctcttcctcagtatcacctctttgatcttagttattttgatcttgctaagcctaatgacttcatcctcaacctgtaaaacaaactcacattataaaaaagattgttcctatactattataaacggatagactaaacaatacagggagaaaacacagaaaggtttggtcctgtgcactcacgcgtttaatggaagcaacagaaagtatgttggcctcagttatttcagactcagtcaaagcgatgctacatgtgacattgtgaaatatcttttgctcttccgcaggcgtgtccagcagattccagagctccaacaaggacactgcaagatcttgaacctagaaaaacaaagtgatgagagtcagaaaccataatcacgcagaaaaacttgcactacattacaaagaagagctcagacttgtaaccttctgcattcgctgtaacttggcctctcgtaaattcacaatcatcatatccaacttatcaagagtacttctgctcacatccctagtgttggaatcaaccagagatgaatgtatccctcttatcatgcctttgaaatcttcaccaagaaccgagcacaacgagttaagcgttttcagcaaacactctacctcttccaatcttttgctctacattttgaaaagaattcaaagttaacataaggaaaacaggtgcacatgctcttgtaatataagtcccatatcatgagatctaacagcaaaaccaaccttttcattttggagctcacccaactggctacgcaattcctccaacctctgaagcgaaagatcggtctcttcagcagcaaacttcttcagataatctgttggatttccaagttgcagtgacaacttcagtaactgatcgataacttcattaaaccgaatcattctctcagctttccttttgcgcagtccatccaattgcacattaacattctcaagctcctctttcaagttttctcctaacctgctgttagactgtaagaagaaaatgcaccattacttgccataactccagcagacaaaaaccaaatatatcaaaactgaagtcttgaatacacttacatgaatctcttgtccacccatagaagagccaatagctgcaatttctgctctgccaacagcgatttctttcagcaaattcgctttaccccgactagcctcctcgacctttcgcttataaaccgagagacactccttctcgatatcagccaaagaagcatctttttcatcctcagtctctcccatttcattccatatttcctgatatcatcaaaattggtaaattcccaattttgaacataaacaaagaaaacgaggatgtgaatcttcttcaagaaaagacctgcaattggcgaagtaacaatccacatgtagtctcgattctcgaaaactgctctgttgaattccgtatcatggtgattaaaacctatagacaaaaattcccaattatcaacatcacagctgaattgtttcgtgactccgattctcgattacacaaataccaaattattcggaaacagatacagaattttctctgttttctccgcagagttaaattacaaaatcgcgatgactcatgaaaagttcaagaagatttttaacatctacaagagaaaagagcgagaaattagaaactacctggtttgaggatcagcgccaagaagaagatgttgtgaagaattgatcaaagagagagagagagcaaaattagggtttataagtgttgtgagtataacggatgtgaaattgaaatttgaacaaggagcgggaggagggtccgttacgatccgagtctcacgatttattttgacgtggaatcatctgagccgttgtattaaattcctctttccgttttttgcttttctcctttttatttgacggaccagatttagtaagcaataaagccttgaatttcgaaatggatttttttgaaatataattggctccataatgatatcttaaataaaataaaaatgtaggccagttaaacaactaaaatatattttcaaaaagcacataaattatcaaaatcttttcatagtaaaaaaaaaaaaaaaatggataatgactgcattgacatctctattactttgacattgatatactctttgactttgaactgatccatgcatatgataagagaatgtaaagaataaacgcaaaataactatttttgcaactatagaatgagactctaatattttgtttagaacttttatttcgtcaacaaaatgttacagtaactacattgcttttaaagttaaaacatgcgttatctgtaatcataaaagtatgatacatcgttcaaataaacttaaattttgtgtaaaaagttttaaaaacctttcaaacattatgtaaaaaacagaagtggacatagtatatagtctatagttcaatcacaaaactaatataaatttaacattggttttggtcgtctatagtctatacatatggacaatggtcatattggttaacgtaagtaaaatcattagtaatcaccacatctattgtaatcgtacaaaccaaattgttaatgatgattggggaagtggataaaggacgacgaaccaaaggcttgtctgaatttcttctggaaagagaaattaaaacaaaactaaaatatgtggagagagacaaataaaataatacccctgggacttatcagtattgtcagagcaaagcctgagcttcttaataattgaaaataaaattaattaaaacaaaacacataaaaatttctgaaaaatctctctctctctctcttcatcgtcgccgtcgtcttctccgtctcctcctctctgtctcgctgctacttcttcttcatcttcctgatgaatactcacaaaaccgaagaaggtctgttccaccatcatgatcttgatccgacggctgacatactcgttcaatcaccaccctccattctccaccaccaccacgaccacaattccgaagtcgatcccgcgttttctctcccggaattcatactcttccgctcttctccttccggagattctcccggtctctcctcagacgagcaagacgattcccttaccggaaacccccaaattgctgattcgtcaaattctagggtttcgagtgcaggaagagatgggcttttcatcagccccgatcctcatatctcatctcagttctacacattcaacgcagcttctcactctctcatgtgtcgctgtctccgcgagggccgtctcgctactccggcggagatccgtatcgctacaccgaggtctgtcctcaagtcatggcgcgccgtttggaaggatcgtaacgaggaaacggcttacctcaccgcctggaaacggatccaggataagctcacctctcgcctcgacccagccaccggtaacgaatttctctgcttcaagaataattctcagcaattcgtctctcacattaaccagtggcaagatatagtcatggggtttcacgctgatggtgatttgaaacacttaggccagaaagagactattgataggattaagcaagtttggactgttggtgctaagctctatggaattcccgagagctttattagggtttgtgtagcggcgtgtcctgtttgcaatgccgactctggttctgcttcgaggaacaaacgccgtcgatttgagtatacggagtctcttgatgtgcctgccaaggaagttcccgataggttgcagcaactggctgctaagcacaaggttgtgctctgtataaggcagaagtatattaggtataagccgtttatggcagaggtgaaggattatgcttgtcacagagctggagagcctgtatcaattaagaagtctaggattttgaagagggagccttatcagtcaaagagatgcggttgtggttttaggattagagctattgttcccattgctaactacagtgaaaagaccaaaacttttgtatatcaggaagaagggacagctgtttttaagctatacgctgtccattcagggcatgagccgggggctatggatggaaatgcgagaatcatgcatcgggttgttggtcataagggttttttgatggatcaagagactgtctacggagtgcgggacgaagacgtggaaaccgaagggatgggattgactgggaaggatgaacgtgccgagatgcagtttactgtcttgcatcaggtgcaggaactaaggagcgaacttggcactctagaaggaaagattgggaatttttcacaagagatgttgggttcagtgtccacagagttgtttgagatgctcaacaagatcagaaatatcggcgttgagagtgcccaggatacaacgggcttggttgcagagaaatcacactcagatgaaatacttgttggagataacgatctagtacattggagtgaccatcaccacgagcatttatatggagatgggaaggatgcagaacttattgaagacgatgaggacagttttgagaggagccttgatgatgttgttccttgggaacagataacgccaccgtcagattgtacaaatcaaaaggaggatcttttgtctgagacatgtaagcctgagaaatggttaaagtgcaatgactttgatgagaatagcattctgaatagcgaagattctaaattaacaaaaccgatgagccacgatggaggtagtatagaaacagatgtaggtttagctggtatacaagtcgatagcttctatcaagaaaactcgaaatggtatgactctccttgtggtttggattcaaacacggacggtgaagacactggattcagcagacatggggagattttgtagaaacatggtaaggttcttcgatataaccaatttctaactttctatctcacacatctcgttatgcatacccttccccaactcataaatgggaaccagattgtatattttatgtgttctattacaaggtttcagggattttttttgtttggctgtgtttcttgtaggtgttgtttccttcttgtgttatgtaaattcaaactcagattgtttctatgcatatatctaagatcggaaagctttcaaggtgtctcactttttgattattgccaagtgatcatctcttggtttttaagactccattagcaaatttgtccaaatatttctaatttttaatcaagactcaataaactttatgaatttttgaattgtaaatatacaaatacgtatgatcttggaaataaaagtaactccagaccgggaacaggctacgaatttcccggcgatcaacagctcagaaacgtagtgatgtgaaatgtcgcaattggtgtttgaatttccttcaattacacaaagttgctgtggaagtccagtgtcaactgaagggtatttcggtcatataatagtgaattttcatttcgatggcagaaaaatcaaactgcgacgacgcgatctgaagtatcgtctcatctacctctttgctctgtaccctgcaatttccttttgcagcggcttgagtcagactcgttgacccaactcggatcggactcagagctccgaggcaattcacgggaagagactgtttcgttcccgttggtctatttgttctagatctgtgagtcgctgagctcgccgtgaaaattgggaatggcttcctcggaagctgattcccgattgagtcgagtcgtaacaccagctttagagaagatcgtcaagaacgcgtcgtggcgtaaacactcgaagctagctaacgaatgcaaagctgttatcgagcggctaaattcgctgcagaaatcaccacctccttcgtcctctgctgctactgactccgagtctgaatcctctgttcccggtccacttaacgacggtggttcgatcgagtactcgctcgccgattcggaactcatcttcagccctctgatcaatgcctgtggcactggcctcgccaagatcatcgaacctgctattgactgcattcagaaacttatcgcgcatggttacattcgtggtgaatcggacccgtccggtggagcggagtcccttctcctttttaaattgatcgattccgtttgtaaatgccatgatttgggagatgaatccattgaattacctgtgttaaagactctgttatctgccattaactccatctcgctgaggatccatggcaaatgcttgctcctagttgttcgtacttgctacgacatttacttgggaagcaaaaacgtggtgaatcagacgactgccaaggcttcgctgatccagattctggtgattgttttccggagaatggaggcggattcgtcaacggttccaattcagccgattgtagtggctgagctcatggagccactcgaaaaatcagatgcggatgggacaatgacgcagtttgttcagggtttcatcaccaaaatcatgcaagatattgacggagtgttgaacccgacaatgtcaggatcaggatcaggatcagggtcaggaggccaagatggggcatatgggactaccacagtggagactacgaatcctacggatttgttggactccactgataaggacatgttggacgctaagtactgggagatcagtatgtacaagtcagctctagagggaaggaagggggagctaactgacggagacgctgagagagatgatgatttagaagttcagatagagaataagctgcggagagatgcctgcctggttttcagggcgctttgtaagctctccatgaaggcgccgccaaaggagtcttcggcagatccgcagtcgatgagagggaagattctggctcttgagctgttaaagatcttgttggaaaatgctggagctgtctttagaacaagcgagaagtatgttaaatacctctttagctcctttttctttttttgaatataagggtggatccaccgtatcaagaaaaattagattttgtattcttctgatgaatttccatctctgctgaacaggttttcagctgatatcaaacagtttttgtgtttgtcgttgttgaagaacagtgcttctactcttatgattatcttccagctttcttgctctattttcatcagtctggttgcaagattccgggctggattaaaggccgaaattggagtgttttttccaatgattgttcttagagtcgtggagaatgtagctcaacctaattttcaacaaaagatgattgttcttcggtttcttgacaaactttgtttggattcacaaatcctagttgatatattcttgaactacgattgcgatgtcaattcatcaaatatctttgagaggtatgttatgtcccttgatgcttcgctgtttaaagtttaagtttcgttcaggtggaagttctttgcgtaatttatgtttcctctgtatgatcatgtttaggatggtcaatggtctccttaaaacggctcaaggggttcctcctggtacagctacaacattgatgccaccacaggaggcagctatgaaacttgaagccatgaaatgcttagtggccatattgaaatcaatgggagattggttgaacaagcagttgcgcctgccagtttctaattcattgaataaatctgacgtaattgagattgatttgggacccggaagtccccagttggcaaatggaaatgctgatgagtctgctgacggatcagatacttattctgaatcttcaggaggtacatctgatgctctagctatcgagcagcgccgggcttacaaactcgagcttcaggtaagaacttaaagatgtttgtgtattatgcagattattgtagaaagtgacattttataatttttctgtggtcgttaatgctattttaaatgtttgtcccaggaaggtatttctctttttaatcggaagccaactaaaggtattgagtttctcatcaatgcgggtaaggtgggtgaatctcctgaagaaatagcaggttttctcaaagacgcgtcagggttaaataaaactttgataggcgactatcttggagaaagagaagatttagctctcaaggtgatgcatgcatatgtggattcttttgatttccgaggcatggaatttgatgaggcaattagaacctttcttgaaggttttaggctgccaggagaagcacaaaagattgaccgaatcatggaaaagtttgctgaacgttactgcaagtgtaatcctaaggtgtttactagcgcagattcagcttatgttcttgcatattctgtgatcatgctcaatactgatgcccacaaccccatggtgaagaacaaggtttgcttcattcattgtctaggataatacagttattgtggaagttttaggtaaaatgttagtgacgttctttgtgcctttttttttttctcttggaacatatagatgtctgctgatgactttatcagaaacaatcgtggaatagacgacggaaaagatttacctgcggactacatgagatcgctgtatgaaaggataacaaagcatgagataaagatgaaagaagatgatttacgtttgcaacagaaacagtacgcaaactcaaacagaatgcttggtttggatggtatattaaacatagtgatccgtaagcagtggggagattcatatgcggaaacaagtgatgatctgatgaagcatatgcaagagcaatttaaggaaaaagctcgtaaatcagagtaagatcactctctcttacttgcatcatatgttgataacaaccatttctctgtagacttagtattcatttcaactcagaactactctcctgaactgtttcatctcttgggaaacttttagctgatgcagtatttgaattgactcgttttcaggtcaacctactatgctgctacagatgtggttattctcagatttatgattgaggcttgttgggctcctatgcttgctgcattcagtgtgccgctagaccagagtgatgatttgatagtgatcaacatatgtcttgaaggcttccaccatgcaatccatgccacttcgttgatgtcaatgaagacccatagagatgcttttgtgacttcactagcgaagttcacttcacttcactccccagctgatatcaagcagagaaatattgaagccattaaggttggtattctacttcattaaggtttacgtgattgttgtttgtaatagttcgctgtaccaaaaaaacatgatatgtatcttgagtatactttccccatctgacctcgttctcagtccattccttgtcactttttatctcgatgttatttccttcctgatctaactgtcgccttttcccctctaaaattgtctggatcccaaattaatattggttgttctccaggcgattctcagacttgctgatgaagagggcaactatttgcaagatgcctgggagcatatactaacttgtgtttcccgttttgagcaactacatctcttgggagaaggtgctcctccagatgccactttttttgcttccaagcaaaatgagtcagagaaatcaaagcaacccaaacagtatatacttcctgttctgaaaaggaagggtcctgggaaaagtcaatatgcagctacaggtgtcttgaggggttcatatgacagcatgagtcttggcggaaaaggttctaagaacgtgagacaagaacagatgagcagtatagtctcaaatttgaacttgttggagcaggttggtgaaatgaatcaagtattttctcagagtcagaaattaaacagtgaagctataatagactttgttaaagctctctgcaaagtttctatggatgagttgcggtctccttctaatccacgcgtttttagcctcacaaagattgttgagatagcgtaagaatctcctagtttcgttcctctctgttctctcatatactgcatataagagacgttctctgttcttagcaactttaagtatgtagtctgacaattttctgtttgtcatttgtgacaggcattataacatgaatcgcataaggcttgtttggtcaagcatctggcaagtgctatcaggtttctttgtgaccattggatgctcagagaatctttctattgcaatatttgcaatggattctctccgccagttgtcaatgaaatttctggaacgggaggagttggctaattacaacttccaaaatgaatttatgacaccttttgtcattgttatgcgtagaagtaatgatgttgagatcagagaacttatcatccgatgtgtttctcagatggtattgtcacgtgtaaataatgttaagtcaggatggaaaagcatgtttatggtaggcatttattgtaattttctggtaaccacattaatttaagaattttttggtttactcacaatgtgttttcttccgttgcaggtttttaccacagcggcatatgacgaccacaaaaatattgtgtttttgtcctttgaaattatcgagaagattattcgagaatatttcccatacatcactgagacagaaaccaccacttttacagattgtgtgaattgcctagttgcattcaccaataacagatttagcaaggatatcagtctcagttctatagctttcctccggtattgtgcaacaaagcttgcagaaggagatcttaactcgccatcaacaaacaaatacaagggaacttctggaaagattcctcagtcatctctccacagtggaaaaagtgggaaacaagagaacggagagattgtaaacaacaatcatctttatttttggtttcccttactatcaggtataacactataatttatcgagaagattactttaagttgaagattctattcatgtgtttcaccttcctctgtctaatgtgcaggtttatcagagcttagtttcgatccaagaccagaaatcaggaaaagcgcactacagattatgtttgataccttacgcaaccatggccatttattttctctgccgttatgggaaaaagtattcgagtctgtattatttcctatattcgactacgtacgccattctattgatccttctggcgaagacgaatctgctgatcaaggaagttctggtggtgaagtggatgagctagatcatgacgcctggctctacgagacctgtacattagcactacagcttgtagtggatctctttgtcaaattttacactacagtcaatccacttctagagaaagtactaatgcttcttgtaagcttcataaagagacctcaccagagccttgcaggaattggtattgctgcgtttgttcgtctgatgagcgatgctgatggcttgttctctgaagaaaagtggttagaggtggtgtcagctttaaaagaagcggcgaaaacaacttgcccagatttttcgtatttccttagcgaagaatatgtagcaagaagccagagaagtgctctcaacattcagaacagtaatgctgagtctgctgctccaactgctaccgatggcaatgaagagagtcagagaacagcaacccatctttacgctgctatctctgatgctaagtgccgagccgctgttcaacttttgttgatccaggttagttcctctcaagccttacatttatgtattataataatgtgtgttccttcaaatgaaccgacaacttttattttctttaatcaaatgttcttttgtaaattgataactcaaaaggcaaacgcaaacagaaggaggaacttgggagtcttttccgtttacaatttaccaaaaaaaaaaagtaaatgcaatttgtgttgttgctgttattgtagtaatgtttctatttttttcaggctgtgatggagatttacaacatgtacagacctcagctttcagcgaaaaacacattagtcctcgtagatgcattgcacggtgtagctttacatgctcacggaataaacagtaacacaatacttcgttcaagactacaagagctaggacccatgacacagatgcaagatcctccactacttcgtcttgaaaacgagtcttaccaaatctgcctgacattcttacagaatcttgttgcagacaaaaccaaaaaagaagaagaagaagaagaagaggaaatagaatcacttctagtcaacatctgtcaagaagttctcaacttctacatcgagacttcttcttctgcgaaaaaattacaatcagaatcatcacgggccagcgaataccgatggagaatacctttgggatcaggaaaacgaagagaactatcagcaagagctcctcttatagttgcaacacttcaagcaatgtgtacattggatgaggcatcatttgagaagaacctgaaatgtctatttccacttctggctaacttgattagctgcgaacacggctctaacgaggttcagactgctcttgctgacatgcttggcctatcggttggcccggttttactccaatggtgctgatttttttctctcttttcttattggctttcatctttgactttggcttgtcatgttaatacttgcctttatagagttctctcttaattcatagcggttcaatataacaagcgtttaatggacctgatgggcttaaggtcgcgtaggcccatatatttgcaagctgttctcgaggcactttccgtggtctccaatgatacgacgcgtatttgtccttctgcggagtgatttttcatttttcaaaatttcttctaattggttaaatactttttttttttttgggtaaaaattggtttaaatactgaaatccgtggaacaagtgtatagtatgggatatgtgaacgttgcatgatataatcgcccaaatctcaaaggcgaggtttgaaccctatttcgagacaattagtcaagtgagtgagtgctttgacgtgagtaagtactatatatagtaagtattacatgatgttgcattgtattagagccacatgcgcccatcatcactaattggctctctaacaaatgaactggtcgggtaagtgggtaggagtgaacataacttgaagggatcacgccgtggttcattggacgcaaacttctcttcttcctaatcctaatcggtcaaccacattcgcacacaatccaaatccactcacttttgtcgtccggagtgtaattgagggcgttgctaaaaagacaagtgctagaatcacctggttatatataaattcaaacttcaacaaatgaaaagaaattataagaaaaaaacttcacgcgtgcgtcagaaggaattgcacgtgtgactgacacctagcatttgctgtctccaaccccatcctcttcttttctttgtcttccataaggtttttggtattaatacttaacctacttagggattagcatttcaattatacatacacgaatatatataggtctggttctgacataatttacaaagataaagactaagatcgacaaatcaatgaatatagacagaaagagaagtcttattttcttctactaattaaaatagccaaaagggactaatgtagtaatgtagtagaatggtaaactatgagtagttctatatcccacaagacacggtctgactcgttgtgttttgtaatctgacttcattagtgttgtttgggtcccaatccaattccccatgtccggcacatgctcgtctttctcggtttcacgcccattcaaatctttcccttttcataaatttcaccatcacggttaacggtaattcgttggtgtatcttttcaaaaagcgcctcatctttacttttgtttgtttgttagattgcttcatatttttcattttcttattcaactctttgtttttccttgaacatcacacttcaaaagaccaaaactagtggaacccatataccgcaccatgggggcacgctcttgtgttattgccataacagaacccatcatccttctgatttgtttaccttaagccacaacttaaaccctaaacctccatatttcaaacccttttctctcctacatgtatcactgcttcacttccacttttcatcaacctcacgttcccaagccctaactatatgtatatataaataactctatatttgattcattaatttagggacaccaaatctattcaacctaaaagccttcttttcccctatattgaccaactttttagcgaatcagaagaggaatggatgaggtatctcgttctcatacaccgcaatttctatcaagtgatcatcagcactatcaccatcaaaacgctggacgacaaaaacgcggcagagaagaagaaggagttgaacccaacaatataggggaagacctagccacctttccttccggagaagagaatatcaagaagagaaggccacgtggcagacctgctggttccaagaacaaacccaaagcaccaatcatagtcactcgcgactccgcgaacgccttcagatgtcacgtcatggagataaccaacgcctgcgatgtaatggaaagcctagccgtcttcgctagacgccgtcagcgtggcgtttgcgtcttgaccggaaacggggccgttacaaacgtcaccgttagacaacctggcggaggcgtcgtcagtttacacggacggtttgagattctttctctctcgggttcgtttcttcctccaccggcaccaccagctgcgtctggtttaaaggtttacttagccggtggtcaaggtcaagtgatcggaggcagtgtggtgggaccgcttacggcatcaagtccggtggtcgttatggcagcttcatttggaaacgcatcttacgagaggctgccactagaggaggaggaggaaactgaaagagaaatagatggaaacgcggctagggcgattggaacgcaaacgcagaaacagttaatgcaagatgcgacatcgtttattgggtcgccgtcgaatttaattaactctgtttcgttgccaggtgaagcttattggggaacgcaacgaccgtctttctaagataatatcattgataatataagtttcgtcttcttattctttttcactttttacctttttcactttcttaggttttgttttaacgtttgattaatacctgaaggtttttggaaaattttcgatcggataaaaggatttatgttgcgagccgaaacgcaacggtctgatctcggattgatctttatatatataggggctagtgttgtgatcttccttgagttgatgtttataatgtagtagttgatattgaatgaaatcttcatgttttttgataaatgattatagcttgatcaagatttagaagttagcatagaaaaatgcatgagaagactggttaaaattttcgtgcacaagtagctaaagagaataatcttgcttccttgtttaatggcaagacttgggaacaagatgattacattggcatacacttttctagacttttttctaggttatagacacaagtcaatactttgtattctagttacatttataaaactaaaatttcgattgtaaactatagaacaaaaaattatgaaaatcaataattgtaccctggttaacttataactaagagcatccccaacgatatatcttagcctaatcttagcaaacatcttagcattagattaagaagtagttcgttcttaaccattggagatgctctaagaacttaaaaaaattctcctaaacaaaaatatgaatcgaaatcctatcagaaaaagtctagcccggaaatctctggacgtgtgggccgaatctaaaccctcttaaagcccaatttgattaggatcaagagaaaggggaagccctaaagattggcgtcctgcgttcatcatcaccttctctcccgccgctttctttcatctttacaaaaccgattacttttgtcggaatctgacgtcagcatacctgctaccacttccagagttcaatcgatcttcgcctcgttgaaacgttttccctcttcgattatcaacagtgtctccactcgtatcatcaccgcctccaactaattttgccatctctctcgttgttccaatttgattctactagtgagctccgatttaatttagggttttgaaagatgtcagctttgaaaaattacggcttgatctccattgattctgccctccattttcctcgatcaaatcaattgcagagctataagaggttactctctctctctctctctctctctatgcctaatcttattgggattatagttactggtattggatttggtttcgacagctctctagtgtaattgaaatttttgtatcacaggtagaacaatgaatatattgctttggttactaaagcaataactttttctcttgaagaatcggatttgtagttgtgtttatatctgttgatcgattggctagattaatgcttagacattgccttatgatctctgagtgattgatttatttgctcatcaaaccagaaggaatgcaaaatgggtctctccaatagcagctgttgtacctaacttccatcttcctatgcgcagtctcgaggataaaaacaggtgcatcttctattccttctcatgtttactattgtttttgttcatacttcagcagctttctcttgtatttttgtgttggcaggacaaacacagacgacataaggtcccttagagtgatcacagccattaagacaccgtatttacctgatggaagattcgacctccaagcatacgatgacttagtcaacacgcagatagaaaacggtgctgaaggtgtgattgttggtggtacaactggtgaaggccaattgatgagctgggatgagcacataatgcttatcggccatactgtaaattgttttgggggaaggatcaaagtcattggaaacactggaagtaactcgactagggaagctattcatgccactgagcaaggattcgccatgggaatgcacggggcactgcacattaacccttactatggaaaaacatccattgaaggcatgaatgcgcattttcaaaccgttcttcatatgggaccgactattatatacaacgtgccaggtcgaacgtgccaggatatacctccccaggttatctttaaactctctcagaaccctaatatggctggggttaaggaatgcgttggtaataaccgagttgaagagtatactgagaagggaattgtcgtttggagtggaaatgatgatcagtgccatgattctagatgggatcacggtgccactggagtgatatcggttactagcaatttagttccgggtttgatgaggaagttgatgtttgaaggtagaaactcagcgttgaacgcaaagcttcttcctttaatggattggctattccaagaaccgaatcccattggtgtaaacactgctttggctcagttaggagttgcgaggccggtttttcggttaccttatgtgccattgcctctgtccaaaaggattgagttcgttaaactggtgaaggaaatcggaagggagcattttgtaggagacagagatgttcaggtacttgatgatgatgacttcatcttaatcggtcgatattagagtctcttccctgaagattggttgtgtttatactttcttcgttcagttgttagttatttagctgatgagaaactcacagatggatcaagacttctacttgttgtaatgtttggtctgttacttttggtgatgaatctaatggcttttgcttactctatctctctctccctctcctctctggatgattgtgttttgtctttgcgtgtttgctctgttgtataaaacgacatgatggttgtctgaggtttgggtcgtcggaaacatctctatcacggatcggcatattaagcaacgaaattttttagttgaaagtgatcatggatatgtatgttaatacttggtacatgaaaaagaataatcaaagctttcatagaagagtaaatcacccataaatcattagtttgattttattttagtaccattaaaggttggaaaaggaaagaagaagacgagaagaatcaataaacaaagttcacgaagatcactgaagcaaggaggttgaaacaggggagtattttgggtgaagcagagcaaacagagcattgttttcatggtggagaagaagagctttcttttttaaagcttcattctctcgtatgatgctttgattctctacgaaaagcttcaagttcctcatctccatctccttctgttccttcagtaatcttctcctcctgcttacaatgaaaaagaaagtactgttttatataattcagaaacaaaaatagagtcaatgtctgaggacgcttgatatatgcggaagatgaaattgaacctggtgagattaaggatacgaagatgggtttgtgtcttagatttatgtttgatatggtacgaagcagatctcatagttggtgtgtcagtgtctgggaatggtggctctgaagttgtcagacacatcttcttgtggttttatcacacaaaacgaactgagtaaacacaatggaagagtaagctttatatagacgatctataaagctgtagttgtttcttttgagatagagagtgatgaagaaagacaaggcttttgaaggtaatgatggcaaaaggaaactcatgattatagaggggccagagatatgcatgagttcaggacgaagatgatgaagaagaagaccaaaacagactcttctctttctcagactctctgtttcttgttcttgattgaatagttactgtactaatagtgcaaacttagtagaaaacacttgagaggtacatacgtaaatcgaccataccaaatcattcaatttcatactaattgattactttagttgtaatcaactacagagaaagatcacatgaaatttggaccaactatgcatgtactacaatttgattttaaaaagttaatccataagcaccttttattttcaaaagaggctcaaaagaaaactcctttaccttaataccaaacccatttcaaaggtcgaagtcttggattcgcggtttggcatctcgtgttcaaaccaggtttccctcataattggggtctaattttaaggaaaaaaccttggttccaaagagacatatatcttgttcctatgtaaaatgaaatctaagcatgtgatatgaatagtaaaaaataaatataattgatctaaggactaggaccactataaaactcttactcatttcttgtgttgatatttttttttgagatgcaaccaaatttgaaagacaaacaagaaaagaaataaagaagggggaagaaaacttatactaataaagactaaattgcaaattgtaggagctagtcaacatccggaattattatcatgcttcaaaatgatcaaagctgttatgattctctacctatattatttactatttttagactaggcattgtccaccacaaacaaaaagatgaaagttattcttcatctcatacaagctaaggcataaaaaacacagaagaaggaatcataaatagcaaacgatttcgtgggtaatttctggagttgctacaatgatgagttttgttttgatgcatacaagtggtccatatcaaaatcaccacgccccttcattactgcaagatggtaccatatgtgaatctctaactagagtagcactcccatgcataatgcgtctctatctatgatatgtaaatattcaaatctttaagcattatacttacattgtcaaccacaaaaacattatcagcaattcctagtttcacagattaggcatgaaatttgaagattaaaagagaatcacctaaaggaatctagtttttcagttgccaagcattagaaaaaagtggtgaggactccagaaattgtagttacgataagctatgttatcggggaaggagctagttgatgtgatcctttggatttaggctcagctagacgtttagataatagcttggcatcgagtggttcagacgcaacattatctttcgtcttcttccttttgaccaacattagacaccgtttgaaacaatgaaaaaggcggggtactttgaagtccaaacagtctaaaatgagtgtcgtcttaccaaactaaaaacgacaggctgtgttgataacgtgggctctcttgggctttgaatataagttaatgggcttatatgaaacctgtattttctattttgaaaagaaagttataaaggacggtgtggaccagaagacactcttcgttttctctccacgtgggatatcacaggttcaagttccaacggtccatttttttgggtgcaaaattccaatggtccattaatccacgcatttaatcttacgacgttgtttagcataattaattaatttgaaatttagaacaaataaaaacgcaagagaacacaaaccacaaaatggaaactagtcaattagaagatctcaatatttcgacactactacaaactaacacaccaaaacaaaacaataacaatcatccaattctaaattaactaataagattaaacgtaaaccgtaacactctaattcccagtttttaacaaacagcatcacaaagaaataaaaactcgtcgaaggaagacaatggcagtcttcgtaattaaggttttgtttataacaagagagatgtggcggcaatagtgaccaatgcggtgaacaacgcaggagcgttaacgtgaaacgccgcgtttttcgcattactgttctctgaacttgtcggcgagtctgacggagctccttccggtgaagattcatccaccggtggtgctggcggagaagctgcggttggagaaggtgcttccacaggagacggtgacttagccggggtcggtgtcggtgcactcactggctccggtgccggcgccggcgatgaagattttccgaaaagctcagcgggaaggagcacattatccacagtgaatataacaacaggtgtctcatcgaccaccgtgtcggcgagtctcgacggaccaacgccggtatggagaataacctcgtcaccggaagttgacgtcgttaaatcgtatttaccggcgccgttagtggctaaagtggagatagcgtctttgttagtctttaacgatcctttgggtttgtattcagcgagggcgtgatactctaggagcgagaccacctcagcttgtgtgagattcgtcagatctggtacacctctagctttaaaagcttcatcggacggtgcaaaaaccgtcaagcctttttcaacggtggattcgaatgttttaataacaccgctcgatacgagcaaattcgcgaaggttttgcaaccggctttctcgagaagtccggtgatgttgctaactccggcggaagaaggagcaggtgcggttaagattccgggagcgatgatcggagcgttgatttcgagaacggagatgttgtaagggatttgtttaacggatttggtgtaagaggaatcgagcttggagccaggagcggcggagccaaagccgactttgcctcctttgagatcggtgacgttaacgaatcctaggttcccgagagcgtgtccggtggtttggtaaagcgtggtggtgagagttgtgcctttagagagctgatggagttttaaaggatcgtagtagtcgaggaggacgaggaggctgagagcatttttgacgacggagagtgggtgttttccggcgagggaagacattgcgccattgttgagaacaaggacggtgattgtagtgcggctgttgatttcgtcggcgagttttgtttgagaaaggtagttgttgaatgaggaatattccggcgtatcagagaggatttgagtaatgttatggccggagacggtagaagctacggtgaggagagataatgtgaaagcgaagagagtgaaagctcgtgatgtcgccattggaatttggaaggttgagttgaactgtggagaagagaaagtgagaagacaaagagagtgatgaagttaataagaagaagaagaggttaaatgttaaccatggttatattgaagagttaactatggttaatttgagaacacgtgctgcttccttttgctaaaaagcctgtaatcacgaaaatgggtgggctttgagcttctttctttatggttcgtcctcttccaaaagcaaccgaaccgaaccgttatatcattatcaatttatcatccttgttagagttaaccatggtcaagtagctaactaaaatttgagcttatttatggatgctcattagataatcatccaaaattttgtaaaaggcactcagataaaaaggatttagatatttttacttgacaactagtaatatcgttagtacttagtagactcataaataagtgtcgttatcagttttaaatacttggtcaatagttggtaacatcttttagaaatggaaagaaggttctaattgcccgacacagcactgataaagaaattattattttttataaaaacgacaaatcaaaatacgtagtttactactgtcatgtaaaaatctgcaaaagttttatcatttgattagaaaaaaataaaataaaccttcacaaatcagtaaactattactccgtattaattaatgggcggagatgaggctttaattccttactttgagcccaattatgaggctaataacaatgtgtgagcacgtgtcactcttcagcttcacatgattatgtattgggcctgtaataagcccaaacttcgtaagctggtcaaaaacaacgacgaagagaaaaagctccgccgcagaatctgagatcggatctttagagagagagagaaagatgcagagggacgtgtcgagctgcaacacttacaactatggagacgctctctattgggacgctcgttacgtgcaagacgcgctttctttcgactggtaccaatgttactcttctctccgcccttttgtccgcagcttcgtctctacttcttcacgagtcctcatggttggctgtggcaactcccgtaattctctctccttttgccaatagatttgaagaagtctgtaccagtgattgaatttgacttgagcagcaaccaaatttaatacactgtgattgccctgttcttctctttggtgtagtgatgtcagaggatatggtgaaggatgggtatgaggacatcatgaatgttgatatctcttcagtggctattgagatgatgcaaaccaaatatgcatctgttcctcagctcaaatgtaacacttcttttcacatctctagtttatattactttagctttagaaatatgtaaagtaagaagctttatcctattatactctgtttttacccaacagatatgcaaatggatgttagagatatgagttactttgaagacgattcctttgacactattattgataaaggtatgttgtagcaaccaccaattactctgtttttatggtgaaaagcttagaagtgatatattgttacctgttgttgcggctgctggattgtgtaggaacccttgattcattgatggtacggaacctgatcttttgtttctcgtgttcatgtctacatgtgtttttaagttttcttgttttgtgtgatacggtgggttccagtgtggcagtgatgctcttctaagtgcttcgagaatgttgggtgaagttagcaggtcactaatatcatcatggctgctcctggatcatctcatatagatgccagtttttggattcttttttaatatatatattctcaataaaactcttctcttttttcatattgcaggctgattaaacctggagggacctactttttggtaacaaacatactttctcttgcattctatgtctgtaactgttcatagtcattgtcactggtactagaaggatatataagatattttgtgtttgttgtggtggtttggtagataacctacggtgatccgaaagtgagaatgcctcatttgactcgttctgcgtacaactggaagatctccttatacattatacgtaagcttccatgttttgcaacaaattttcttttgaaattgtattcttagcttcattccttccgtgttcttgcagcaagaccaggatttaaaaggccagaaagttgcagctcgtcagcaaagtcttgtatggaagctatacctataacaagtgagggaatgctgccacatgattatgttctggaggatcctgattcccattttatttacatatgcaagaagaaggatgaagatgaagaagctcaactaccctcatacccattaatggaggatgttttgtagtgatggcacgcagaggctcaaacaatgcaaaattgtgcatgtgtgtttgtctttttgatccccatttagaccagtcgatctattgttgtattttatgtgtcttgtgatcttatcccaattgataggtccgagtctcagaattgctctataaactcataatatacgaataaacatcaacctttattatctcagccttggacaacaatttaggctttgtagatgacttttgagctgcattatctttcgatgaagttagtgatcgttttgacgtcggggtcaatttagtgatctttgaagtgttcttagaagtcttgatagacgagttgctgttttcatagttagccgcctcggaagattcagtgtcaatctaaacaaaaataaaattcaaaattttaaaatacataagcacttgaaaattaaatgtaatggaacgttagagttattacctgatttgtagttgcatttgaaggggtagagacaatgttcatgtctgaatcaggttcagtctaaaaaagatatcaccaaaataattacttatccctaaatgaaatttgttgtctatctaatgcttattcagtagcaaacctcgctggtagttgggtttgaaaagcttgagaccatgtgagtgtttggatcagttgtgttctgtaaataaaaaaaatcacattaatgttgataccatgaaaaacgaatgtaactaaaacgccaaagacaaactgaatttaccatttgcaataaattttcctgaaacttttgaacaattccgggtttgtccgtaagttcataaaccctaaagatagatggtcgtataatatacgaaaatgaggaagcaaaataaatatggctaggctcttcacttgcaaagcaaaggacggcgattatggatactcgtttgaatgtttttgggaggaaccaagtcttaccaactccttcacattattcatatcttggagaactcctttccaagtggctgcaatgtctgaaaatatttggtctgcacgatcaaactttctaccttgcagttgaatcgaaagggttgtaaaaggttcgactctagctagataatgcaacacctacacacaagaaataacaaattattagaccatcattagtatttagtgaaaactctatcctcttgcaaatcaaaatactaattattgtctttctttggtgataggaggaacagagttttaaaacgaagaaaatgtaagagaagaaatgataaaaactatggcagatatcatagagaagataacttactgctccagcacttgagtaatgtgaaccataatgaaatttggggatgactggatcttcaaagctagagtgtttttcttgaaactttttcagccgctccgggttcagtgcaccaattggctgaacatatacggatccacattacaaccagttttataggtttatggataactataggcaagcataaagcgaaaaactactaataataaattactaataataccaccttggaaagatccctgtaattagatggatttgataggtccaaaatttctgatacatagtcgcataaaatccatgggaaaataggatactgcaaagatatgaaaaatagatcaagataaccaaagagaaaatgatatcaaagattataagaaaaaacattttaactagcacgagatttacctgagtgatgtcattataactacgcccagccaatgtgttgagctgcattaagtactcaaaattgctgatctgcagaaaagatgcaaagtatccagcgagagttactgccagatgttattcaagggaacaaaatgaaattgcatgatggagataaaggatattctctggttacctcccatctagcccaacgctccattaactgtgttcttctcgaaacttgttctggcttctaaaaaggaaacgttttatgtaagttttgcagcattgagaaaaatttactcagcttgattcctagctttgtccaccatgcactaaagaatgggcaaacggagggaaaaaaaaaaacctgagttgccgagtaaatatttttcaaatgaggaggccttgcttgaacaatagcccgacaagcatttcttcgtccctcggtgttctatagttttcatcaaacatcatatagtgagaggagctagaaacttgaaatttccaacgaaagagatcaaataatgtaatgtaacagagagagttttttagataccccaaaatcaaagaagaagtttgagcgatccaccataaatagttcaagagcactcttcttcagtagatatctgtgaaagaaaaatattaacaaagatataggtctccatctatttacatgataatgcggaggaaatagtgagctagagacaacattaatgatgaactttaccgtcggctataaatctgatgaagagaagacatcagccaacttcgatctctttcttcgtctcttgattttgaaccgtctgacttttcatccaaatgttggtcttctctgatgtcaacaataaaatttattctccgtgttgtgatctgagaaagacagaaaacaaacattacaaaatctggtcacttatgctctgttttatttcttggtcatcaatggaatactcatttgtgtcagctatttgttcaaaagataaataggtagtgttagtgagagcatacttgaaaggttcctttcacaacccctagtggtcggaccatagtagaggaaatttcaagaacaatcctttctttaagttcactgagatcttttacttctgtagaattttgaaccatattctgttcactcaaaggtcgatgatcgttgattccagttgacagtgttattgcatcctcaagtgagccagaccttctctcttcgttttcccctttgcgttctccaacattaccctctatttcaagatcatcggcatctccatgttcatcatcttcatacattatttcctttgatattgcttcaacagcaagaacaggtgagtcgtgattattcatcaagtatgtctgatccccatagtttcttgttgtctcaagatgaccagtgccagaataattcctccttaaacattgtctcatcctcgaagaactttccatagaatccagtttccagaaaacctgcatatgtgatgatgttacatcactggaaatgttctcaacatgttttaaatttaccccagaacaacgtagcttacgtgtttgggactgcataaatggtctccgaagggtccaaagaagcatctcatgtccaccaagtaacgaacgagtttgcgccaaccacggattcccatgcataagcgatttttcactattttatcattttgcatacgcctgtcaatctggtgagcggttgaatcaataaatgtgaatcaatatttgcagcagccttatctcttgctcgacctggtgtatcatcatttggagcctccaagggtttctggaagctt

SEQ ID NO: 1376 - DNA, 112584 bp, Arabidopsis thaliana
aagctttatcctattatactctgtttttacccaacagatatgcaaatggatgttagagatatgagttactttgaagacgattcctttgacactattattgataaaggtatgttgtagcaaccaccaattactctgtttttatggtgaaaagcttagaagtgatatattgttacctgttgttgcggctgctggattgtgtaggaacccttgattcattgatggtacggaacctgatcttttgtttctcgtgttcatgtctacatgtgtttttaagttttcttgttttgtgtgatacggtgggttccagtgtggcagtgatgctcttctaagtgcttcgagaatgttgggtgaagttagcaggtcactaatatcatcatggctgctcctggatcatctcatatagatgccagtttttggattcttttttaatatatatattctcaataaaactcttctcttttttcatattgcaggctgattaaacctggagggacctactttttggtaacaaacatactttctcttgcattctatgtctgtaactgttcatagtcattgtcactggtactagaaggatatataagatattttgtgtttgttgtggtggtttggtagataacctacggtgatccgaaagtgagaatgcctcatttgactcgttctgcgtacaactggaagatctccttatacattatacgtaagcttccatgttttgcaacaaattttcttttgaaattgtattcttagcttcattccttccgtgttcttgcagcaagaccaggatttaaaaggccagaaagttgcagctcgtcagcaaagtcttgtatggaagctatacctataacaagtgagggaatgctgccacatgattatgttctggaggatcctgattcccattttatttacatatgcaagaagaaggatgaagatgaagaagctcaactaccctcatacccattaatggaggatgttttgtagtgatggcacgcagaggctcaaacaatgcaaaattgtgcatgtgtgtttgtctttttgatccccatttagaccagtcgatctattgttgtattttatgtgtcttgtgatcttatcccaattgataggtccgagtctcagaattgctctataaactcataatatacgaataaacatcaacctttattatctcagccttggacaacaatttaggctttgtagatgacttttgagctgcattatctttcgatgaagttagtgatcgttttgacgtcggggtcaatttagtgatctttgaagtgttcttagaagtcttgatagacgagttgctgttttcatagttagccgcctcggaagattcagtgtcaatctaaacaaaaataaaattcaaaattttaaaatacataagcacttgaaaattaaatgtaatggaacgttagagttattacctgatttgtagttgcatttgaaggggtagagacaatgttcatgtctgaatcaggttcagtctaaaaaagatatcaccaaaataattacttatccctaaatgaaatttgttgtctatctaatgcttattcagtagcaaacctcgctggtagttgggtttgaaaagcttgagaccatgtgagtgtttggatcagttgtgttctgtaaataaaaaaaatcacattaatgttgataccatgaaaaacgaatgtaactaaaacgccaaagacaaactgaatttaccatttgcaataaattttcctgaaacttttgaacaattccgggtttgtccgtaagttcataaaccctaaagatagatggtcgtataatatacgaaaatgaggaagcaaaataaatatggctaggctcttcacttgcaaagcaaaggacggcgattatggatactcgtttgaatgtttttgggaggaaccaagtcttaccaactccttcacattattcatatcttggagaactcctttccaagtggctgcaatgtctgaaaatatttggtctgcacgatcaaactttctaccttgcagttgaatcgaaagggttgtaaaaggttcgactctagctagataatgcaacacctacacacaagaaataacaaattattagaccatcattagtatttagtgaaaactctatcctcttgcaaatcaaaatactaattattgtctttctttggtgataggaggaacagagttttaaaacgaagaaaatgtaagagaagaaatgataaaaactatggcagatatcatagagaagataacttactgctccagcacttgagtaatgtgaaccataatgaaatttggggatgactggatcttcaaagctagagtgtttttcttgaaactttttcagccgctccgggttcagtgcaccaattggctgaacatatacggatccacattacaaccagttttataggtttatggataactataggcaagcataaagcgaaaaactactaataataaattactaataataccaccttggaaagatccctgtaattagatggatttgataggtccaaaatttctgatacatagtcgcataaaatccatgggaaaataggatactgcaaagatatgaaaaatagatcaagataaccaaagagaaaatgatatcaaagattataagaaaaaacattttaactagcacgagatttacctgagtgatgtcattataactacgcccagccaatgtgttgagctgcattaagtactcaaaattgctgatctgcagaaaagatgcaaagtatccagcgagagttactgccagatgttattcaagggaacaaaatgaaattgcatgatggagataaaggatattctctggttacctcccatctagcccaacgctccattaactgtgttcttctcgaaacttgttctggcttctaaaaaggaaacgttttatgtaagttttgcagcattgagaaaaatttactcagcttgattcctagctttgtccaccatgcactaaagaatgggcaaacggagggaaaaaaaaaaacctgagttgccgagtaaatatttttcaaatgaggaggccttgcttgaacaatagcccgacaagcatttcttcgtccctcggtgttctatagttttcatcaaacatcatatagtgagaggagctagaaacttgaaatttccaacgaaagagatcaaataatgtaatgtaacagagagagttttttagataccccaaaatcaaagaagaagtttgagcgatccaccataaatagttcaagagcactcttcttcagtagatatctgtgaaagaaaaatattaacaaagatataggtctccatctatttacatgataatgcggaggaaatagtgagctagagacaacattaatgatgaactttaccgtcggctataaatctgatgaagagaagacatcagccaacttcgatctctttcttcgtctcttgattttgaaccgtctgacttttcatccaaatgttggtcttctctgatgtcaacaataaaatttattctccgtgttgtgatctgagaaagacagaaaacaaacattacaaaatctggtcacttatgctctgttttatttcttggtcatcaatggaatactcatttgtgtcagctatttgttcaaaagataaataggtagtgttagtgagagcatacttgaaaggttcctttcacaacccctagtggtcggaccatagtagaggaaatttcaagaacaatcctttctttaagttcactgagatcttttacttctgtagaattttgaaccatattctgttcactcaaaggtcgatgatcgttgattccagttgacagtgttattgcatcctcaagtgagccagaccttctctcttcgttttcccctttgcgttctccaacattaccctctatttcaagatcatcggcatctccatgttcatcatcttcatacattatttcctttgatattgcttcaacagcaagaacaggtgagtcgtgattattcatcaagtatgtctgatccccatagtttcttgttgtctcaagatgaccagtgccagaataattcctccttaaacattgtctcatcctcgaagaactttccatagaatccagtttccagaaaacctgcatatgtgatgatgttacatcactggaaatgttctcaacatgttttaaatttaccccagaacaacgtagcttacgtgtttgggactgcataaatggtctccgaagggtccaaagaagcatctcatgtccaccaagtaacgaacgagtttgcgccaaccacggattcccatgcataagcgatttttcactattttatcattttgcatacgcctgtcaatctggtgagcggttgaatcaataaatgtgaatcaatatttgcagcagccttatctcttgctcgacctggtgtatcatcatttggagcctccaagggtttctggaagcttgaaaaggtctgaagtttggtactcttacgctcaagtaatgaactgtctcgcctaagaggtggaggcgctggaggtgctggatgtgccggcgcttcccaaccagctgcccctgcagctatcattgccagtgccattgcagaaggaggcgatgcaaaagcagctgcccactccggagaaatcatagagagagccgcctagaataaaaagtaacagtttaataccttaggctaagggatgaagcagcactgtcagaagctataaatatatgtgatagaaactacagggtatgtgaacagatttgtggaacctcaatgggaagtgcatcagcagccaaagcacgagtatcaacgacaaggggattcacaccatcaccagtggaaagttcatgaataccagccaaaagaggcctccatcttcggagaattgcaacaaatggtggtaaaatagcctctagatactgcttacgtagtggtcttttatctttgctaacagcattccatacctgcaacagattttgaatcaaaaaatcgaaaaaccataaaataaaacaaagtgagcattattaagttcacaaagaagactaggggagcaatttccattatcgttctccaaaaactcaacatgaaaatgtgagaccagaccataattaattgaagtatggaaccttaattaggggagaactaacctcagaatatagaacacatgtagtaaccaataccctctgcctcttagaatcagagattggcatgtttagaacgggagagagcacactggagataaaaaaaaacagtcacattaaattctctatgagcaaacaaccatttagaaggcatgcaacgtcaagtcaggcgtccaaaagatgccaaatatgcccttgtattctaattttgtgacaaagtctagtctaaaaatgcttaaggcatgtggtcataatcttgagtgagcgacaacatactttggacaaaatcgtatcaatgcagatgggtttataattcgcaaagtcacatagggaagtaagaaaaaacatgttattactttacctccacaataaagctgatggtgactgtcgcatagacaactgagaactgatatctactgaggcagaatttcctaaggggcactggagtccaccagttataccatcttcagaacttaaatttttcatcaacagactatcttcaccatggtcttcttccctcaaagacaagagtaccattcgaagcatgcataagaaaggctgatcactatctagcaactggtagaggcctgacatccctcccatcccggtaccagatcctccaccaattcctaggccacctccaagtccagactcatctagcagcaaggcttgaagcatggatactgattttttaaccaaaggaagttcgatccagttaccctgagcatctttttgtagagcatgcttccaagagtcccaaccacttccaccaccaccaaaacaactagttttagaaggtagtccaacaccgtaccacaatcgacttctgtacttccaagcatcagccaaatccctggtacaacttccatatgaaacaaaagcgcaagaaacagattcatagggctcagctgcagcagcagcagcaagacgctccattacggctgtagatatctggccacttgcatcggccattgaagcaagtatctgaagaaaaagtaaaagcaggaaaatagcagaaagttaatcagatgatcagaactatctttcttaaatgatgttataaaaacaaaaaggaaaaaagccaataaataaggggagatattgatccggaagaaagaaattgagagtaatttccacttacatctaaatggacccctcctgaatcactggacactgaagcacagctactagaaacctctgatgattctccgaccgttggcaatgtgtgtgaacggtagttgggaggataaacaagtgaaagaggagatggagagacatcaactgcgcttgcagcacaattttgcttgctttgtagtcgcaaatgatcttcgacaagcatcaaaatcacaactgtattttccactagaaacactgaaagcagtgcagcattttctactcccgcttttgcatcttttggtgttagactctctgccgcgaaaccagcagatgctgcagctataacttgagtctgtttggggaaagtttaatgtgtaggttaaattatagcagtcgaccaacataacagaacaaggcttgaaagcttactgtctttaacaatattatagctaatatagagcaaataaaaaaagatctgacaatattttcttgtgagagtacgaccaatgtcaactatacaatgcatgtgtaagacgaacttcgtgtttctctagcaaggaattgtataactaaccatataagtcaaagataaaacaggagctatacctgagcttgcagttcactggcagcaaagtctagcaatccacctaaaagtcttcgtttgaaaattggcagtgattcctcacgcctttgaaaaaagtattaggaaaaaagtgtaaatataattgaacagaaacatgcttatctcaaaatacatggaagaagcactacagtgcaacaacaatatgatccaaaagataccttcacaaactaacaatgtgacaagaaaaacagatgacactcaaaatgttattggcatcccaaaaggcacgcgtaaaatgtggcgcagtagtgcatgaaaatacctaattcgtttctccccagtgctagacccaccaacaaaagtaagccactctgcacaatgaattgtagcctcaatatcctgtaaaaggaatcagatgtagcgaaaaatataaataaacacaaatgagcttggaaaaaacgtgaaagggaattaatctggtagaccgctgaaacaaacaaatttaccttccagccatccttctggcgcattgaatgttccaacattatgatcaagaagttatgaatcagatcctcctcttcagcagaaccgggtgaagcagattgtttccctgcatctttctgtgtgtacgcagaatagtcagcatttttaaagttttatggtacatgcttaagagacttgccagataaaaaatgtaactcgccttatcacactagtgtaaatatagccaacttggctcattactgatacaataatcatggaggcgaactttaaaatttttaacgtttgagttatacctcgtagttagagattaaaatctccaagatccactcaggccactcttccattttggtcagactactccttttttctggatgggtacaagccaaaaatagaatatcctgacgtagaaaaagtgagttcagaaggagacattgtagagaccggacaagtagaagtttgtagagcactttcacaagtgcatttggtgcacaaaagtgtctttaactatgacatttatacctgaagtgctcgattttgtagtgccttagatgcaaatggtagagaacgcaggaggattaacagaagttgaggatgttcaaatcgatgacctaaatcacaaaagttcaggccatcctcagttgatgaagcattaacctgcaagaaagatccttgacattaaaccaggtatacatataaatcttactaaaaaaaagttgcacctcagagactctctttttccaccaaattcttgacattaaaccagctacgcttaaagatagatcaaacaaatgaaagatatattaagacatgtcataccgaagccccaagcaaagttgtgtagacattgtcggtcatcaatctgtttggagctgcttgaaatgctttcagcagagcaaatagaagcaatgcgactttataatcaaacattgttccaccattttcacgaaactcactacccatgaggttactcattacatcagatttggcaccaacggaaaattttaagtgcccttttgaaatcaacgcaccaatcaatctgatgatcccaaccatgacacgatctctatcgtcaacattgtttcttgcattattattgaatggagtttcagaaacagaggatattctgtcagcattcacggaactggagagggtaactgagccagtctcacaaatgacagtttcggatccatgcacttttacttgttgaaatgactctgtttccttcaaagatcctacattatcatcatgagcatgagggtcaccctcattatcttgtggaactgaatccaactttaacaaaccaggcccattgtgttgactctgtttgctatgagaacaagaagtgtttctatcccaccagatgtgataaatgcctctgcaaatgtctgagcctttgcagcatttggctgtacaaccaacctaaacatgagatgcaatacccttgcaacctaaatagaggtaacaactgaatgatgtcagagaaaaaatattaaaagatctgagaaatgacacatgtttaacaattatgaaatatcactaagaaacgtgttacctgatttggttgtggactctcaattataaagccaagtaatcgatggaggtcatcagcagcaaacgaaggagatgctgctcccattagaagttcaataatcaccaaaagttcatcaaccaatgcattaacttcccccacttgacgtgcatccccatctagagaaaacgtgttcacggagtctttctcttgaattgtccagaaatatcttcgacatccatccagaagtacctgaatggcatcagcattcctcatagctgttgcttcggtgaaaaccatatcttgaagagatgacaacagcttcttttggagtctgtaactgcacacactccatatcttcagatccaacaatagtgtacagaagagctgcactttaagagcatgattgatcttttgagattggcaaagagaaacaatagcagcaactagctcctcatctcctactctatcgtgcttgatatcaaaggatgcaagtgaatgaagaaggtaaccgagaactgtggccagaatttcaggccccctagtacgagataactcttcattgttcccaggatgtttaatagcaaatgagatcattctaaaaataggtgcagccagagaatatgttgtcaaagaagatggaacatttctagaacatggctctagattatctttgtgcacactgcttacggttagaggaagcaaagacatgggtcctccataagctaaggcccagaaggactccagacttcattctcgttgcaacatggacttgtccaattacctcagctggtcgtctttgagtgccttaatcaagaaaaaataacgaacttccaaagtaagggaaaaccaaataacaaagtgcgaaaactacagcagaaaaagaatatggtgttttctcatctcctaagacacaagataaataaaaacaaagttcatatgaaaatggagaatagtgagaccgagtgaaagcgatatagatagcacaagaacagataaaagtatacaacaaactcaaccaaatgagcatctgaaaacaagtactaataaaacacatcatactagggaatatttttcagacttgtagagccttctcagatatattaaaaatcaagagtataatataagcacctgctgctccagaaagagaagcatctggacagaaccgcccacttagtagacatgggtggtaaagtaggtgaatgtatcctccaagctctgcatccgaaagactactttcctctgccacattacggacatggtcatttgtagctaaccatggaagacctgccccattgccaaaacaaggcaaaacatccccacctctagttgccaatcgtgtcattctttcaggaccaatcggttctttaaatatataaactggtcccatctcagcaaacaaagcacactgacgtcgacgacgttgtagaccagcagttgtagaaggaggatttgacccaatgcaacagaaagaaagcggtttggatatccgaggatagtcaaatggtcgagtttcatacaacgacccgtcaatatatagccgtaattcactatctgaattccctaaaagtccctgattgcaggtatgctcaaggccaataaagtaccaacactgaggcttaaatgcatgagtgaaatgaagtgaagttttacttcctttcccactgccactctcaaccaccaaaaattgtgcatagaaataagcttcaattccctgattatcaggggtcaaaaagctgaacagacgaggcatatgagcagtaccctcaccagtgtgtacattcgcaggcgctgcattagatatttttcctgattttgccgctgaagcagcagcaattgcagctgccgcggttgaagcatctaatgtgtcagcaaatgattcaatataaatccaagtcgcaaatgcatagccattggtaaaaggccagcgactttctcctggaccaagtaaacctgagctttcaccaacaaactcaaagctacacgcaggtcctcttgattcctttccattcattgccttctccaaggcatctatcaatggatttgaccacactgttggaagagactttttgataacatgaagccatctatacaaatcatcaacactaagagagtgcccggctaaatgttgaatacagtgaaaaaaaactgctgcattccacatcatagtggcgtccttggatattatctcctccactgatcgcaagagaacacataataaacccgccaccgaacacatagctctgtttcttgtgcaagaacgtaaaatcgctagtaatcctcgaaccatgcgggtccttggggacatgaaactgacactgtcaccagaacaaggtaggcaaggaataagctcgccagaaacaatggcagcacgagagtttaacatgacactaggagggttgctactaaggatcagctagcaaatccggttagctactcagtaggctgtatacattggtgcttgcctggtcttcaaaatcccgaggtgttttcgagcccgcctcgggttgattttccaagtcttatccccgaggcgttccgaggtcgggtcggggattactttatgagactgcccgaagcgttctcgatatcgcctcggtatgggctcttgacgagaactccgaggtgttttggtccggttcggaataattcatatatggctcccgaggcggtatggtcggctcgctatactgggtcaaatccgaccccaacagtttgccccccagctaaatgattcagtagaatgatgagcttcatgaatggatttcccgagccgactgttcaccttctagtttttgtcgcttcatcttctcggacggtcaaacttctgttgcgtgtcaccgactatttttgaggagtggaaacgtttttcgcttgttcccgaggatcatgcggatcttttttcttctgccgagcccacgcgcttgaacgcgttttggatgtttaatgcggacccgacgcgcctttgaaaatctctatataagcagcgagccactccttcaataacttcatttgaagttttcgaagaaaataaacgaggtttgcttccttctctctgatcttgatatttctattgctttttcttttccggtgaggtcccgttgttctttgttatttttgattttgccgggatagaaatagagttttccggttgttttccttctcgtctaacgtcccgagccgagaatgagttcttcgcaatcaccgtcgaccccgagcgcttctcttgtcgattctagcgattcaaaacatccagacgatctgcctcagatctataaacggagatcagtttggacgtcttctgaagatgctgtttcttcatcgaattcccccgagcagacgactcccttcacggttcgggaagacaccaatgccgatatcgctcgggaattggatttacccgacgatcccgagccgcatctcgttcggaggtcttctgctcctatggtcgatgaagctgggacatccaattggcaagatgcgtccgagcccctcatgccgacggttaagatcgaggactttctttacttcggcccgaatgagacagaggatatcttgcgtcttaacgagcagaaggctttcgagaaagctgagaagaagaagaggaaaaagaagaaaaaggcggtaatgccaaatcctcccggttcatcaatgtgtaccgagcaatctctctcggatcttaaggctcgatttggtcttggtgctgtaaccttgcgtgttccgagccctgaagagcgagccgacagtcctcctgcaggtttctatactctgtacgagggattcttctacggctgtctcttatggttgccgatcccgagattggtcctggaatatgtgacatcatatcagatcgctctttcccagatcacgatgcggtctttgagacatctgctcgggattttgattcgaagttacgagtctgaaacggagataacgctggctcatctgagaaattttctcgagatccggcgggtgccaaaatccgaagtggaccggtactacatttcccccgctaagggaaagaagattatcgatgggttcccgagcaaagacgagccatataccgatcacttcttctttgtagccattgaagatgctattcatgaagatctcctcgggactgttctgacgagatggggaattttgggtagttgtagttagaaatttattagtacccgaggtgatgttaatttcgttctctaattgcaattttccttttgcagaacgcactctcaagtttctcgagccgattccagacgattttctttcggcttttcacgcgttgtcggctcgaaagtgcgattggctgaagcatttttctcgggaacgagttgagtgtgcgcttcgtcttcttcacggcgtttcttgtcccactagttcggaatcttccgatcatcgcactcaatttttcgtggacatgcaatcgacgaaacttactttgcgggaggtctatgccaagaagaaagaggacaaggagaggcgattggcggaagagaggcgccttgttaatacgggattgatctcaccgcgggccgatcctgaggcgacccaagatgggaatgttattcccgatgctaccgcgccgcagactgctcccgaggcatctcgagatggggtcaatccctatactgccgggccggttgacgcggcgcccgctgaggctcagggagccgagccatccgctgctgcgcccgaggcggttttggcgttacctgcgattgacaaagcggcaggtaagcgcattcgggttgacgatgtgtcgtcaaagaagaagaagaagaaaaagaaggcatccggctccgaggtggagaaaatactccccatctttgaagatcgtactgcctcggctaatctgctcgggggatgtgttggtcccttgcttcctcctccagatactcttctggaatctcggaagtatgccgagacggcatctcactttctgcgggtatgaattctgttgcttataacctatcttggtgttatcattataaagctaacttttctcttttccaggctgtcgcttcgatgaaccggatggtacattcgtatgattcggctatgcgaagcaacatggaggtggctggtaaattggccgaggcggagtctcggattcaggccatcgagcgagagaagaacgaggcactctccgaagctgctgcagcgaaactggaaaaggaagaggtcgagaggacggctcatgtgaataaagagaacgccattaagatggccgagcagaatctcaaggcgaactctgagatcgtccgtcttaagcggatgttatccgaggcgaggggacttcgtgacagcgaggtggctcgggccgtccagacgacgaggcgggaggtctccgagacttttattgctaaaatgaagaacgccgagcacaaagtgtcgctccttgatgaggtcaatgaccgattcatgtacttgtctcaggcgcgagccaacgcgcagctgatcgaggccctcgaaggtggcggagttctggagagtgagaaggagcaagttgatgagtggttaaaagatttcgccgatgctgaggtaaatcttaatcgcttcatgtccgagctgaaagatgacctcaaagctccagctcccgagcccgctcctctgagtccgggtggtcacagatcggtcgagtcattggctgacgaggcgggaattacagatcaagccggatctctcctccctgccaaggataatcgaccatccgaagatctcgactagggacccgaggcggttttttgtttttcttctctctgctcggttataatacttatagctggatggctttatccgttatgtagaacctgcctggatggctttatccaatttaagtcattttttgaaacccaaaagttatggtttattaattctgaattgttttattagataaaaaatgtttagagtgagtctctcggttgcgacccgatcgtattcactccttgaccagcgtttaggaacgagctgggataccggtgttaaaagtataaccgggtttctgaagatgaaaattccttatcagaaataatctgataagttttcacctcgtatttgtatagcgcgctgtagccgaataggcgtaatggatactccgagccgtcgctcattgtattagacgagtaaaaagttgaatttttaatttttgatagtaaaaatgggagtatgaatatacggacccacgtactgaactcgtccgaagacgagctgcctacgtacccttttcagggatcaagccacctcgtagttcaagtttagtcacctcggatttagttgtagtatttccttgggtgcattgcgttccatgatcttggaacggctttaccgtttaagtcagcgagctcatacactccgggtcggatgacttttgaaattaagtatggtccttccagttcgtcccgagttttccagcgttcggttcggcagtgttctggtaaacttttcggaggacccgatttccttcgtggaatcttcgttgccgaacatttgaattgtaatgacgagccgtttcattctgataattttgtattcgaaccagggacgaatctcttcgttcgtcaatcagatcaagttcgtcgaggagcctttgagagttatcaggagtgttctccggggataggcttcgtcgtaggcttggaactatcatctcggccggaattatgcactgtcccgtagactaaggcgaaaggggtttctcctgtggctcggcgaggagttgtcggatgcgacaaaagcacgccttcgagttcgtcggaccacgagccattgttagcatcgagccgtttctttaagccgtcgaggagcgttttgtttgcggcctcggcttggccgttcccttggggatatcgtggtgttgactttgctaagtcgaatcccccatttatcacaaaagccttggaaacgggtcgatataaatttggagccgttatccgtaacaatttcatacggtatcccgtggcgacataagatatgtttccacacgaagttttcgacttgagcgtcctttatgctggcgtaagattcggcttctatccatttagagatatagtcggttagaacgaggactaactttttttgcttcgagggatgcataggtccaattatatccattgatgaagggatatggcgaggagattgatgacaagagctcggctggttgatggattgtcggcgcatgcctttgacatttttcacatcgttttgaaattttttcgcaatccttgatcatcgttggccagaagaatccgtggtgttttattttgacggctaaagcccttcccccagagtggtttccgcacgaaccgccgtgaatttacttcatgatcttgcaagtcgcttctccttccacgcaggtcatcaatggtccggataatcgccagttgtaaagtttttcccctattaagacgaaatgtgcagcctgagctttgagtttacgagccttccatttatccgagggcaatttcccttcggatatatagcttatgatgggttccatccactttgggctgcattcgtccgggtcatcttgatccgtgctgatttgtatcgggaggacgtgttcttcttcgccgagctcaggttcgggtcggaggttgaggccagagcagctagggcgtcggccgatgaattttctccattggaatccttgttaatttgaattcgtcgaaattttttgctaacttttgaacatgaatcaggtaggcttccattttctcgtcccgagctgtatattccccgttgaattgattcgcgacgagctgggaatcgcaaaaagcgttgattttttcaatctttaacccccgagctagattaagtccggcaacgagagcttcgtactcggccacattattggtagcttcgaagtttaacctgaatgactgctcgaggatttctcccgttggcgaggtgaggctgatgcctacacccgagccttgttttgatgacgaaccgtctacatgtaggagccaagttgtgtcgagtgggtttcccgagcttctttggtgggtaattcgacgataaaatcagctaggacctgcgattttgcgcatgttttgttccgatattcgatgtcgtactcgctgagctcgattgcccacttagctacacgtcctgattggcttggactgtgtaagatggcgcggagtggcatggatcccattactacgatggaatgggattgaaaataaggtcgtagcttccgcgccggtgaaagtctgagacgtagaaaatcggcttctgttcgcctctgtcttctcggactagcactccgctgactgcagtatctgatacggcaatatacaaatataatggctctccgattacgggtttggcgaggatgggtggtgttgctaggtacttcttgagttcttgaaaagcttcttcacatcggatcgtccactcgaactttttgtttccccgaagcacatcgtaaaaggctaagcatttgtctgttgatcgagagatgaaacggttaagggccgcaactcttccggttaagcgctgcacttctcgcttgttttgaggcgatgccattcccaacaatgcctcgatttgctttggattcgcctcgatgccgcggtgggttgagtttgacgttgtataagtttagttgtttgaaacattcgcgcaaatgggttatgtggtctttctcttccatagatttcaccaacatgtcgtcgatgtagacttccatcgtcttcccgatctgtaaggcgaaaattttgttgacgaagcgttgataggtcgccccggcgttcttgagtccgaagggcatcactcggtagcaaaaaattccttgctctgtgtagaaagcggttttttcttgatcttcggggttcatcatcgatggttaagcctccaccaatttctccggccaggaactttgctgccaatgttgctccgaggccacgtcgttgattccttctactctggctaaggtggatcggaattttgcgaggaaatctcgaagtggctcattaggctgctgagataacgaccatagatcggcgtctgacgtgccgggatcgattagcaccgaatattgctttaggaaaagtgtcgatagctcctgaaaactatccacagaattcccttcgagtctcgagaaccagtccagggctggccctttcaagtgctcgacgaacaggtgacagagaccagcgtctctttcttctggtctgaatttggctcgggccacggagatgataaacgactttaaatgcccttttggatcgaaagacccgttgaaatactcgattcttagttttcctgttgaagttgagccatcatactcctcagttctctgctagggtcgcgggagcaacggcttcaggagcatctgtctggattggagggattgggttcccctctgtatcaactacgttactggagacttgattgttgaccattgtgaattgggtgattggttccgtgttccgggtgttagagaaatctctaccccctccttctagcgccaaattgtgagagtcaaaattcgcacaatagaatttgttttaaaggtttcttcaaagaacggatctttgtgagattctcaaagaacaacagaattctcaattaccgtggacggtgttcttgattttattaatgagaaagtaatgattttatcatacaagtgtgataaaatatgagaaacaggtgttttttgccttcaaagtcagagcgttcttgatagcctcaagttgagagcccttttgtgcgtccctttgtttgttctctaaggtgcttttttatagggtccgagaatatcatcccttgcgatattctcggaaaattcctctttgtctttatcttccgaagattctgggatttttgtatccggtgatatcttcgaagattatctcttccggggttttcggagatgaagtgttttgaacttacatcggctaagtctttcgaagtctttctgtctaaaacgagatctttccgagccgtgattaagctggcctcgggtcatgatcgggatgcttggtctgcggtatttgaaggcaagctcccgaggtgttttcgagcccgcctcgggatgattgtccaagtcttattcccgaggcgttccgaggtcgggtcggtatgggctcttgacgagaactccgaggtgttttggtccggttcgggataattcatctatggctcccgaggcggtatggtcggcacgctatcctgggtcaaatccgaccccaacaaaggatcagagaaaatgtcgaaacaaatttatgaacccagctcgcctatcaagagtttaattccgacgacgtaagaaatgcattgtagaatcggagaaggagaaggatctaatcgtcgattggaagcagagaggatcggagaaaggcgcgcgcgagaaagagggactgatgtttgattcagcaatttcgcacccataaatctaaggtaattaagaaaagtgattacaacaaaaataaattaaataaactaaaatgttaagcatttataccatttttcaagttttaacacaaattagaaaaaaacacaaaacaaacaacaataaaattaagtttatttatgaaaacgacataaacatataggctagagttttatttcttcaacttaccaaaaaatagttttatttcttcaaaccggcagctatgagatcttcaatctcgttctcagccaaaggtttctgtcccaaaatcaacgagttccacttccaaaccgatgtagctgcgcgaaggagggcagtggaagtagaactttcgggacaagccagcagtatgttgaatgagcggcatctcagttgatgaagagcgacggagtaatcacgatcgcccgttattaccatcaagttggaaggttggggatgattgagcgcaatccaagttaaaacatggccgataattttaaagtcactggcatcttttatcgttttacgcgaaccaactttatttcctaaaaaagaaaaaaacaacctaaataatagtatttagatcaaaagaaataaataaatttatagagaattttacctggaacgtggtatagatcgataccagtggaagtgagggccagctggatcggggtaggtatgagtctcatgttgccgaaagcacgtatagaaataggcccgcgatagccattctcgttgagcgcgtttctaatgttccctccaattctgtaggcatcgaagcctcttggaactggagagttctcggtgtcccaccaaacttgagttttggcagtgctaaaatctactaactgataagaagaaaaacaagaagaagacttgtcgcttatgccacaaattggaaaaacaaaaatgtctggtctgccaggaaaaatgtcaaaaaaattatcgatttaccaaaagtgatgaaataaagcatcaattttgggtctgatgaattaaattctcaattttagttgacttttcaattaaatttttaatttttgttgactcggccaaataaaacacgtcgttaaattaacaaactggtcaatttaacagatttaagtcaatgttaacaatttcattaaattctaaaacgacgtcgttttgtgcttaaaaaaataaaaattaagaggagaaaacaaaggcccaggcccaaaataaaattaacatttttacctgtgggtaaccaggtagtctgaccggatcaccatattgaggcccaatagtatcgtttggaggagatgaatccgtagctttaataaatttgatattaataaaagtaagataatcattaagatgatggaaaaacagaaggaaacagagggggaaaaaaaacaaacctaaaagacgaagatagtgagtaccaaatacagctggagctaggataaaaaaaaaaaacaagtttttacatgtatgtaaaaaacgaggtaaaacagataaaacgaagcgagaagctccatttcttaaaagaaaatatgaaaaaacttacgacgtgatgctctggttccaacaaatccatgagatggagacgctacgtttcccaatccgctaatggatttgaagaacctggattgttgaaatagcttgagcaacattttatctgaaacaaataaacaaaaagaaggtcaaaatgtaaacggatcggaatgtcacgacgtctaaactagaagcgtcagatctagtcaaggaagctaaaacggtaaaaacagagagatagaaagagttggaggttacatgagccagcgagagtgagagagagagagagcttccacgcttgcttctcctcaacctgaaatgcatcggaaaaaactcagggaaacagaacttgacattatacttataaaaactcaaaaaaataacttaagaactcaaagaatcacaatcgcaaatgcaaaacccatcaaattaagcaaaattatgatatacgaagcagtttccgattcacagaaagagcgatcacaccaataatccaaaacataataacaatcgaaagttattaaagcgatcggtatatacacgatccatcggatggataatcaggaaatctacatcagaatcgtcggtatctgtaaatggagagagagagagagattgagcttacttgagcgagatagagagcttccaagctttcttctcagactgaaatgcatcggaaaacaaaatctcggaatcagatttaagaaatcgacactataccgattaacaaataaaaatctttaaaaaaaaacgaagaataaaaccttgactgatgcataaaaatggtggtggtttatgtgctgaagacgatggtgctttatatagaaggaagagagtgtaccaccttcgtgctcgaggtgcttattacggatttacccttttccgtttcaaagggcccaccaaatctatatttctcccaatttttatatttttattttttataaatcataacttatcttcattgtatttacggcattggattaataatattagtgtagataaattagccaaaagattaatgctatttaccatctaaatatttatgttgcacttaatatcatcgtagataactagaaacttccattagctgatcgaccatataaatatttctgttgcacttaattaatgacatcgatttgcacttaattacggcattggtcacgttattgtctattcgccaattaactctaaagaaggttagtatatggcgatgtaacatgtggttaactacgtcaaactaatatatcattgcttagattttgtatttaaatgtaatcaataaatttactcttagatgatcactcgtgtgataaaatacgtagttttgtcacgtttataactagacattttgaatacgaaaaataagaaattaattaatcaacgatatcatatgatattccacataactgaacattaaaaacaaagaataattctggtgctggagtaataatataagaaaaatctaataaggggcataagtgataataattcatttatctctccctcgcgattttggtctagggtttcttcaagttcctgatcggattcggtcggcgtagctctaatggctggctggagtcgtatgatgacttaccgatccatcaagcgagtctccaaggttcggttgaatcaatctgcttattctcaaagtgattgggatctggattctgaaattgattcatcggagaaattgtaagattctaaatctgggattttaaaattcgtcgtgattgtgtgtgttggtcttgggattaggtgaaactcgtaatttaacagtgcctgttttgtgtgtacttataatagattcggcttagcaattccctctgcaacttctaattattgacattaatgtaacaagttagtgtcatctggtggtgattctacttagcgagctggtggtggctcactatttttctatttaacaaccatgcttctgtgtgagaactgacaagtgacatgcggcttgcattacttgctaagtttgacagagtagaggagtttcttgtccttcaaatactctacaattgactagttatactcttgtcttctgacaggcagttgatatgaaagttctaggctctcttagcagagacgattttgaagaaaattttgtggtgataatttccctcaatggatctcgtttccagcatttgaacaggtacttgtcatcatttctgtgagtcattggtttctcaataacatagcaaaagtttgaaactgcaaacattttgttctttctttcttatttttcaggtcaaatggctgaataaactactgagcaagatgtggccttatattgcagaggtgagattctaatcttcttatgttgcagttttaggtgttttcttttcccttgtatagggttggaagttggctattaaatcactagcatgtttaccctgaataatggtaactgaagatatccatgtaaagttgtactccaaagttcgaaatgattgaagaagagtcagatttagcctgtctagaatggactcgtagactgattttttttttttttttttttttttgctggtacacaaatctagtgttttattgacacctaagataggtccaatttgttggaatggaaaacacttgccacaatgcaccttggcaatcaaagagtgtaatattcgttgttgtgttgactaatttccaggcagcaaccatggtagtaagatattctgttgaacctcttcttgaagattacagaccaccaggaattacttccctcaagttcagcaaattgaccttgggtaacaaagcaccaaagattgaatgtaaaataaggtcgacacaacatcatttttgtgatggctatcttttctcttccattgttcaaccttgtattgtcctattatttatcttggatgagttacctgccaaatgctattgaatccttgtgcttggaagaacatcatgcatttgtctcctaggttacttttgctgtaagcctgagcacatgcataattaatcattgttgcaggtattcgtgttcaaagtttcaaggaaggtcaagtcacaatggacgttgatcttcgatgggggtgttacagcacttgttgcctccatacccattcaggttactagagagatatttttagtatttgtcgtttgggttgtcgttttgtgccaaatagagattgagtatctctacaaacacttgtttctggctgaaacagttgaaggatcttcaagttttcacagttgcacgtgttatctttcaacttgcggatgagattcctcgtatatctgctgttgttgttgctctactggctgaggtacacttgctctgtaaagggtccagaataagatgcatttttgttattatcattttatatctcctgtcttacaatgaccaactatttaaatgttctcaaccagccaaaaccaagaattgattacactctgaaggctgtccgtggaagcttaacagcaattcctggactatctgctatgattgatgtaagttcctctcttggtaggtcaagcagtttccaaaagttttagttgttgttcccatttggtcttatacacagctttttgcttctctttctgttaggacactgttgatactatcgttatagacatgcttcagtggcctcatagaattgttttccccattggtggtatacctgttgatttaaggtactttcatgtgttctgcttgtttttcattttgcgttttttcactcacagaatttttcctgccactgtcaatcttttgtcttttctcctcttctggtatggccataggatttacttggcgaggtcatgatatgtattgagaaagcactatatagtttgacgattctatgtatctctcttctttctcagtgattttgagcttaagccacagaggaagcttatagtaacagtagtgaaagcaactaacttgaagaataaggaattgattggaaaatctgacccttatcctaccatccacattcacctgtattcaagtataaaacaaaggcaatcgagaacaatctgaatcctgtctgggatcaaacattcgaattgattgtagaggacaaagaaacccagtcgctcactgtagaggtctggaatctgaaatatttatgcttcatactttttcaattttgccattggaaatattaactattctcttcgctttattaaacttttggcaggtatttgataaagacgtaggccaagatgagcgtcttggacttgtgaaacttcccttaagtagtttggaagccggagttacaaaagaactggagctaaatctgagcaagatgtggccttatattgcagaggtgagattctaatcttcttgtgtatacttttggaagttggctataacatcattagcatatttaccctgaataatggtaactgaagatatcctaggaagagtagagttattatactgtcaagttgtactccaaagttcgaaattattgaagaagggtgagatttagcttgaacaccactgagcaaatttctcagtgatgtttcctcgagatgtttatcatggaacactcacggcaatctgaactattttcttacctatgcaaacggatgatccgctgctcggattcaagaccatctttcggcctaatggtgctcatcgctgtcacaactacatgaagtacccaaagtatgttcttctcctcacttagcttagacatagagatccattcttttgcatatggaatctgagattgattccatctttgttgtgacagcatcatgaaactaggcgaagctgcgattcttcactacacttactcgaaattttcagatcttactgcaagacgtgatcgatgttgctgcaaaccaaaagaagaggatgtcaagatatgtttcatgctagactttgacagagccataagcccgtaagctaggatttgatttgtttgtttttttgtcgattcgtagagttcttgttcatcacatttcgtgattgatgatgatcctaggcttctggggcccctcttaggagtttaagagttggttcatctattgttggttttggagtaggaggaacaagaagtttcaacaagggcttatgtcaaatgctacagttaaatctgtacctttctctatcaacaacagcaagggaaaggaactcaagatagtaggagcagctatggtcagaattgtcatcagatggtttgtgctaagtttttgattgatcagttcacttgcacttgtagctaatgtttttttttgtgtgggttttctagtctaattgttagttttgacgtgtagggaagtgatagtgatagagatgaaattgaggcaatgacggttcaagaacttaagagtcacattgaggcaagtctatactcttttcgtttctcttgctgctttgttattgtttctgtggacatccagattcttgttcattgtttaaacatgtgggacatttttgtatttgtgttacaattgttttggttatagaaaagttgggctccctgtgaaaggacgcaaacaagaacttatctcaactttacgacttcatatggacagcaattttacctggtatgtaactgcacaccaagaacacacatttttctgttttatgtatcatatcgagaaaaggcacgagcttgcttccatttagtagtttttaagcttgatccatttgatttagaatgaaagtctcagaagtgctatatcttctgattattttgcgagagctgtaaagaatttttttgttgggctgtgtctcttctaaattttctcttttaagtgaaaaaccaagtccttgcctgtttatttgttacagatgaaagttctggttcagaaaaaaaggaagctactttgtccacgcatttagaaagtgtcgcgattaaaagaaagatctgaaacagagaagagcctactcaagatgaatgcattagttctgaagcttatggcattgaaaacagagagaaaagagtaaaacagtctactgagaaaaacttgaaagctaaagtagtttcttcaaaagatatctcaaaagaatggaagaatgtgcttatttgtgatatcatatccatgttatccaatatgtttgatatgttaagttgaattgtatgtgttttaatcagtttggtcttttgcagataaaaccactcagagttagatatggtactggtctatctggatcagatcatgacatggaagggcgtatggtaactgctgaattcgactccttctacttgataagtacttatgtccctaattctgtagatggcttaaaaggactggtactcctcaaattaaatgcgtgtagttgacatagatattctacttttcttcttattctaacgaatggactccgtgggttttcacatacaggatcgaagattgggatcgaacccttagcaatcacatcaaagtatgaaaacgtttcttcagagtttctttattttgttgtatatgtccttcttacacaagctcaatggctcttttccatctgcaggatctggagaagtctaagcctgtagtcttgactggtgatctaaattgtgctcatgaagagattgatatcttcaatcccgcggtaactaactcgagttcttccctcccctgtttttccatcgaaagtaatctctcaggtttcataattctccaccatatcttataactaggggaacagaagaagtgctggttttacgatagaagaaagacagtctcaaacttcttagataagggatttgtagatacatttaggaagcagcatatctggtgttgtcggttacacttattagggttatcgccatggtggccgcaaaaccaacaaaggtacgataagttcgtttgatacatatattcagattcaagtcctcacgaacgaccttgtttttttacgtttttaggataccattcaaaagaatatataagtgaagcaagcatgagaggtgcaattctcaaagccaatgatattcctgggcatattcttagtccagctccaaacaatatcatctcgaaatttttacctatcgtctcaatgcctcgtcccaagaatctctatggcttgaaccgttccgcgttttcccaaatgatcgagtctctttctatagcccaattgttcacaagaatctgagtattttcaggaatgggataccctaaaatctctatgtttgactcaaatttatgcgggatgagaaatagacttggtgggtgcaaaaggagggtctctgttacaacagctcactacaagaatattgatcttttgtagcgttcgaataacgctatctaactatactatagcgttttaacaagcgctctatcatcgtccgtcatagtaggtcgaagacgtaatatagcggattttctttgtgctattgtactgttagttattatagcgcattctttgctgaaatattagattttacaatagcatttcaattttgttattaatgatattattcaatgcaattagaatttaaatttaaaatttttgaatttaaaatttgaattccaatattcaattcataatatatagaaaaccaaatcattttattgatataaaattttaacataaaaattcaatgaaacaaggaacaaattatctctaaagaggaaaacaaaatacaaagcaatcaaatgagataacgaaaaaactcatggttgctatggccacgtacactttgcattccttcttcttcttcttctttgaagttcacagcctttcaatgaagatgagcacaacaactaaatccaaaactaattaacttaagattttaagaagtaatcatggaacaacacattctaaagtaaacaaaaacgaaaaaggacaaacagagacaacctttttatcatacaagcaagatttttttatcaaacttcttgatacctgcaagtatccatataagcatcccaataaccatatatcacaaccaataagcaaaattcagtaatcaatataagcccaacacttaatgagtaaagaatgtgcacatacccagatagatcgttgattctcttgccaagttccttaattttatacaccattttcttgataggttcagagtaatgccttaacctctgcagatgaatgacaattaaaaagcaagaaaacatatggagagagaacaaataacaaaaacaagtatgactatgactgtttccacttatactaactcaaatggtgaggtacagtaacgtgaaactcttcatctaagagcaattaagaaaactctaagagattggagtcacaaacgtaacgatttggccaacaataaagttggtctcaactttagtgttagccatagctattgggttatgaagtagctcagccaatgtccattccacaatggtagagttcgtctccgttcgcgcaataaaacaagtcccttcaaatatacaaaaaagaaattactcttttatatccaaacgattttccttttttatcgtttttttctatatattaatattttatggttataatgaaaaaatgaaataaatactaaatggaaatggtatgtcccgtttccaaaatagacatatccattgaatattttacgtaaaaacaaacgctaaacgaaaaagtcagtcaaaccataatttaagacttatatcacttacgcataaaaagtgtttgatatcattcatgtcgacttccgatccctcttcttgaataagatcgatcactgaatccaacaaatcgcctctcagtgcatcgactctaggtccaatctgcgatgatctttccgcgatccgagcatcgatgaggccttgaaaaacctgaaacaacctctccgaacacatgaccttcatctctttccggataccctgtagatcaagaaactcaagagacggaaaataatttgcgaggttcggtttccccattgttttcatcatacgagacaaggagtcttggagctccgtggaggctctcggatcgtaactacctaagtcgatcgaaaacacaacgtttgagtctacattaagcgacgtgatgaagcacgcacgtacgagcaatgtcgacggagaagcctcgttcgcctctttggataatgaaatgttacaagttctttcgctttcttcgaccttacggacttcgtggctttgtgatgctcccgtgagaaaagttttgtcgccagtatccataacctaattggaacattgtatttatatatatagatagataaccatatttaattaatcacattaacttataatttacctccaacgagacgacgtcgaaggtagccatgctacggagacttcgtggtggccgaaggctcgaaccgtcttgctaaaggtttgcccggataagacatggtcaagcgtttaaagaacctctcttgctgcatctggtgaagaaatgaccactttggttaaacttccaagcctaagactcatgactggtccataaactctcgagaaatcagcaagtgaacggtgaggagcttttccgatgatctggagaaggtttccgattacgggtcatcccgaaggtccgagaggtcccggaagcagtgccagtgagctgtgagcttgatctccgtcgtcgtgatttaacagcgacaacggacaaggagaagatacgttaaaaggaagctaagtgtcaaaagcagagcaagagctatggtgtgcttcatcgtcagttcgtcgagtgtgttcttctagccacatcttttacttatttatagatatgatactatatctatcattaataaaatttgctatcgttattatgggcttagtttgagcaatagcttccttcactctaattaaatacacttgttgacaaaaagaaaatcccatttctctaggactcaaaaaagaaatgtacaatttatcgatcgctttaaaagctacagaaacaatatgtgatatgtctagctatgaataatattaacatatgacgtaatttgattttaaggttattttatatatatatataaattagactcctttcataaccacgaagttatgatatttttgtagcaacaggaagttatatatgccagaagaattgaaacatttgctttttggggtcatatatggagaattaaagttatgattaatcaacacacatactagattttacagcgacgtggcaaacttaaggttctacttggatgacacggtgtcgtaattcagagacgtgacaaatttctattggtcgttgtgacgcagattggtaattgctctgaaatccttgtcaggccatgcgaacagattttggagtcaaaatccagagcgcgggaaacgaaacgagccaacgattccgctagtgcttgatctaggcaatggttcttgtacatgttaccacctatttgtacaaattgacttccataattgtatttttcttttgaggaggtaaatgattatagtcagctaactcaatagatgtttgttgattctgaaaatcacacaataaatttgtttaaagggggtaaacaaatttacttaactctctctcgctatttagtgaccaaagattcaatgaaaagaagaacaacgttgcttagagacaaagttagggttttgcccaaaaacaatgaagagggtttttagtattaaatttcggatcccccgaatagaggacaaacccctctatttatacactattaagacggttaaaagatttgttaaacttctatttcttcgaggattgaatcttctaatttcctttatctccaaagacttcctattttcaaaggagaaaacttctttttcttcgaattaggaagtcggctagacggtctccctacttcgggctaaagtcggcaaatgacctccttattttggcccattaacaagctaaaccgggatatcccggtttgattgaaatctcagtctaattcgtagttcttctggtttaagccggtattgtcggaggtgctaattccggcaccaacaatgttttaacgtggcaggacagatatataagttatatatatggggttacttgctgtcttttgtccaaactctattaacatccacgctggtctgaatggccttgaaatcggtcacacagttgttactgccgctgctgtaaatcctatggtcatagataatgtgtctgaatttttctctctttgccccttttgggttgagatatgatgcgtcccagttacctgtagatcctgatacacaacgttatgcaaatcggagcatctgtggatcccgagtatcaccacgctcgtaccttctcgatatttcttaatcaaccgctgatggccacatccttggcaatgcttgcttacaattggtaaaatccttcacagctttctctttcaaacttattttttcttgagtgaagtaatgctttttctgaccagttcccgcaatcgtctgctgttaggtatccttcttcagtttttgttggagatacttacacagtcttcgctggaacgactgtggcagttgttggtattctgggtcacttcaggtatacttccaaacccacttaccttctctgaggcacaggcacgtcactaatacatggaaactaccaactctcagattcatcatttgcatcatactatccagctagtgtatgaccatgcaactaattcccatgccatatttctgttctgaaagttcgcttttgcagtgaaaccctcatcttctttcttcctcaagttctgaacattctattgtcgcttccccaggttcatatcaactgtcactcttctatggcatacttataatcttgtcaactcatgtttcaaacatccaacatactaaatatcaaaactctttagcttgctgggattgtgaaatgtccgcgccatcgtctcccaagttaaccacctttcttttcttaccttttgtagactgattaaagaactgtcacatcactcatcttgtcttttgtaaactcactcatcacgagggagtttggcgttcaagcaggtccaacatatccaatttgctacgaagtcaagtatttagtgagtcacagatgtaacagcgatctatcaacctccaaatactttgtttctttgtccagagaagaacgaaaacttttcatttttacgaaatatttacagtcttagcaaaaaagaagaacgaaacagagtacctaagctacagcctacatatgaatccgaagatataatcaaacgtaagacatctgaagcattgatgttaaatctcgatgacttggaaaacaagaaagagattttcagaacgttttcaatttcaaatcccgaaacggagaatattactggttggaaaaatttcgaaataaatttcctgtgcttttcgctttttccctggctctcgctttgttgtaggtcttgatagcctcgctacactgacctgacccatatgatatgaaaacactctttccattgaccgtagagatcgtaagcgtccttgtgccttttatccagaaaaagcctccgatgatggattaatatgtaatctctgtgaacaccgctttgattctggtgaagacaggccagctaaacgagctaactttgccgccgtgtcgagatccctaacagagctacagctacaagactctccagtctccattctccaatatacatccctaggacgacgatctggatccgacattatatcctccgctcttcctagaacggcggtgcagttcagagaaaagatggcacggcggatcagagacatgattcgaaaaccccgctttgactctggtctccgcctctctggtggagacgagttggccgccggtgttcacgtgtaggtctcattattatattcatgggctttttagaaacaaatagatccaaatggaccgatttgaaaatgcgtatctatgggcctttgaaaaaagccatgttaaattacctttaccatccatcatcattatcgcgatatttaatgcacctgcaaaactgaaccctaagtgatcagtcatgtccctcctccgccgcattgtacgaaattcgaccgtatcaaaggctgttccggttgcgaaggcgttcatgccttacccactaggaagagatccttcctcactcccaaagcttgatccggtatccatcagctatatcgatagccgcccaatttctctgcgctacagagtcagggcaatgatcgagatgtctaatctcgacgaagcctcgaagctctcgcggctagctgtcttgaacggatttctagtcgacagagacaccgtcttcatctgcaattccgtaatcggcgccatgtgtagcgccaaacggtacgacgatgccatctctctgttcaattactttttcaacgagtctcagactcttccaaacacgctctcctgcgatctcatcatcaaagcacactgcgaccaaggtcacgtcgacgatgctcttgagctctaccgtcacattttgctcgacggacgtgtagctccagggatcgagacatacatgatactcgcgaaagccttggttgatgctaaaagattcgatgaagcttgtgttttggcgagatccatgagctgttgtagtttcatggtctacgacattctaattcgcgggttcttggatatagggaatttcgtaaaggctagccaaatcttcgaggaattgaaaggactggatagtaaacttccagggagagaatatcacaaggcaaatgcaatctttaatgtttcgtttatgaactattggttcaagcaaggcaaagatgaggaagctatggagattctcgcaaatctggaagatgctcaagtgctgaaccccattgtcggaaacagggttttgcaagttctggtgaagcacggtaaaaaaacagaggcctgggaattgtttggagagatgatagaaatttgtgattccgagactgttgacataatgtccgagtattttagtgagaagactgtaccattcgagcggcttaggaaaacgtgttataggaagatgatcgtgagtctctgcgagcatggaaaagtgtcagacgcagagaaactcttcgccgagatgtttaccgatgttgacggaggggacttgttggtggggcctgaccttttaatattcagagcaatgatcaatggttatgtttcagtagggagagtggatgatgctatcaagaccttgaacaagatgcggatttcaaatctcagaaagcttgctattcatcaagccccataagttggatttggtatttttttttccttgtttatccttaaagtcttcttattctttttttttttttttttttcttctttgaatttttactaatcgattggtattagtgagtttgttgagtgatgtctttttgttgctaaaaccgaactgaaggaattggagaaactaactagaagctacaactagaggtttggttaactaagtactttttagtatcttttgctttttgcttaaatcatggagaatcaataggaaacttgtctacaaaaggtgatgtcttgtagtaggtaaggtgtaggcgtgtgggtgtaactgtctgtttgcttttctctataagagcataattattggtggtatcttacccaaattcttaggctaagatttgtgaagaaaaggctcttatataagagcttttactcttatatttaagttttttcttcccaaatcttagattaagatttggctaagataccactaataatggtggtcttatcaatggattcttaaatatttttgaaaacctcttaaaatattatataaaataaaatataaaaaaataaatagaaaaggattcttttagaagagtaaattgacttttaaataagagattttttattcgctctctcctcatcttaagagtctccctcctcatcttaagagtcttcttatatttaattataattttgtgtatagaagtcttaagaaatttgtttaaaaacccatcaataatgatggtctaagtgtgtgtaagaagaaaacggagcaatgagttcttgtaacggtgtttgaatgaaaacaagtttaaagaagaattctagctactcaatgttttcttttctcaaataaacatcaaatatctgagaaaacaacagttttgatacaatatttttacatgttttaaaatttaactaggtgtcaatgttttcacgattttttgttagtattttcatttattctttacttaattacttaaattaagttttgagcaaaaaaaaagactttcaaatttccaccattgaagatcgaagctctcttcatttttttagtagagtaaaagttcacgatgaatttagtgtttgcatatattcttcaattaattaaattttgtctctgattaactagttaaagaaaaccaaaaactttgacaaaaaactgtgatatcttgtaacaccaccacgttatctagtggtgcggcgtagtttcccaccgtaatctaactctcctctgcacaacgtcctcaatctccaatgttatcattaggtggctatgtctcaaaacttaagaatcaaaactgcgataatggagtaagagatgaagaggcaattgcggaggcagagattcggcgaagttcagaggaggtaggcgacgaggttttgaaaattctaaagtattgaacggcagcgtttttggaaagaaagtaaaataataatatacttcgctatgcaaaattgttggagtcatggtcatcgacaaatctattttgagagtgacaataagaagctgattgagattctcaatggacacacaggtcattttggcgctttcaattggattagagatgcagagcactggagaaggaaattccaagattgtcgttttcactgggtgccaaggcagcataacaaaccggctgatttactcgctaaacacaatatgtttcgaaatacaaagttcatgtttttctctcatatttcaaatgtaatatacacagtgttttggattttttcaactaatatcaataagaagatgttaaaaaaaacgactatccgtttaaatttagtcaaacccgttaggcccacgagtttaaacgggcctagccctttaaatcctattaattttactgtataaataaacgagtctcggatctaaattttaatagtaagcccagtccgttaaacatatagtccattataacatcactacctatcacattagagtaagattggtatatgaagaaataacataacccgtttaacaacatggttgcaatttttaaaattgatttgaattatatatttttcaaattaaaatattattaaaaaaataataaaaaaataactattaatttcgctgaatggagtaagatgatatgacaggtttggatcgataataatataagacggtatcccacaggtaaaattcattagatatatttaatttcactgaatgagattaaatgttaggacgggtttgtgtctatagtaatacgaaacggtttaccacgggagaaatcctaaatataacaataaaaatacaattatcttaaacactaaacaaaataaacaatattaacaaaacacatataatttaaatttaaattatttcatcataatatagattttaacttaatgaactgtatgttattgttgctatatttttaaacagtaaaaatgaaacatagtatttgcacactaaatactatatagatataagagttgtacatttagaaaatacaaaagattaaatcatatatatttttaatctattaaacaaactaaatttttattttctctaaaaaatatagtcccacgaattaaaatctagtcaaataaataaatggtgtcattaaataaataaatatacctttgcatataaaaaatgttaaccgtgtttttaagaagaaaaaaatggcgatactcagtccaaatcttagtacaagaggaatacctagaatttaaataaaacaaattgaaaagaacgagttttttaattaaagcagcaacttatatgtagagttgtacttaaaataatgaaggcctaagtgagtttattgataatgttttgtatcgtttgaaatacattatttaattcacaaaaaagaaatttataatatattatgacaaattaaaatactgaaaatgaacttaaaatatgttattgtttatatgcatatttcactaaagtcaaatttaaggtggttatgaacatgatttataaattatataaataaattaggtgaagagaagaagtgaccacaattgtaaattcaagtttaatttgtgaagagtttgtatagaaaaacttctataatgtaatactcgaaaaattaataatcactataactaataaaagtttttggtctttagtcgaggcaatataatatttaacataattcgataatataataatttgtttgaaaatcaaatgtaactatatgatcacatcattatcatatactaataattgcataaacttatcaatatatatatatatatatatatatatatatataaatttagtaaaatatgattttagtattatttgttttgtcttaaatatgcattaatcttatactacatctaaaacttttgtgatctcaaagcattcaagctggagatactatcataatgatctatgttttgcttcgtagtgaaaatcttctctttctttaaaagtattagagcatgtaagatcatgtatataatgtcttgcacttctgatatcgcattccctttagtgtagaaatcttctttagccttttcttacatttttttgttgcaataatgtcaactacctcattctcatttaacgactttcctccctcagttaattgcttctattcctaaacgatattcagaaagaaaaataatttcaaccgatgaaccttccaaaatctgtaccgagaagataaaattaaattcaactaaagccgtaaaaatactaagattgtaggaaagtgaatacgaagaactgaaaaaagtttttaaaataactgaaattgattagtaaatacactacaagactgaaatcatgtatattttattccaaaatagaatttgtttttaataaatacccggtcagttcaactgtttcactagattgcgagttaatagtttttatgagatttaatggttttaaaattggcggatattagcactaaacccataccggataagtgtctagatcatagattatagccagaggactgttcgggtcggtcgtaaaatgccgcgttttataaatcagtttttgttgtactacgagtataagtcactgtaatatggaagaattaaaaaataaaagccaagtacattacaaattatatctaatcaaactaaccatagttttatacaaaatatgacatagatattaaattatcttaataaatatctagcgttttaaacaaaatacttttcatatttatgttttataatcacattcaaaccttgcttcaaaatatatattattaaaattctaacattaaaaatatataattaactataactataatgaaatgatatataaactaatacaataaattaaaatattattttcaattataaaatatataaaattcagtataatatcctataaatttaaggtaatgatctagtaagttttgaaaatccgacaatcccataccgattagtccgtatcgactatgattgcagagggtagaatagtgccgtctgagatcacagtgaaacttttgtgtaaagctatggaggaaagttttcaagttaggttattgctctgaatattctgttgtatattgatgatagaagagaagatacatatatatgcgatacaaacgtttaacctaaaccaagtcattcttctattcttctttggacttcatataagcccattcatcgaagcccatctctaatactccccctcaagatggacagtggagatctcgaacacccatcttgccaagtaaatactgcaactgatttcgcccaagacccttggtaagaaaatcggctaattgctctgtcgtacgaacgtgtcgagtagacacaattccgtcttttatcccatctcgaacgaaatgacaatctctctcaatgtgtttcgtacgctcgtgaaacaccggattagctgcgatgtgtactgcagctttattatcacaatgaagaattatggattctggatgaggaacttgaaaaaatgagaagcagctccttgagccatatgagttcttgataagtataagccatagctctatattcagcttcagctgaagagagtgatacccgttcttgcttctttgttttccaacatatagggggtttgccgagtaagacaacatagccggacagcgaacgacgcgtttttggacatgtttgaaaatctgaatcacaataggcatctagatgaagatcatcagcgttgcttagtaataagccttgtccgcaagtccctttaagatatcgtactaggcgaactgctgcatcccaatgacgtttacgtggttgtccgagaaattgcgctagaagatgaaccggatagcaaaggtctggtcgggtgatagaaagataaaccaaccggccaactaacctgcggtatttggttggttcaggatagaattcaccgtcttctttggctagagtatgattctgttcaataggaatgtcaacgggtttagctccaagaagtccgcattcagagatgatatccaaagtatatttgcgttgcgagatataaatcccttgctttcctctggagacttcgatcccaagaaagaattttagaggacctaaatctttcatgtgaaagcattcgctcatatatgccttaaactctgcagttagcttggaatcattaccacccacaatgaaatcatccacgtaaaccaaaacatacaaacacgagccccccttgaaatatgtgaataacgagtaatccgtgtaattattcgtaaatccaaactctgtgagtgcattggagagttttttttttttgatataattgtaaatatcattagaaatgaaatgtttaggatctatatagataaaacctatggcttttgagaccttgccaaaaaagaataaaaacaaggcaacaaacagattgaaatcaaagagtgaagtcatcggatccaaagaagcatcaagttactgaaatgcttcctatgtcgtttagcagagatagagttgcgaacttccttgtcgatcaacttgaaagcggactgatgaggtaggagaaggttgttgtggagagagttgtttcgctgcttccaaatgtgaaacactgtggcctgggcaaccagcttccttaatagagacggcgccgcggttgaatgaagtcttgtccaagaaagaagctcatcccaggaaagaaagccttgacgctgtgggtttagcctcaatagaaccagtctccaaatcgcagcagagtagtggcagttaatgagcagatggtccctcgtctcggtggaagctgagcagaggcagcatgtcgttgatatgttcataccccaagaagctagcctttgtctcgtcggcaacctgttaagttgagcaacccacatgttgaaggcgtgttttggtattgctcctttaaaccaaatagaagaggcccaaatcatctcttcccctctaggtctgagtacttcccaagtcttagcagcagagaaacaattgctaaaaacatttccaacaacccagaaaaagtgatcctcatcagcagaaaaataaggaacctgcgctgttgtaagaaatgcatgaaataagactgcacggtccgagcgcggagacggaatagaccatcccaagtcagaaactgcatcaatcactttggaatgaattggtaatcttacgtctctaggcccctcaggacccaagaactttatcaaagggccgaggtgcgaccatgagtcaaaccagaagctacacctacgcccgttaccaactttgcatcttagaaatttttctgccaaaggtcttaagtgcagcaacgaattccaagtccatgagttagaccttgcttcactaaggctccagaaacttgcattaccaatgttgtgatatctgtgccactcagcccatagagaaccactattagagaataagagccaaatgaatcggagacatagagtagtattccattctctgaaccttctgaggccaagccctccttcagtttttggtaggcaaacacttgaccaagacacctttgctccctttccactgtcaatgtttccagaccacaagaaacgagaacacaaggattcgattttctttatgcaaccaaggggaatcatgaaagatgtcatccaaaaattgactgcaccatatataacagaagcgataagctgagttctccctgcaaaagataatgcttttactgcccatcccctgaatctagaagctatcttttcaataagggggtcatactcggcaattcgcagcttcctgtgcattaacggtaaaccaaggtacctgataggcagatttcccacatcaaacccgtatcttgtaatggccgttacctccccttgatttagaccggaatagtagagatttgttttctccttgttcatatgtaaccccgaccagctagcaaagtcctctagaacctcgttgataccatgaagagagaattcacttccattaaagaagatcataacatcatccgcgaacatgagatgagagattttaagctcagaggttttgggatgatagttgatatatccattggcaaaccgagaggtgaggagtcttgaaaacacctccatagcaagcacaaagagataaggagagatcgggtctccctgtctaagcccttttgaactcttgaaaaagccacttgaggaaccgttaacacacacagaaaaagtgggagtagtgatacattctttgatccaaccaataaacttagcaggaatgtccaaggcacgcagcgcagacaaaataaaatcccaatttaccgagtcaaaagccttccgaagatcaactttaagcattgctcttgactcaatgttgcttctattgtaaccttgaacaagttcagtagctaacaagacattctcagcaagtaatcttcccggcatgaaagctgattgagagggagagataacatgtgagagaatagtttgaagctttgaagcgatcaacttggcaataaccttgtagacagtgttaaggcaagaaattggcctgaaatctgtagatcttgaagcattggttatttttgggataagaacgagactcgtagcattccactgtttcaagatctaacctgacttgaaaaattctgagacagcagcagtgacctcaggaccaatgataggccaacaccccgtgaagaattcagcagagtatccatcagggccgcttgtcttatttctcggaagagaaaagaaagcatcacgaatctcatcgttagtgaactgcttatccaagaattctttttgcacttgagagcatctaaaaggaagaagaagctccatgtcactctgcacaatcgaaggaggcgcctcattaccactcaacaaatcagaaaaatatttgacacaatggtccttaattccttgttgactatcaaacatagtaccatcgtctccaatcatgtgatggatttggtttagagacttttttaaggccaccatacggtgaaagaaaagagtgtttctatcaccgtcacctaaccaagagattcttgacctttggcagaaaaaagattcctcagcagtagataactcctgccattttttctgtgcctcaagctctctattagtgtttagagagctgggataagctagagttctagtttggcaacgcaacaaggtatcatgcgcctctctgactctcttctccaactcagagtagttctctttacaaaattttctgatcactttcttcatctcttttagcttgtgtgagagcctgaacatatcagatccagtaatattgcaagaaaaccagtgacaagcaatcaaaggcagaaaatcatggttcaataaaaggtagttgtaaaacttgaacgcagtccttactctcagcctgtcttgtttaagcacaaccccacaacaagcatgatcagagaaatccggtgcgccaaaagtagcaagagactcagggaaaacattcagccaatggtgatttaccaaaattctatcaagctttttggccaccggtctgatcttcgatttattccaccaagtataagtagtacccctatagacaagatcaaagatatccgcagcctctaaacagcctctaaaatcacgcatgcgtctatcaacgttcaagtcatgcgggtttgaatgttcggaagggaccaaggtttggttgaaatcgccaagaacaatccatgcttttccaaacaatgattgagaagtggataagtccaccaattctgtccagagctcatatctagtcgattcatcatttgaagcatagacaatggaaacaataatccactcctgcgaatccggaagaagaacctcacaagtaaccatctgcaacgatttaaaaagcaccacaactttcacactttgatgccacaagatccatatttttccaaggtctgaaaagccataattatcatccaaaaaccagccaggtaggagttcatctataaacttcttactcttcgactgctgtacatgcgtctcaattaaaccgccaaaaaagggttctgcacctctagcccaatttttaaatccgcttctatgacttgctatattaaagccacggacattccaacaaaaaaggtttgtacacataaaattatgtggatttgaggcccttgcctctcaaacctgttcgccgcctgcgaggcagcacatctgtgaaatccaaaaactcgtctcccaatgagacttcttcatcaggctctgaggatagagtatccgaggagtcttgttcaacctcagaacaagtctctcttgggaccttatttccagctacaagaggcgaaatgcttttagtagcaacagacaacccactcgagtcaccgacaagcatgtccgactttttttcttgtagagtttcgtttacaggattgaagttattagcaattgcattgccagctggggacgcatccaaacctggacttccaagtttagaaactgcaggagcagcagaagcagcatctttattcttcttttggtatttgcgcttagttgtagaggtcttgactctaggacactgatttgtgttatgagctgtcgacttgcaattctcgcaagagattggagctttcgggcagcgtcgggcacgatggcctatttctttacactgctcacaaaccggaggcataaaagggcttgagacaaggactctctttacttctccggaatcaaattgaacgttgacagcttcaggtagcggtttccttgggtcaataattgtgaaaacctttgccacctctaaattagtcttgttagcagtggatgggtgaaggaattgcggatcccccaccagcccagcaattcgtccaagaccatcttcatgaaagaattgtaacggaacatgccgaagctccagccaaattggtgccgatgagagctcaggcttttcggggacaacacctggttcccattttgctacaaacatagtctgaccttcaatttgccaaagtctttgattgatgacacggttccgcgtggagttattcgggatacgaaaaaggaaagaattccctttcatctttgaaactgacacatctctgtattggcgactccaaatcccattcacaatattgtggatgatgccctgggaagggggatccgagtaaaactggccaagaacaaagcaatcccaagatctgcgattcttctcaatgacagaattgggtattttaacacacgcttctccagagggtagaagaaagggttcaccttgcttctgcagcttcttagatgtgacattcccaagattgacccataatggttctgaagtcggagaattctgagctatggtttctggactagccactttcatggccggcgcagtaggagtagtgactgggacacttggccctttcacacttgttaaagttggttctgcagaagcgggtgaggctatcacaggagcaacaaaggagatctgagaaatcgacgacgctgggtctgtcagatctgcagaaattatggccaagtccgtcacagggacagtcgattgggcattagagggagaaacgtgagctggaacgacaacaacggcggccggatcagaggacaccggagagttttgaaaaccagcatctctgagcttgtttaagtccgtaaagcgactttttaagtttgcaaacttttgaagaatccacattttcaacacccggtggaaccgtcatataaatttcttcctctagatctccatgtaaaaaggcgttatgaacgtccatttgaaataattcccaattacgagcggaagcaactttcaacagagtacgaatcgttgtcatcttcacaactggtgcaaacgtttcagtgtaatctgtcccttcctcttgtctattcccaaagagctacaagacgagctttgaacctttcgatagatccatcagagttatacttaatgcgaaaaacccatttgcagcctatcgcatgttttccttctggcaatgttgttatatcccaagtttcattctcttcccaacttctcctttaaccgcatgagtccatcttcgatcactcattgcttgtttaaatgaaacgggctctgaaccagcgctaatagcggccaaaaacatctgttgaggaggagagaaccgatcaagtgagacataatcagttaagggatagatacacttacttgaggatatttgaatggaaagagatgaagcatgagggggattatcaagttgcgttcccgaataagtgacgtatggctctagtagtacggacctcatcttctttcatttgccaaccctaagttcttctatttcagtctcagtacgagtctcagtttctgtttgaacgaccttcttttcctttgaagatgatgctgttggtttaacaggatcgatcgatcgagtcaccggatcgttcgatcgatcagtgtttaatgtttctgtttcgactaactgtgtaactggatcgatcgatcgcgtcgtgtctaggatttctacgtcatcgggcagaagtgttggatcgatcgatctggactctggatcgatcgatcgggtcgtgtctgtgacttctgcagagcttggatcgatctgtcgtgtatcaggatcgatcggtcctgtgtctgaatcgactagtcttgtatctagatcgaatggttgatcttcaagaggtgacaaagactccccatgtcgactagtagtcactggatttgtaatcatgtgatcatcttcactcgcaagagtacttgaagggtaagggaaagaatcttcgtgaaagataacatcacgggacacaaacgtcttctcagtttgcaagtccattactagccatcctttatttccaaatggatatccgaggaaaacacatcgagcactgcgatgttcaaacttatcattcgaacgtcgtactaactttgcatagcatagacatccaaacgtctttatgtcatcgtatgaaggagacttttgaacaaaacttcatatggtgtcttccctttgagtagaatcgatggcgttctattaatcaaatgagtggccgcttgaatgctttcaccccaaaaacgagttggtagttgagcttgaaataaaagcgctcgagcaacgtttagtatgtgtcgatgctttctttcaactctaccgttttgttgaggtgtatctacacatgaggtttggtgcgtgataccattttctgcaaaataggagcgcatacacatgaattccgtaccattatctgttcttatagtcttgaccttcttgtcaaaatttcgaagggcccaagccacaaagtttttaagtactgtggagaccgacgatttctcgagaagtaagtgtgtccaaacagctcgggagaaatcatctacaatagtgagaaaataaacctctccacaagtagcttttgttctgtaaggaccccaaacatcacaatgaattaaagaaaataaatcatcggctttatttgaattatcagaaaacgaaacacgagtttgttttgctctaaagcaaacatcacaacattcctccaaagcactagtactactactaaaagcaccaatttctgaaagaaaagtcaaaactctcggtgaagggtgacccattcttttatgccacaaagcccgagcatccactgtcccgacacgattcacttgaggaataaccgcatccgcaagatgataaaccccatcacgttcagtacccactccaatcaaagtcctcgaagcttggtcctgtatcacacaaaactttttagtaaaaatgacagtgcttgcaatgtcacgcaagagttgtgatacagatataagtgtaattgacaattctgaagcataaaacacgtgatgaagtatgagctttccaccaaggataagtgtgccatatcttgttgcccaagtgatcttgtcatttggcaatttgataggacatagatctattttctgaatttctgtcaagagattcatgtcaccggtcatgtgatgggatgctcctgaatcaataatcaaattataacgactgcgagttccatacaaaatcagcttttcgctcttaccagagaatccctctttacttgctccgttagactttttatttttctcaatgaactcagctagagagctcaattgactgtccgtgagttgtggagtgctagttgtcgttgaagctgtagttactgcacccgaaacatgtgaagcggacactggaccaccacgaccgcgtcctcttccccttgaagaaccacgacctcgaccagaattacctctccccgcagttgaagatgatggttcattccaccattcaggataaccaacgattttgtaacattggctcttttcgtgacctgttttcccgcagtgagagcaagtcgatgattgtgatttgaaagcacctgcagctgatgctgaaaacccaacagctcctcccttttcttgtggttcacgagtagcttgaatgtgtctttcttcttgaattatttgcgaataaacactctctaggttcagatcatggagacgagaaagaagatttgatcgtgttgtgccaaatctttgattatcaagccccatcaaaaattgatgaatatgaagcccatcttgtttcttcttatatttcttcatggaacaacaactagagttcccacaacagcaagtgaatcctttgtcgatgtctgcaatgtcatcccaaagaatcttcaatcgtccatagtattcttctacggtttgtccgtcttgtttacacccgttaagatcagcatggagttgatgttctctcgtgccgtcgctaacagagaaacgatttttgagactagcccacatctcagaaacgtcctccacaagtgaaatcgaagatcttagttttggttccacgctgctatagatccatcctataatcatcgagttcaccatgtcccatcgttctgcatcatctccttcaccatctggtcgcttaaggcttccgttgagaaaccctaccttacgcttggttcgcaaggaattcatcatcagtttggaccatctttcataatttgtaccattcaacaggattggcgtcaagacttgtcctgtattgtcaatagaattgaggtgatatggagacatcaaagctccttcaccacttggatttccaacgacacttttgccggagttcttgacgtcgtcacttccagtcattcttgattcacgatctgaaatttgtgtgagatttcaatattcaaagcaatcttcacaggccaaaagttggctctgataccatttcaagttaggttattgctctgaatatctgttgtatattgatgatagaagagaagatacatatatatgcgatacaaacgtttaacctaaaccaagtcattcttctattcttctttggacttcatataagcccattcatcgaagcccatctctaataaaagtggcaatgataagttccttattgatggcttccctcgcaatgaagaaaatcggatcgtattcgaaaatgttgtaagggtcatgttccttctcttgaactcattgtcaattgtcttctcgttgattcctattatagtctataatcaagtcctacttgtctcgttaaccttccttggtttaatactgtctggatcttgacaggctagaatcgagcctgcttttgttctattctttgattgtccagaagaagaactagaaagacgcattatgagcaggaaccaggttggtatttttacttggaaattgttgtctagttagggtccggtacctcttttactagtgtcgtttcttggttatgaagggaagagaagacgataatatagagaccataaagaagcgatttaaagtgtttgttgaatctaccctccctattattagctactaccagtctaaagggaaacttcgaaaggttaggatttggttctccacttctcttccatgatcattactatcatacactgttcctgattcttgtttctgattttttccagatcaatgctgcaaaatccagcgaagaggttttcgaggctgtcagagttctatttgcatctgaaacttgacaaggtgatgctcgtgatcatccaaacatacagttttctctctagtccttgtagatatgtaatgcattattgtttggtctttgtctttgtagcatcaaggacttggattcaccgaacagaacaaaacagagactccaaagtcaatgatgtgccttgtcgtatacgtaactaagtttacagattcatgcttatttgtatatgtaaatatctctacattttacatgttctcatcatacgatatagccaaactttcgtcgtaataaccatatttttagctaaaaacttatttagcttgacttctttaatcaagactcctagtccacgaagttacctcatcaatttattcacaaagacttgtagttatatgatcacgcgtctatggtttattacacacacacgtgacacgccacaagaagagtctctcgttcgttcttcaatcacttgttaatactttttgttggaggatgttgactcaatctgtgtatagagtttgcgaatatatcaccgtttctattttgattacctccgtcgccgtcttttctgaaagattcgccactttgatcgtcacaagtccatggcgtcgccaccgcacattcacgttccgtcggtggagagcggcggaaaacgatgattcgtctccacctttctgcgccgtgtgtctacaagaggcggaggaaggagagaagatgaggcgattgacgatttgccgtcactgtttccacgcggattgcatagatacatggctcagtgaaatgtccaagtgtccgttgtgtagagctcagattcctccgttaccgccggcaagtcctatgctcttactgttttttccggcgggtgtgattgatttattcagcaagaaagaatctcgacgcgtagctctctaacttcgaattctctctgtttcttaattctctgtttatttaccttaaagttaatgggccttcatgtgatatctgactgtttcacttatacaaaggcaggcccaagatcttatacgtaacgtaataatcagtgtgtgtgatatgtttatctgttatccacattaattgcatagactactaaatatatgcatttaagattacagtgtattcagatgtactatattcttaaattcataggataagtaatctatgcaatgaacgttgacaattcacagactttagcatttgaattgaggtggggtctttttctaatgtacttttttgcatttttccaaagttaagaaaaaggcaagttgatgacgcagctaaacatatatgaagaaaaaggaccgaaacagccaagaaactcacgtggaaatcactaacatatgtgtacatgacaagacataattcatacaaaatttaataatatttttgtttgtcaatttaacacatatatatcagatatttattttaagatgatgactcaactctgtgaaccgccttggttttttagtcatccactcatcctttcagttatttagtctagttttttttcttcggatattcttaagaaatatgtatctatttagattcaaaatatggtaaaatacattgattttctgtataataattgatactaataaagattaaagatgcttttattaagaaaatctttgttggtacttacttacttagatgaaataaataatcccataccctttttattaaggtcagcaacatcccgactcaattatgggccaaaagacatcgacttatataatcccatacccttttgtactctgtttatcgttataagaagacaaaaacaaaagcaaaaaaaaagggacatcgacttaaataatcacatactacaatttttttttttttatatcgaccttaatttccaacgtgcttcttcactctgatgttgtggcagaccgtacacgtatattcttatactttaatctagttatcttgtggaatgacgacccttaaagcacaaaaagaaaagaaaagaatatgattcttagaaagtcaaactattttattaaggaattaactttgatttaattactagacgtcgacgatgactattggagtatcatcactttgatcaaacgtaaaaaaaatactacagtttttttttgtcggcattgaaattagcaatttaaggcaaaattatggcaagtagaactataagaacaaaaaatcaatgaaaaaagagaactaatcacgtaataagtagataagaaacaatactattactataggtttttgtctttcgggtcatctagctagtttggtggttctgtaccacttttcctttcaactttctcaaaggagttcgaaccctaactgggttttatggtgacttactgactttgatgatgatttgagaccatacggccagatcaactttgtcagatactatttattggtttatacagtactcgaagatacgatgtaatatcggagtcgagtaaatatggtcccagcgacctacaattcagttgaaaaggacaggatacaatagaatcaaatcgggattggaatctctcccacgtcccactcactcttttccaaaagagtcgagcctaactttcatataaggaagtcgttttctacgaacctcacacgttcatccttaattacgctaaacaacagaactctcagtactaccaagtctaatcaaagttctacgaagaaacatatgtatttagttcaacgattttattatttttgattatttcgtatatactcttcgtcaatacgataatttacacgtgagcttattatatttgtaattactgtgtgtgtgtttttacttccgtgagttactataaacaaataaatccaagtcagcgattagtcgattacgtacggtagtcacatttccataaaaatcaagttagtctagacataaactatttaactattaatgaaaagccggatcatctaaggttttaatcacgaagtgaaagaacatacgacttgcattgcattcccttgcataaggcagggaaatcaagagctttcggcgttccaatattaatgtttttgaaggaccacatgattaacagtaattacattgacatttgtccacgtttaataagagtgaccagtgaccgcatcattattattcaggtcctaacttctgcaagtctcttttattgcttcatttttcaataattttggacctgagctcatcatcatgtgattttctccattttaaaactagatcccaaatatatttgtctcaaatcaatttcacaggtttaaattaataatattcttatgctcgttcgttcgttatgatagtagtacgtaattattaaaaataagtagtgttagtgtgaatatcgtcactcactcaatatatatcatgcatgttgttgtcttgttgataattatttttttactttcagattatacaaaattaatttgaaaagtttgaatactttaaaacaagaaagtaattctgaaaagacattcgttttagatatatacgtatttctaaattatatttttggtcggcctaacgtatatttaagagaattcaatttgttgttctccaatgtccctaaacttatccatcatattcaatagagggtttttgttttgttttgtagctggcatcacttttctctataaactcaaaacttgtctcacactctctccggctcctgcaactccatctgaaaacagaacaggaacttgatcgtctccaatcatctctagtgcttctcacttacactctcggtacgaagacacgtgtcttctcaaaccaagaaagaagctatgttcaagccctttggtttcgcaggtaaagttgttactctttcactcggaaaaatgatatttttttcgttttacctgattgtgtttgctttgatatgagcagcagaaacgggttttcgtctcctaacaacgcaatggttgcagctaggaaactcactttgcttgaaggaacgtataagcatcgctatgcaagtgactttcctcgctttctttcttattcatttggcacttaaatggtttggtgtagtaagaaacagaggatctaatgatgtagaagaagacttgaagaagcagagcataactgtgaagcagagcttatcttacaacatatctcttctctgctctgtttctgtcttagggactcattgctttatcttgcttttgctgtttcgagacagcgtggtgtcacggtgtgattcctctgtttctgtcttcgctgaggtttcgcagtctttctcgtggctgattgtttctgttgttgtgatgaagatcagagagaagaggcttgttaagtttccttggatgttaaggtcatggtggctctgtcgtttcatcttatcctttgcctttgatgctcatttcattaccgcgaaacacgagcctctcgggtttcaagattatgccgacttgactggtcttcttgcatccttgttcttgttggctgtttcaatcagaggcaaaaccggttttggtcttcttaaaatccagcggaatcacagagccactactacttggtgaccaaacagagcagaacaagatagattcttattcttcttcttcttctccatatgggaacgctactctcttccaacgcatcactttctcatggatcaaccctttgttctccctcggatacaagagacctcttgaaaaagatgatgtaccagatatcgatgtgaaagactctgctcaattttgctctcatgcctttgaccagaaactgaaaaccaccaagaaaaagaagaacctggaaatgtttcttctataactcggttcttcgctatgtctggaggaaagccgcgatcaacgcggtattcgcagttgtaaacgctagcacagcttacatcggaccatatctcatcaatgactttgtagagtttctaagtgagaaacaatcccagagcttaaactaacaagttaagaatgctctgtatattattgtgtgttctcaaggtatcgatacaaccctatatatatattctatacaagtcggtctaagatcattcatctatagaaagatagatacgagagaatatcttctacttattctccaagtaagtctaatggatatcttctacttattctccaagtaagtctaattgcaagagtagtccttcatatcttcgtaatatcgtaatataaaccatggttaccttcttgcactcgggtttctaactgcgaaaatcgttgagacagttactcaaagacaatggatctttggagctcgtcagctaggactacgtcttcgagcagctttgatatcgcatatataccagaaaggtttacttttattaagtcaatctcggcaaagccacacgagcggagagatcatcaactacatgagcgtagatgttcagagaatcactgacttcatttggtatgtaaacagcatatggatgttacctatacagattttctcagcgatttatatcttgcaaaaacatctgggacttggagctttagctgcattggtcacaactttaatggtgatggcttgcaactacccattgacaaggcttcagagaaactaccaatcagatatcatgaatgccaaagatgatagaatgaaagcaacttcagagattcttaaaaacatgaagattctgaagcttcaagcatgggataaccagtttctcaacaaggttaaaacattaagaaagaaagagtatgattgtttatggaagtctttgaggttacaagatttcacaactttcatactttggggagctccttcattgatctctgtggtgacttttgttacttgtatgttaatgggagtgaagctaacagctggagcagtcttatctgctcttgcaacgtttcaaatgttacaaagtccgattttcggtttacctgatctcctctcagcgcttgttcagagcaaggtttctgcagatagaatagcttcttacttgcaacaaagcgagactcagaaagatgcagttgagtattgctcaaatgatcatacagaatttagtgttgaaatagaaaatggagcatttagttgggaacctgagtcaagcagaccaactcttgatgacatcgaactgaaagtaaaaagcggaatgaaagtggcgatctgcggagctgtaggatcaggaaaatcaagcttaccctcttcaatcttaggggagattcagaagctgaagggaacagtcagagtcagtggtaaacaagcttatgttccacaatcaccatggatactaagcgggactataagagataacattttgtttggaagcatttatgaaagcgaaaagtatgagagaactgttaaagcatgtgctttgataaaggactttgagcttttctcgaatggagacttgacagagattggagagagagggataaacatgagtggaggtcagaagcaaaggatacagattgctcgagcggtatatcagaacgctgatatatatctacttgatgatccttttagcgccgttgatgctcatacaggaagagaactctttgaagtataataatgttcatgaaaatttgtaatctttgatcctttctctcttaaaactccacaatagacaatgttttgtttttacttgttttgcaggattgcttaatggggatactgaaagacaaaactgtactttacgttacccatcaagtcgagtttcttccagcagcagatctaatcctggtaagagaaacagccgctgataataagcaaatgcaaaagaagctgttagtttttccattaacattagtgtgtgtactttgtatactaggtgatgcaaaacggaagagtgatgcaagcaggaaagtttgaagagcttctaaagcaaaacataggttttgaagttcttgtgggagctcataacgaagcgctagactcaattctatcaattgaaaagtcaagcagaaacttcaaagaggaatgaaaagatgacaccacatcaattgcagagagtctccagactcagtgtgactcagagcataacatttcaacagagaataaaaagaaagaagcaaagctagtgcaagatgaagaaacagagaaaggagtaattggcaaagaagtttacttgacatatttaacaacggtaaaaggcggattgcttgtgccattcataatattggctcagtcttgcttccaaatgctacagattgctagcaattactggatggcatggactgctcctccaactgctgaatccataccaaagttaggaatgggtcggattttacttgtttatgcacttcttgctgcaggaagttcactttgtgttttagcacggactattctagtcgcgataggtggactttcaacagcagagacgttcttctcaaggatgctctgcagcattttcagagctccaatgtcatatttcgattcaactccaacaggaagaatcttgaacagggtgaagtaccagaatcaatttaacaaaaaacatggttttgttttttataatcaagactgaaaatacctttggttttttcatgttttgtaataggcatccacagatcaaagtgtcctggatttggaaatggcagtcaaactaggttggtgtgctttctcgatcattcagattgttggaaccatcttcgtcatgtcgcaagttgcttggcaagtgtgtgtcatcttcattccagtagcagtagcctgcgtgttttaccaggcaagagagaaaaaaaatccaaattcttgacaatgatacaacaaatcttgcttacttttttgtttactcgtgttttctttagagatattacacaccaacagagagagaactgtcacgcatgtcaggagtagaaagagctccaatcctccaccatttcgctgaatcgcttgctggtgcaacaacaatacgtgcttttgatcaacgagatcgcttcattagctcaaaccttgttctaatagatagccactcaaggccatggttccatgttgcatcagcaatggagtggctttccttcaggttgaatttgctgtctcattttgtctttgctttttccttggtgttacttgtgactctccctgaaggtgtcatcaatccaagtaagtctcatacatcataaaccagaaaatacattgtctaatgggatcagaaatcaaacttcattttcacttttccttacaggtattgctggtcttggggtcacatatggcttaagtctgaatgttctacaagccacagtgatatggaatatatgcaatgcagaaaacaagatgatttctgtagaaagaattcttcagcactctaagatccccagtgaagcacctctagtaattgatgatcagagacctcttgataactggccaaatgtaggatcaatcgtcttcagagacctacaggtaaataacaaagtagatgttaatacattcagaaacaagttgtaatcaagattctcaatcctgagatttctttgttccaggtccgttatgcagaacatttcccagctgtcttgaagaacatcacttgtgcgtttccaggaggaaaaaagattggagtagtaggaagaacaggaagcggcaaatcaactttaattcaggcattgtttaggattgtagagccaagtcatggaaccatagttattgataatgtggatataaccaagataggtctacatgacctgagatcaaggcttgggattattcctcaagataatgcactatttgatggaacaatcagattgaatctagatcctctagctcagtatactgatcgcgaaatatgggaggttagaaacctgcaaaattttctctgtagttcttgtttgatttactttgacaaatactccaatacaatgtaatacttaggctcttgataaatgtcaactgggagatgttattcgtgcaaaggatgagaagctggatgctacaggtcagtttgctttctgaaatcattatgatgaaaaagtgttttgatttaatgtactttggacaatgaaaactaagattcttgaatctatgtaacagtggttgaaaatggagaaaattggagcgtaggacaaagacagttagtctgtcttgggagggtgttgttgaagaaaagcaacattctggtgcttgatgaagccactgcttcagttgattctgcaactgatggtgtaatacaaaagatcatcaatcaagagtttaaagatcggacagtggtgactattgcacacagaatccacacagtgatagagagtgatcttgttctggttctgagtgatggtaagaccaatatacatgtgttttcatatacattcacacacataattatgaggtctaagtcacttttctacgagcaggacgaatcgcagagtttgattcacctgcaaaactgctacagagagaagattctttcttctccaaactcataaaagagtattcgctgagatctaatcactttgccggctcgaatgatcttctcagctaaataccactaaaagatggatgatcttttgcagagaaaacgaaatatcaattccacagttaagcttaagttgaaagtctaactagttatttagtactacataagttgaacatagaaatggagagagcaccatggttagaagcatggtgcatcgaagaaaattcagttcaacattttaatcagtacttgtgttttaggttctatactgagttttcagtgtgttcttggagaactatccatgtaaaccaatggaataaagcaggaatctatatcttctatttttcagataaagctcaatcaaattaaagctgtgtaacaaggtggtaatcctgtaaatttcgaattttttgcaaaagttttacaaatagagtgaaatatatcatttacagtagacaagaagaccatgttggtgtttcaactataaagatcgaggcaagttgttcgaagtttgttctacagtattccagaggtgttgagtttcttacgatgtaactccataaggaagcaatgcagcagctacgatcctgccttcctcattcagtatgttgtaagttgatgcagcatttctgtggatagatcagagcgttaatcaataagcacagacaaatactccaaaccaacagaacaaatacttgaatagaacaaaggacatacagaatcaacagtttctagcttcatgccgattgactttacgaactgacggacttggggattcagtgggtggttgtatcttccacacccgacaatcaagagctctagagattgttgtgaaaaaaaaacacagaaaaaggagagtcaaaaaccactgatgatacacttcaatatgtgcaaaaggtttttactttttagccactaaaaatatggcgtaagcaaacgtatcatatagtttctaacgatcctggaacaaagactattgtataaggaatgtggaataaatcaacttacaaaatgctaaaatgtatagaacctggaattggtcgaactgtctggaagattgacaagctgcatccatgaattagacatgtaaattgtttagcaatgacacattaacttcaaatatttcagaaaacaagtagaaagagtccagaacattagatttttggtcctttttttggaaccgatatccgaattttcgggtaaatacccatattttcgggtaaaatttcgggtttcggataaaatttaaattttcgaataaaatattcgggtattttcgggttcaggttcgggttcggtttttcgggtagaggaatttaggatctaatagggtaaatcttcgggttcgggttcggtttcggatctaatttttcgggtcagttccggttcgggtaatcgtttccggtttttttgcccagcctcaaatgcgcataagaacgtttgacttcgtactagtgtaatcccatcgtattatacatctcgaatcaaagaagtcgttggcgatcctctgatagcgagaatcgaagtagcgtcggctatcgatgtagagacccagaattgagaaaaacccaaccatggatttgttaacaatgacattctcatatccagatcgccatgtcctacgctgccagacaaacctatcaccaaaaacctatcactgacgctgccatacgaaaccatttcgaatgagaaagggccaagcaagagaaactgaagatttggtgatactcgcacatacaatcgcgtctccgattgagattttatatggaaaactaaaaactataaaggaaaagaaaacagaagagaagaaagagaagtacggccgacgtcggagtcgacgccggccggagtaattatcgaaaaactgtttctctgtaaaaggtcgccttctgtgtttgttaagagtcttcttattcttatgcagctaaacttgtctagcaacattgcatatgtcagctaatcttaaaatttgaaccttaatttaatagtttccaaacacatgacatgagacgttgtagcaatttattggtttatgaatgcccgtggatatcataaagagcactaattttgtagtagaactagaatttattccacggtacatcgcataacaattctttattttctattttgcatctacatgttatatttttagtttataaattaattattaaactacagatgatttcagtttgtagtgtttttttagaataaagtcaagggattacatgaacataattgacgtagttgttgtttgttgtatgcccaaataattgttatgtttagaagactaatggtaggtgtcaattgtttggtttggagggtgaatctatacaccatgtcttgcttgctctgttgctagacaagtttgagccatgtctgactttcctgttcctgagtgtggttttgaagataggtctccttttttcaatatctatcatctcttgataatagagataacttgagatggcctaaggaatttagaatgagttttccatggatcatttggaggatatggaaaaagtagaaacaccttcttctttgaagataggtgtttctctgcttttgattctgtgaagaaaatcagatgtgatgttgaagattggtttgccctcaagttgttgaagaagaaagaattttaattggatagcagaatggtgtggaggataggcctatttaggatccttgtttgagtgtggttttggactcctccgaggtatgattgggttaaatgtaagtaacattggcctctcttggtcgaggaggaattttttagcaggtgtggcttgggtttgcgagatgagaatgggcttgttcttgttgatcgatagttgagtttgtaatgtattaagttagttattaattaagagtcgtgacgtttaagttatgttgtgttgtccaaaagtcacaagtagaagagatgcaactctttgctataatgtaaacacacaagtttccgattcaataaaagtcagtttcctgttactcttttgctctgttcgattgtgtttctcataagaaacagaacaacaagtaaaacacttgttgtgttctttgagacaacaagaagcctttgcttttaacagttctcttgcatcgtaggcgactaggcgtgcttcaacaatatcagaacaaggttagaggttcaacatctcagtattgtgtggggtgcggaaagtatggtcagtcacaaagttaacagagtcatatttgcagtggaggaagatttttttggtcagagttactaagagaccgcaggagtgggaatgcggatatcttgttggctttgggtcttatggaggaatgtgatttgattgtagaaggtaacacagcgaatagaggagcttctctcattgctctatggagggttcaatcctatgtagctttgggatttccttcgtggttttattttggcgttttgggagcaatttttgtatatcccctggaaagtttttgttgtacaaggttgatctttagtgattactggttatgctttgaaggcttatgggcctgattcttttggtggctttactcaagtcatatgtaaccgttacccccacaacgatcagctagaggtaatagaagtcctccaactgaccaaataaatatttcaggtcttatgaagccatgctcttttctatgtagtggtggcaaacttcaacctctatccaaccttcacatctttctagagttaatgatataagtaaaatccatatgggcattatgctgttgtgttagcaaaagaagctacaatcaaggattcctcttttactatctcttggattttctagatgtatgttctgtaaacgtttatgtcttcatctagtggataaattggccgaccaataaaaacaaacaaaaatctattattgtctgataaaaaatatattaaaaagggacattaaataaagatcaccaagtgacgaggaatggtcaaaagagatgggagacctcctttagagttgcatcgatcatcttgttggaggtttttatagcatcatgtattctcccagccttcacataagcatcgatcattgttttataagtgttaacatcaatatatccaaaatcatcagcaagtgaatcaacaaaaacagactctgcttctgacaacatcctgttttcgcaaaaccttgtaataatgtatttgtcactgaggtagtcgttcttgggtctcgcctttttgtaggtctccatagcctcactaaaccaacccatatcaaagcactcgtccaccattatcttaatggtatcagagtccaagcaacccttaccggttccatttttatctaagagttcatggtacaatgcccaagcattttttttttcaccgtatttgagcaggactttcaaaagggcgttacccgtttcggcacaaaccagtaacctgtttgatagaacacagcggttgtaacactccatagcttccacctgtttaccttgcttaaaccagtactccatgaatgtggccatcaggaatgcgactctgttttcatagtttgaatggtgcaaatcatctttggtctcggatagggcaatcaaaaacaagcgtttgaattcgcccaagactagattcgcctttttaaaatttccaagatccaaaaacccgcgaatcagattgttgtacgccacgtgatctgggtaggtggttcgattgactgtcctgcctctaagaaaggcttcggcttggtccaaccgaccggagtggactaaccctttagtcaagatcctgaaagaatcgtcgcttgggtagtcgtggacctgaccggaattgatgcatcggtggtggaaatgcagagcatcgttgacaagaccttgttggaaaccagattcgatgatgtagttccagcaatggctgttgggtctgaggttatgctgattgaagaagaactcgtagagatcataagcgtccttgagccttttatcccgtaacatgcctccgatgatggattgacatattgttgttgttgactccgatttgatgctggtgaaaacagccaaacgagcgtacttcgccgccgtgtcgagatccccaacgcatctgatcaagtacgagaccctcaagcatagatcagaagggcggcaatctgggtttgacattatgtcttccgatcttcttggcacggcggtgcagaagcgccgaccaagattgaggcggccgatcagagacattattattgcaggccagcaagacgaggactggctgtacagaaaaatggaaaataaattattaaaactcagactaagtgagacgaatagaatgaaaaataaataaaacgacggctagggttttggacaagagagacacgtatcttcttagagaatatctttttttttttctttctaattcttagagaatatctaaacatgaaaatattaaataaaaaaatacggcagacgatgagaaccatgagattctcctcattatttatatgaattatattaaatataaatttatattttgtgttgctaaattcttcttttagactctcctcaaagtcttaggttgttcagcaactcgaaaaaggtatacgtaattactcagttgatgtccgaatctattcacacaaaaagaaaggaaatcttttttttttttttgatataaatgtaaatatcattagaaatgaaaagtttaggatctacgtagataaaacctatggcttttgagaccttgccaaaaaagaataaaaaacaaggcaacaaacagattgacatcaaaagaaagaagtcaccgaatccaaagaaacattaagtttcgaaaatgctttctatgacgtctagcagaaatagagttgcgaacttccttgtcgatcaacttgaaggtggactgaaatggcaggagaaggttgttgtggagagaattgttgcgctgcttccaaatgtgaaacactgtggcctgaggaaccagcttcctcaaaagagacaacgcctgagaaaggaaatcttcgttccgttttttttttggaaagaaaaattttatttccggctaaacttttattttaactaatattttagtatcataaaaatttggttacaaagttgctaattcgcatatgtccgatatatatacatatgttacgtaaaatatgagatatcatcatatgtcaaatttaaatttattaatatattttaaaataaaagtagaacatttttaacaaatcttaaaaacaaaatatatacataaataaaacaaaattttatatatcttataaaaagtaattctttaaaacattctcaatatatttagaaagataaaaaaaaattatcctaccaaaaaggaaaataatcttttattaatcttactatataaattttgaacatttgttttcctttaaatttggacagatatgagatggaacaaaaagatcgagataggaatttccaaaaaaataacttgttacaactgaaataaaacaacgcttgcaatcatacatttaaggatgtttctttcaacttatctgcataatcatctaccaaatagaaaaagattagagaaacaaagtccaatttagatgaaccaaacataaagtaatagaaataaataagtcaattagtctctttttataattagtgtaatattgttttaaagtttttgaaaacaggccgattcggttcatgcactaaaagtttttggcggttttatatttggtttgatagttaacgaatttaatagaaatctaaccaaccatggttcacggtcaatccaaatatgacagccggattggtccgagtttaatgatatactctctctgttctataaaaatagattttttagaaaaaaatttgtctcactaaaatagaagttttgtatttccaatgtaaaatttaaaacctactttattcttattaaacaattgagtaatatactctttaaagtatattaagagattaaaattattattatataatatttttataaaaaaatatgaaatctttaaaatatccatcttcgttaaaatatgaaaccattattatttttaacattcaattaaaaccaaaccgaatattagacttaaacagagatgagtacggttataagtgaaactaggattaaacccgcggtttcccgcgggcgaaggcttttatagattttttattaaataaattagtgtgtgttatattaaaaaatagtaacatatatttagttttttttaaaactggtataaataatgattggaatcttttattagtatggagtctatttactgattagaatcatgtattttattgtgtttaaagttgtgtatcaattactaaatgtgtatttgatataagtaaaatggtgacaaaaatgtaatataatgatagatggtgtaattattttgttgattataagatctttaaaaaccaaagttggtatgttttatcttttattttttggcaaaacaaagacaataacatttatgaggagaccttttttctaaatcatacagaatatatatactaaagagtattttgaagctgtattaatgatcccattacccaaattatatgatacaataaaagaatatacccccaaaagaaaacaatgcaaagtaaatcatcttaacacctaattcttctttctaaagattgattagattcactattcatgtttttcatctcttcattgtcttgtccgtagcagccgatcaccaatcgttctcaactcgaacgttctcacagcaaggccaacatcacggattgtagtgtctagcacataaggagtgcgtgctcgcggcgctgagagatcgaaccatggtaatggaagtaacggattttgctctcagccttgtgctatgtcttcccttgtagattctgagacatgtgtacgcctatcgcgaatacattctccggctggaccgcgtatttccgatcccgtcttggaaccttcttgacgtctctatatgccagtttctcaattccccattttctgaaacacaaaaccaaaataccatttagattagtccctgaactaaaccaaatcaataaccgatatgttccctcctaaaaacagaaaatatacaaaccaattacaattcaatatttggtacaaacaaaagaaataatctttacaacatttctcactaatatcatgtgatattcaataaaagcaaagatcgtgaccgacataggagactaatacagaatgcacaaagacttttacaagccaagtgttgacagaatcagatgcttattgatattatatgtcaccttcaaaaaacttgtgactaatattctaagtcactcaataaacaacacatgggctttggttaacgttcaatcattaaaatcaacaaagttatgaatgttacctgtaagttctggccgggccatcaccggaataacaaacccgactactcataggcatcagttcaatagtaaactgaaaatattcctccaaagattccatcacagacgaaatcgtctctttcaccggaacatgtaaaaactcatcaacatcaaagaagaacatccacttcgtcatgaatacctatgcaaacaatcattcactatcatgaattgattatgataataaccatcgaatcgttcttgatctcaatttggtttgtgatgagaatgactttgatatttatagtgatgaaggaggctagggttgttggatctaatattttcaaaaatattcgaaaatattttgcaggataagttgcaaatcaaagattggatcctcactaatgattcgaatttggtttagttcataatgattggctatatttagataagtggtaaataatgtttagttgattatggttagttttagatttaagagaataaatttataagatttttttctaatttatggaatgtattatcgtgttatggtagttagaagaatcgaataagctcgtctatgccgattttatagtgattagtgaggagggtgaatatatgattgaagattcttaaaatcgtaattaaatatgcagactattttgatggaatatgcgtgtattagatactaaaaattgttgagatatacaactaatcgtgttatggctaagattgcattacttgatggtaacccattatgtagttttacatgtgatcaaaagcccattaaacataactcacccgtctatgtaaaacgcggatcctgtttaatttagttatttggtttggacgattttacccttgataaagaagaacaaaattcaaaattgaaatcaaaattgaggctaaattagacaaaaattcaatttgtacttctcttttaataataagaggataccaaatcaaatgtttacaaacataactccacacgattgggatagaaattacaggtattacgggcaggatccaaaattttggatagctaagttcaatccttaaactctcactaatttgcgtaaagatcaattttgggacgattaattgtttattttgggaaattcagatatatcttaaaacgtaatgtgaaatatttaaaaaaatagaaagaaaatatggataatttccactaattttggagaaattgaatacaaaaaataaaaaatacaggaaatacctaaattaaaatataggctcagagcttttctgacccaaactcaaacatatacgggtattacgggtttcgggtcggaccgggatagctcgattgacatgcctactcttgtttcaatgaatcaagagttataaggagttctttgatgtcgagtatcgatagatctcgaaacaaagaattcaaagacttcaaagttttgagaagaaatctccatcatgtctgaaaacaactatgtcgacgactcggagatcgtggcttgttgcgaacttttgccagccttgggttagtctttgaccctccatcttcacttgccagcttatatcagaaacatccgatctcagcttcaccactgcattgaccttatttttgttccatctatgtactctgagattttcttgatggcttcgacctgtttttacaggttacatgaggatcgttgcataggtttaaagtaatgataatgttaaaaacttttgttcttaccagctcgcctagaaactcagattctacaaaatcaaccagcttaacatcattgttcttcacaccaacctttaggatcaaacacatgagagagttatctaatcatccttttcctgtcaaagtgtgctctatgatactgaaatctccgagtttaaaggcttagcattattacttcttttaatgatgaaataattgataaaaagataaggtccttacactttgtaacttcagaagcttttcattaataagtttctccaaagtcagtgcaagctccatcgctgattcatggaagagtcagaattatcaagagcttaatactattagaaagacgatagtggtataatatatgaagcttactaagatctatattactctcaagattatcaaactgccgctacaaaaaagagatgagcttgaatttacataccaaacaatgcatctgatactccataaacttctcagcataacctcgttcttcaagacttgaatcgttaaagaacctattagcgttaaaccctcaacaataacaaaaagatgatccaccagctgaagagacacaaatacggttttcctttagactaaagaaactgacttggtgaaacctttcaagccgacattgtctctctcgatgtaggcatctagggcatggtagacataggagacattgtactccacgctaagattcacaaaaagcaaataagaaaatgaatgttaagattcagacacatcgtcacgtgttaacttagctaactcgattcccacaagcaaaatcattgaaagcaagaaatgacaattgcgattccgaccagccccaccatgataagtgaatcgtagctgaatcagtagaaaagtacccataaatcaattatgaaagagattaccgaacaaacaaaaataaatcaaatgagacgattatgatggtgtaaaataaataaaaatccagcttgccccatgaaccatctttagcacaggcttgaacacaaagcggactcctttcacgtctgattctaccaccagttctgctatgtaataggatggtacgtgagcgactccgagaaacactgtttcgcttctcggcttctctagaaccttcctcggtcttagatcagtagactttacattctccgcatacacattgtaccttgggaatgcagaatcttcaaggtctttctgtctccattctagcttaaccctgaggctcttggaaccagaataaccgggtacaagctccatgttatgagcttcaatgaccaacggtgatgccggaagtaaagtctcgggtttctgctggtactgaacatgatcttaagtgtccgagcaatgcaacatattctgttctctttgtcaaattctctggtctgtagcaaaatgcagagatttcagtaagtctgtgaccatccaggacaaggcttgtctcctgtactgtccactcggatacagtctgcgctgacgtggcgagacactgtaagaacatgttgttgaatctacagatggattcttgtcgtgaaacgagaatggatttcgtctcgtgtgatggagatgagaaagaaagcaggattccatgtttagaggtttcatctgatgtcacctgcaccagttccaaaatcctccatgagtaaaaacagcaagatctcatattgtggtgtatccagaagcagagacttacagagaaagaaattgtgatgggggaagatgaaagatgaagatgggatttgaagagccttgttgtgaaatacgcatctccctcgagttttcctctaaaagtgatgtagtctcctccgttaaaagatgcctctcgagtactatcagactcatagtacttattgtttaaatgtttgctcagaaatgtcgaaaacatttttccctttttggctttgccgaaataaatatgatgatagtattagggccagaactcactcaagagtggcctgaatgacatccttgttgtcttcattgagttctaggagaggctaatgtgaagcatataacaaagacggagatcagatgagaggagagagacccccagatcaagaagatcaactgtcatgttgtggcaggaaatggggttcatgtaaacattagatgtgtgcagtaaaatcaaagacagtaagatggttgaacctgaagactttggcagaaatgttgtaccatggggcatctgtgaagaataaaactaaaagcaacaatctgactgttggagaccttggagtgaaacatggtaaccaaagccctgaacaaaagagagaagagaatttcagaacataagtgaacataatcataaccaagaaaatcaatgcatgatttaccgtggtgttagtgttacaagataagaacaaagacttgatcaatctcaccttacctgattgaaatccgagtaaaaagggaagacttgtggatagtttggactattccacatgacttctcgacaagtgaccaccatctgaagagaaaacacatgaatgataataagatccagcgtcacctttacaacaattaggaaagaaaaaaattggagctcaaacacagtaatggtagcttaaaatttatagatggcaaggaaattgcaaataatttaaagcattacttattctgagccgaattaaaattgggttgttgtgcagtctcatatacccatccaggagcaaacatggcagctgacacattgtttctcttcagcaaatagagcagcatttacctagcatgtaaaaagcagcggacaaggaagaaaatactaatgtacatattattggttttcactgtgtcaccaacaaagatgcaaaatcagagattttatcaggcatacagtccattgcccaccaccaatgacactgttatacttggagaaagtaatcagatcgaagtggattgcaaaacggacaacaaaaaacttctgagcaacccatcatataactaaagccccaggtgcagataaatacaagacttttgttagatggtttaggaattacttcaaattcggaatctgttcttcatctcgatgattatctgcaagtggccgtcaatatattagagaagcctttcttcacaccacttgagtagtgtgtttcaaatacagatatatactagcaagaaaaacccaccagccacccatcaaagcctagagaagtagcaagttctgccaaacgcactgcatacatctgagcagactcccttgtggcaagcatctctttgcaggtagcttttacttcatcccattctgtgatgaaagtccccaataccttcaagtttccataaacacttctgcgcataaaaatcctcagcaatacacaaatcgcgattcatctctctgagcacagacaatcaaattttccaattttatcatcctaatcagcaaattcatagatatctcaaccaaaatcgaaacgttggatgttgaaaaattcaaaagttttgagcatacttactttaacgccatcatccctatgagcagtattggtccagcagaaggaggaagagtggccagagaaggagagaagtaaacaaaaatgtccatccgaaacgattcgcaaatccggcgtcgttttcacacccttatatatatccacttgtcctcttcatcctcctttcatatcgtggcggactaaatcccttgggcgattcggtaagtcatcggagtgtcgccggagaggaacggtggagagattaaactggaagtgaaaaggaatcgaagtaataacgaaatttcaggtctcgaagagctttgatcgggaaatatataggtaacgacggattggcaagattgagcaacgaaattgttccaaacgagaattgaatcaaaagaaaacgaattgaccttaagtcaactaccaccaccatggctactagtagtaactaatcagcaatatgtttttttttcactgaagtccaaattttcatttttttaatcccaaatacagtactaattttttttatttttttttgtcatctggtcattctattaataaaggcctaaaagagtgtttaaatcataagccagccttgcaacatcgcataggctacttcagccaccaaattagacaaaggtaggtctaaaacagagaattaaggatacataaaaagaggcataaaaagggggaaaaaaaaagtaaacgtttttcaccgactcatcgtattacaagcgccgtcgcacacacacacttactcgccgccgtcatctacgggcacgatttcatctctttctcccgtcgatctcggaagtatgcgatgtgttcaaagggaattgggtcatagacttgtcaacgcgtccgttgtaccgagaatctgagtgcccgtacattcatccgcagctcccttgccgcacgcatggtcatccagatagtgattatcagtcctggagatggcaacctgagtcctgctcacttacttcgttagtctctctttctctctcagtctcgattttgaatgccattaggttgtttcggtgattgatcttcagatcggtttgctctgtcgttgttggaaagcttaagagggaagaagatgatgtttgttggaacagaggaaatgtatctttctctgatctgtcttcttcattcacaaatcccagaaaattataaatccatggattacctttggatcactcaccgtcttctctctcaaggtaattggatcccatctgttcagccctttttttgtttgttcagatctagaaatccttgtggtccatgaaatacaaatacagatatgagtttgagaatgataaagactaaggttggatttgaaaattgcttgctaggattcttatagaagcttctggtatgtctatgtaggattacaatgcaatgattgagttctattgggcaccgtttcttcttgaatcgaattcagataacgctatagttgatatagtatctgatcgaattatgaggaaaggcttgatcaacaaacacggtaagcattggcgaggcgctgatatagtcgtgttcaacatatacttgtggtggaggactagctagcttcagaatgaagatcttgtatgtaccaatcatgaaatctaaactcttttcaatatttctagtgataggttctcaaatctttttttgtatacccccaatactttcgatttgatagttttttcaatttgtgttatttgaagggaaagttctttcaaggatgggaacaagagaatcgttgagatggagagcgaagatgcatatctgatgaccatgggtaaatgggtgaagaagagtatggatcctttgaggacaaaagttttcttttctaccatgtctcctactcactacaagtcagtaactattccatcttttctgtgatttaagtcatccgtaaacaggttcttcaaattcaaatctaggaactgaacagggaggagatggcttagaataatatagtccggatttggtattaaatgaaatgagtaatggggtttagaaggatccggtttatctttaatagttcaagtaaatgtggccttgacatgatccacaagtagaaaccagaataagatttagctcgtaacagagccctagaatacagaggtttcatcttttctacctccgtgaccaggatcgaggattggggaggcgaacaaggaaagaatttttacaatcaaacgacaccgatccaagacatgaaccattggccatcagactgcagcaaaaccttaatgaaagtgataggagaggaattagaccaaagagcagattttctggtgacggtacttaacattacacaactcacgagctatcggaaagacgcgcacacatcaatctacaagaagccatggagcccatatgacgaaggatcagctagcaaatccggttagctactcagtaggctgtatacattggtgcttgcctggtcttcaaaatacttggaacgagcttttctttgctaaggccctgtttgtttcattatttaccattttcattcaaatgttccatttacatgatttttgaatgatgcatttgaatgatgtttgtattttttgtttgatcatttggtatttaatctgaatgatgcatttaaatggatctttatttgtttgatcgttttgtagttcatccacattctcatttaaatggaaaatttaattttgctgttttggcgggaaaatatgatttttggtttttgtaaaaatactgggatttttcggttttggcgggaaaatttgcttttgcggttttggcctgttaaaataattttattgttttggcggaaaaatataattttgtagctttgacgggaaaacttgattttgcagttttgacgaaaaaaatactgtatgttttttagtggaaaacatgattttacggttttggcgggaaaacttgattttgcggttttggcgggaaaagcattttaagtttttggcggaaaaacatgatttaatggttttggcgggaaaacatgattttacgggttttggtgggaaagcatgattttacgattttggcgggaaacatgattttacgggttttggcggaaaaacatgattttatggttttggcgggaaaatatgattttatggttttgccgggaatatatgattttacggttttggaggaaaaatatgattttgtaggaaaaacatgattttacggttttggcgggaaaacatgattttgcggttttggcggaaaaacatgattttgcggttttggcggaaaaacatgattttgcagttttggcgggaaataatgaatataattttgacgttaaataatagtccgtgatttcacaatttttagataattgctatgaatgtcgtttcaacactacccgttttcaatcattggcaaaaaaaaaaaattggcgggaaaatttgaatttctaattacaagttctcattagacgagggtaatttggtcgttttgctcaagagaaagggtatttgaaaaaatggacaacaggaaagggtattgttgcaaaatgtaatagaaaaattgtacttttgcaaatctcccatttatttttgatgcaatatgtaatttaaaaaaaaatattaaattaaaaatttgtagaaagttagtattattaaaagggtatatttgtcatttgttctttttgacaaaatcatctccatctaaatggtccaatcaagtccatccaaatgagttttaaaaatttgtttaaacttacaaagtcatttagatggatcatctaagtgattcatccaaatggtctgttaaattgtaaaaaacaaacatcatttttcatctctatatagatgatccatctggatgaagaaacaaataaggccttaagttgtttatacatgattttattttctctgatttcaagatttttttataactgtacatactgctggaatataaacttaagcgatggtagtgaaaacttaagacaaaaattttaaactattaagttactttcgtgcaaaacaaacaaacagagagtagtcttcaacaaacaaacataaggtctcattattcatctcttttcttggtatgggcaagcaaatcttcttctactcgacctaagtatcttttgagagtaaggcttgttttttcttggtgctacgagattctgttcttgacgggtgttgctatctcgaactcaaaatgttagctgttgacaagttgtgagctaggaaagctgctaggagacttgttgaagaactccaagctgttgacgagctgttaggcgggcaatagcaagctaggaaggctgccgacgagctgttagctgggcgaactacgagtcagagcaactgcagacgaactgtgagctagaaaggctgcagacgagctgttagctaggcgaagtgcagacgagctgcaagctagacgaagttcgagctaggtaagctacagacgaactgggagctaggaaggctgcagacgagctctcagctaggcgaagtgccgacgagctgctagctagacgaacttcgagctaggaaagctacagaggaactgaggtggttggctcgagtcaaagctgggttcagtatactttgttccgagctgatcgtctcggtaccaggttatttctaagcacagaccaaagcagataagaaactgtatttagccgaagcaaaagctcggcaccagtgtttatgataactgggttttagtttccgaggcggttgactcggtaccagtgtgtttagagtaactggatttcagtagacttgaatacccacggttgcgacccgatttgattcaatcttttaccagcgtttagaaacgagctggggcaccggtgttacgtataaccgggtttcagaagatagaattcatagcctgctcggaaaaacattcgagcagattcttatcttgaatatttatatagcgcgctgtaaccgaagcggtgtaaatgaaactttgaaaataataggccgtcgcccgttaaaatatttcaaagtaaaaagatttagaaatcaaattccaagaaaattcgaagtagaaaaattgaagtgggagtatggatatacggaccccactcccccccccttttttttttgtgggggctagctgaactcgtccggagacaagctgcctacgtaccctttgcaaggatcaagccaacccgtagttcaggttatggtgaagaggccggagctctttttttactcgatagaagagttgctttttttgctccgtagacgagtctttttgctcggtagacgagtgtttttgcaagtttgcgcaaaaaatataacagaaaaagcatatatatgattaagctgttcttgttagattataatagataacacttatcttaattgtttggacatagagatgatgatatctacggcatggacgatctgaatctctgagattgtaaacgtcgttgtatgaaaatctacatttaagatgttgttcgttagaggagatctcatctttgcgtaaaagagagaagcaaggatgaatgcttgtgatataagtgagaatgtcaatcaagcttaattaatatgtaagaaagtaattgaacttatcttttatgagggaggtcgtcgagacaaaattggagatcgcatcattgatgaatgagtggaagccttgagtgattgcattgaatctttatctggtagtcccacgaaggttttgtccaaattttagtcaactgttgatgcacgaatcacacaagtacgaaaatgggatctctagggaaggaagaagaatctttctattaatgacgagcccgcgacttaggcgaattggacggattacaaaggatgatttcttcaacgagcataaatggagttagaacgagccgattgtagatgaaagacgagcttgaggccggaagacgatcttgatgtccgaggaagaatagagtttagtcgtcttatagctgaaccttgtaaaaggttgcctacatacccttagaaagggatcaagccacacgttcatatcgtgataaacgagctaggccattactggaggaaggtcgtatggtacgtgacgagccggcagatgtgcgacgagctggatgaaccgtggtagagaggcgaattggacaaaccgtggtagaggctgaaggtttagacgagctgggcgacgagagaggtggactctgcagtcaatggacgaactgccgctaggcgaggaggtagatgagttttgcagtcgagggatgagttgatagctagacgaggagttggacgagctgactagctgacagctaggcgaggagatggtcgttgagtgatggcctgaagagcttgaagacgagttgagaagcttgacgaagaggagcgagctaacgaactttttgagacggacgagctgacgagctttgtgagacggacgagtagacgagctttgtgatacgggcgatctgactagctactctgtctctctgcgtgtcaggcggcattccccccttttgacatgacatgatattccgtatttatagcactacgcgtgtagggcattcatcgagggatttgacgaaactacccttcgccttaatactccttggtttggaacttattttgggcttttgactcgggttgcagttgattttgttaaatctaaacaacgaccttttttgttgcgttcttagtgattaagatatatgttgcgttccatgcctccatgacacatggtccgtggtgatgaagtgtggcgatgacgtgaagctttcgtaaattgaagaccatcggtggcgaggtgaagacgtgaagcctaagatgggcatgttggtggaatcgtaaaatcggtcacaaaggtggctgatctgatagccgcagacatgcatctttgggctacagccaggacgtgcttgtcgcagaaaaacagtaataactcttgttagacgtaatcaactgaggcaaggatgagtccgttagaaagataagccttgtagcttcaaaatgatgtgcagatcggctcctggttccttttagatcgccgggaaatagatcgggtgtagacggatctatgtctcgataaacaacgcatgcttgagagaaaacctataactctcggaagacagcaccaaatggagcaaaatcgatcttgttggaaagataagcctcagagcttcatgatgatattaagatgggctcttgatgttttctgaatcgttgggagtttgctttctaatccagttgctcccacagttcgaatctgcgatttgacaggtgttatatgttttattgaaacagtgataacgcttagtaaacagctcggaattggatgaggtcggtctctattgaaagataagcctcggggctttcagttgatacttaggtcgcctcgtgatgccttttagatcgctgggaattttattccgaggtcaacagatcggatacagatcgatctgtattttgtcagactgtcttctgcagatgaacggcagtatctccgagaaaacagaccctaacgaagtgagctcgggcttgttaaaaagaggagcctcaagtctttgcctcgcgtgttcttcacggctcggtggtcgtttgtgaggtggcttcggggcaaacggtatgtaccggctcggggcgcgcttgatgactatccattaagctcagttggctgtctccctagccgatatagatgtttcccgcagcgttctcacgattggctcgggctgtgttcatatgattaacacccgagccattttacaaactcccttcgggacggtcgatcgaataaggtcccgaggtgctttgttctaggctaggggccaatcatatgtttaaccatgaggtgattgttattctcagactgtttggctcggtcttgcttgtgggggaatccgaccccaacactgtacatactgctggaatataaacttaagcgatggtagtgaaaacttaagacaaactttaaactattaagttactttcgtgcaaaacaaacaaacagagagtagtcttcaacaaacaaacataaggtctcattattcatctcttttcttggtatgggcaagcaaatcttctacttgggtaggagagagatgttttcccccaagtaccaatgaactccaaatccaaactgttgaagctgcatgtatcaagggagtggatgcaaagtcttcgggttgtgccaataatatgttgaatagtcgcgacttcagttgatgtaatgaatccgagtagtcgcggttaccggatatgagcattatgttgcatggctgttgaatgttatccattccaaaacacagcaaatcgaccaaaatttttttatgcgcagattcttttctacctgaaagaaagaatgagactaatataaattgagaaaaaataagtaattgagtaaatatatagaacgaaccatcagggatgtggcgagtatagactccagtagcactaagcgctaacatggtagtctcatcgattcggttagtgttaccgaatgcgttaatcgatgtgatgggtcctcggtaacccttttcatttaacgattttcggaggtttcccaccagtcggtaggggtcgacgctgtccggaagtctacagctgtcaacgtcccaccaaatttccgttttggctgtacatagattaggctataacaaaaaaaaaactgtgtcagggaaaaaaaataaaaaccaagacccaaaataaaaatattaaaaaaatcttaagagcttttcaactattaccctttaattgcgtatagaagaaagttataaaaaaaaacatttgtacgttagaatttgtaaaaccagatttgagcggataaattactcagaccctccaatagtcaaatatttttcctgatagtcaatatatgttaatcccgtctacaatttctctttttccattcacatatggaaacaacacttcgaagcactcattaagaggagaaaacaaaggcccaggcccaaaataaaattaacatttttacctgtgggtaaccaggtagtctgaccggatcaccatattgaggcccaatagtatcgtttggaggagatgaatccgtagctttaataaatttgatattaataaaagtaagataatcattaagatgatggaaaaacagaaggaaacagagggggaaaaaaaacaaacctaaaagacgaagatagtgagtaccaaatacagctggagctaggataaaaaaaaaaaacaagtttttacatgtatgtaaaaaacgaggtaaaacagataaaacgaagcgagaagctccatttcttaaaagaaaatatgaaaaaacttacgacgtgatgctctggttccaacaaatccatgagatggagacgctacgtttcccaatccgctaatggatttgaagaacctggattgttgaaatagcttgagcaacattttatctgaaacaaataaacaaaaagaaggtcaaaatgtaaacggatcggaatgtcacgacgtctaaactagaagcgtcagatctagtcaaggaagctaaaacggtaaaaacagagagatagaaagagttggaggttacatgagccagcgagagtgagagagagagagagcttccacgcttgcttctcctcaacctgaaatgcatcggaaaaaactcagggaaacagaacttgacattatacttataaaaactcaaaaaaataacttaagaactcaaagaatcacaatcgcaaatgcaaaacccatcaaattaagcaaaattatgatatacgaagcagtttccgattcacagaaagagcgatcacaccaataatccaaaacataataacaatcgaaagttattaaagcgatcggtatatacacgatccatcggatggataatcaggaaatctacatcagaatcgtcggtatctgtaaatggagagagagagagagattgagcttacttgagcgagatagagagcttccaagctttcttctcagactgaaatgcatcggaaaacaaaatctcggaatcagatttaagaaatcgacactataccgattaacaaataaaaatctttaaaaaaaaacgaagaataaaaccttgactgatgcataaaaatggtggtggtttatgtgctgaagacgatggtgctttatatagaaggaagagagtgtaccaccttcgtgctcgaggtgcttattacggatttacccttttccgtttcaaagggcccaccaaatctatatttctcccaatttttatatttttattttttataaatcataacttatcttcattgtatttacggcattggattaataatattagtgtagataaattagccaaaagattaatgctatttaccatctaaatatttatgttgcacttaatatcatcgtagataactagaaacttccattagctgatcgaccatataaatatttctgttgcacttaattaatgacatcgatttgcacttaattacggcattggtcacgttattgtctattcgccaattaactctaaagaaggttagtatatggcgatgtaacatgtggttaactacgtcaaactaatatatcattgcttagattttgtatttaaatgtaatcaataaatttactcttagatgatcactcgtgtgataaaatacgtagttttgtcacgtttataactagacattttgaatacgaaaaataagaaattaattaatcaacgatatcatatgatattccacataactgaacattaaaaacaaagaataattctggtgctggagtaataatataagaaaaatctaataaggggcataagtgataataattcatttatctctccctcgcgattttggtctagggtttcttcaagttcctgatcggattcggtcggcgtagctctaatggctggctggagtcgtatgatgacttaccgatccatcaagcgagtctccaaggttcggttgaatcaatctgcttattctcaaagtgattgggatctggattctgaaattgattcatcggagaaattgtaagattctaaatctgggattttaaaattcgtcgtgattgtgtgtgttggtcttgggattaggtgaaactcgtaatttaacagtgcctgttttgtgtgtacttataatagattcggcttagcaattccctctgcaacttctaattattgacattaatgtaacaagttagtgtcatctggtggtgattctacttagcgagctggtggtggctcactatttttctatttaacaaccatgcttctgtgtgagaactgacaagtgacatgcggcttgcattacttgctaagtttgacagagtagaggagtttcttgtccttcaaatactctacaattgactagttatactcttgtcttctgacaggcagttgatatgaaagttctaggctctcttagcagagacgattttgaagaaaattttgtggtgataatttccctcaatggatctcgtttccagcatttgaacaggtacttgtcatcatttctgtgagtcattggtttctcaataacatagcaaaagtttgaaactgcaaacattttgttctttctttcttatttttcaggtcaaatggctgaataaactactgagcaagatgtggccttatattgcagaggtgagattctaatcttcttatgttgcagttttaggtgttttcttttcccttgtatagggttggaagttggctattaaatcactagcatgtttaccctgaataatggtaactgaagatatccatgtaaagttgtactccaaagttcgaaatgattgaagaagagtcagatttagcctgtctagaatggactcgtagactgatttttttttttttttttttttttttgctggtacacaaatctagtgttttattgacacctaagataggtccaatttgttggaatggaaaacacttgccacaatgcaccttggcaatcaaagagtgtaatattcgttgttgtgttgactaatttccaggcagcaaccatggtagtaagatattctgttgaacctcttcttgaagattacagaccaccaggaattacttccctcaagttcagcaaattgaccttgggtaacaaagcaccaaagattgaatgtaaaataaggtcgacacaacatcatttttgtgatggctatcttttctcttccattgttcaaccttgtattgtcctattatttatcttggatgagttacctgccaaatgctattgaatccttgtgcttggaagaacatcatgcatttgtctcctaggttacttttgctgtaagcctgagcacatgcataattaatcattgttgcaggtattcgtgttcaaagtttcaaggaaggtcaagtcacaatggacgttgatcttcgatgggggtgttacagcacttgttgcctccatacccattcaggttactagagagatatttttagtatttgtcgtttgggttgtcgttttgtgccaaatagagattgagtatctctacaaacacttgtttctggctgaaacagttgaaggatcttcaagttttcacagttgcacgtgttatctttcaacttgcggatgagattcctcgtatatctgctgttgttgttgctctactggctgaggtacacttgttctgtaaagggtccagaataagatgcatttttgttattatcattttatatctcctgtcttacaatgaccaactatttaaatgttctcaaccagccaaaaccaagaattgattacactctgaaggctgtccgtggaagcttaacagcaattcctggactatctgctatgattgatgtaagttcctctcttggtaggtcaagcagtttccaaaagttttagttgttgttcccatttggtcttatacacagctttttgcttctctttctgttaggacactgttgatactatcgttatagacatgcttcagtggcctcatagaattgttttccccattggtggtatacctgttgatttaaggtactttcatgtgttctgcttgtttttcattttgcgttttttcactcacagaatttttcctgccactgtcaatcttttgtcttttctcctcttctggtatggccataggatttacttggcgaggtcatgatatgtattgagaaagcactatatagtttgacgattctatgtatctctcttctttctcagtgattttgagcttaagccacagaggaagcttatagtaacagtagtgaaagcaactaacttgaagaataaggaattgattggaaaatctgacccttatcctaccatccacattcacctgtattcaagtataaaacaaaggcaatcgagaacaatctgaatcctgtctgggatcaaacattcgaattgattgtagaggacaaagaaacccagtcgctcactgtagaggtctggaatctgaaatatttatgcttcatactttttcaattttgccattggaaatattaactattctcttcgctttattaaacttttggcaggtatttgataaagacgtaggccaagatgagcgtcttggacttgtgaaacttcccttaagtagtttggaagccggagttacaaaagaactggagctaaatctgagcaagatgtggccttatattgcagaggtgagattctaatcttcttgtgtatacttttggaagttggctataacatcattagcatatttaccctgaataatggtaactgaagatatcctaggaagagtagagttattatactgtcaagttgtactccaaagttcgaaattattgaagaagggtgagatttagcttgaacaccactgagcaaatttctcagtgatgtttcctcgagatgtttatcatggaacactcacggcaatctgaactattttcttacctatgcaaacggatgatccgctgctcggattcaagaccatctttcggcctaatggtgctcatcgctgtcacaactacatgaagtacccaaagtatgttcttctcctcacttagcttagacatagagatccattcttttgcatatggaatctgagattgattccatctttgttgtgacagcatcatgaaactaggcgaagctgcgattcttcactacacttactcgaaattttcagatcttactgcaagacgtgatcgatgttgctgcaaaccaaaagaagaggatgtcaagatatgtttcatgctagactttgacagagccataagcccgtaagctaggatttgatttgtttgtttttttgtcgattcgtagagttcttgttcatcacatttcgtgattgatgatgatcctaggcttctggggcccctcttaggagtttaagagttggttcatctattgttggttttggagtaggaggaacaagaagtttcaacaagggcttatgtcaaatgctacagttaaatctgtacctttctctatcaacaacagcaagggaaaggaactcaagatagtaggagcagctatggtcagaattgtcatcagatggtttgtgctaagtttttgattgatcagttcacttgcacttgtagctaatgtttttttttgtgtgggttttctagtctaattgttagttttgacgtgtagggaagtgatagtgatagagatgaaattgaggcaatgacggttcaagaacttaagagtcacattgaggcaagtctatactcttttcgtttctcttgctgctttgttattgtttctgtggacatccagattcttgttcattgtttaaacatgtgggacatttttgtatttgtgttacaattgttttggttatagaaaagttgggctccctgtgaaaggacgcaaacaagaacttatctcaactttacgacttcatatggacagcaattttacctggtatgtaactgcacaccaagaacacacatttttctgttttatgtatcatatcgagaaaaggcacgagcttgcttccatttagtagtttttaagcttgatccatttgatttagaatgaaagtctcagaagtgctatatcttctgattattttgcgagagctgtaaagaatttttttgttgggctgtgtctcttctaaattttctcttttaagtgaaaaaccaagtccttgcctgtttatttgttacagatgaaagttctggttcagaaaaaaaggaagctactttgtccacgcatttagaaagtgtcgcgattaaaagaaagatctgaaacagagaagagcctactcaagatgaatgcattagttctgaagcttatggcattgaaaacagagagaaaagagtaaaacagtctactgagaaaaacttgaaagctaaagtagtttcttcaaaagatatctcaaaagaatggaagaatgtgcttatttgtgatatcatatccatgttatccaatatgtttgatatgttaagttgaattgtatgtgttttaatcagtttggtcttttgcagataaaaccactcagagttagatatggtactggtctatctggatcagatcatgacatggaagggcgtatggtaactgctgaattcgactccttctacttgataagtacttatgtccctaattctgtagatggcttaaaaggactggtactcctcaaattaaatgcgtgtagttgacatagatattctacttttcttcttattctaacgaatggactccgtgggttttcacatacaggatcgaagattgggatcgaacccttagcaatcacatcaaagtatgaaaacgtttcttcagagtttctttattttgttgtatatgtccttcttacacaagctcaatggctcttttccatctgcaggatctggagaagtctaagcctgtagtcttgactggtgatctaaattgtgctcatgaagagattgatatcttcaatcccgcggtaactaactcgagttcttccctcccctgtttttccatcgaaagtaatctctcaggtttcataattctccaccatatcttataactaggggaacagaagaagtgctggttttacgatagaagaaagacagtctcaaacttcttagataagggatttgtagatacatttaggaagcagcatatctggtgttgtcggttacacttattagggttatcgccatggtggccgcaaaaccaacaaaggtacgataagttcgtttgatacatatattcagattcaagtcctcacgaacgaccttgtttttttacgtttttaggataccattcaaaagaatatataagtgaagcaagcatgagaggtgcaattctcaaagccaatgatattcctgggcatattcttagtccagctccaaacaatatcatctcgaaatttttacctatcgtctcaatgcctcgtcccaagaatctctatggcttgaaccgttccgcgttttcccaaatgatcgagtctctttctatagcccaattgttcacaagaatctgagtattttcaggaatgggataccctaaaatctctatgtttgactcaaatttatgcgggatgagaaatagacttggtgggtgcaaaaggagggtctctgttacaacagctcactacaagaatattgatcttttgtagcgttcgaataacgctatctaactatactatagcgttttaacaagcgctctatcatcgtccgtcatagtaggtcgaagacgtaatatagcggattttctttgtgctattgtactgttagttattatagcgcattctttgctgaaatattagattttacaatagcatttcaattttgttattaatgatattattcaatgcaattagaatttaaatttaaaatttttgaatttaaaatttgaattccaatattcaattcataatatatagaaaaccaaatcattttattgatataaaattttaacataaaaattcaatgaaacaaggaacaaattatctctaaagaggaaaacaaaatacaaagcaatcaaatgagataacgaaaaaactcatggttgctatggccacgtacactttgcattccttcttcttcttcttctttgaagttcacagcctttcaatgaagatgagcacaacaactaaatccaaaactaattaacttaagattttaagaagtaatcatggaacaacacattctaaagtaaacaaaaacgaaaaaggacaaacagagacaacctttttatcatacaagcaagatttttttatcaaacttcttgatacctgcaagtatccatataagcatcccaataaccatatatcacaaccaataagcaaaattcagtaatcaatataagcccaacacttaatgagtaaagaatgtgcacatacccagatagatcgttgattctcttgccaagttccttaattttatacaccattttcttgataggttcagagtaatgccttaacctctgcagatgaatgacaattaaaaagcaagaaaacatatggagagagaacaaataacaaaaacaagtatgactatgactgtttccacttatactaactcaaatggtgaggtacagtaacgtgaaactcttcatctaagagcaattaagaaaactctaagagattggagtcacaaacgtaacgatttggccaacaataaagttggtctcaactttagtgttagccatagctattgggttatgaagtagctcagccaatgtccattccacaatggtagagttcgtctccgttcgcgcaataaaacaagtcccttcaaatatacaaaaaagaaattactcttttatatccaaacgattttccttttttatcgtttttttctatatattaatattttatggttataatgaaaaaatgaaataaatactaaatggaaatggtatgtcccgtttccaaaatagacatatccattgaatattttacgtaaaaacaaacgctaaacgaaaaagtcagtcaaaccataatttaagacttatatcacttacgcataaaaagtgtttgatatcattcatgtcgacttccgatccctcttcttgaataagatcgatcactgaatccaacaaatcgcctctcagtgcatcgactctaggtccaatctgcgatgatctttccgcgatccgagcatcgatgaggccttgaaaaacctgaaacaacctctccgaacacatgaccttcatctctttccggataccctgtagatcaagaaactcaagagacggaaaataatttgcgaggttcggtttccccattgttttcatcatacgagacaaggagtcttggagctccgtggaggctctcggatcgtaactacctaagtcgatcgaaaacacaacgtttgagtctacattaagcgacgtgatgaagcacgcacgtacgagcaatgtcgacggagaagcctcgttcgcctctttggataatgaaatgttacaagttctttcgctttcttcgaccttacggacttcgtggctttgtgatgctcccgtgagaaaagttttgtcgccagtatccataacctaattggaacattgtatttatatatatagatagataaccatatttaattaatcacattaacttataatttacctccaacgagacgacgtcgaaggtagccatgctacggagacttcgtggtggccgaaggctcgaaccgtcttgctaaaggtttgcccggataagacatggtcaagcgtttaaagaacctctcttgctgcatctggtgaagaaatgaccactttggttaaacttccaagcctaagactcatgactggtccataaactctcgagagatcagcaaatgaacggtgaggagcttttccgatgatctggagaaggtttccgattatgggccatcccgaaggtccgggaggtcccggaaccagtgccagtgagcttgatctccgtcgtcgtgatttaacagcgacaagaataagatacgtgaaaaggaagctaagtatcaaaagcagagctagagctattgtgtgcttcatcgtcatttcgtcgagtgtgttctcctagccacatgttttacttatttatagaaatgatactgtatctatcattaataaaattgctatcgttatgggctttagtttgagcaacagcttcactctaattaagtacacttgttgacaaaaagaaaaccccatttttctctaggactcaaaagtcaaatgtacaatttatcgatcgtttgaaaagctaaagaaacaaaatgtgatatgtttttaattatcaacaacaatatgtgatatgtctagttataaataatttacgaatgatattaatatatgacgtaatttaattttagatgatctatataaattagattttttcataatttcaaaggttatgaccgaaccagatagaaaccgaactataccggccgagaactacagaaatcgaaattgatgtcaattgtcaaacacgtttcttgataggcacgatacataatggttcggctttgtgcaaggtagcaccaaaggcctcattcatatccacattttcaggaactacgccgttttgatactcccagtcaaagccatagagaagagacgcaagaactagatgcattatcctaaacgcgagtggcattcctggacaaatccgtcgtccagctccgaacggaatcagctcaaaatgattacctttcacatctattcctcttcccaaaaacctctctggctcgaactgcgtcggattcttccacacattcggatctcgccctattgcccacacgttcacaagaaccttatttcaaagcacaataggaaatcattagtaattacaaacacaacacaagaacccgccatattatttactattaagaagtagctatttaggtttacttaattaaccgtaccggtaccagaaccgatttagtttgaatgagtaaatacctgagtattcttaggaatgaggaactcgaaaatttggacatcatcagactctgattttcgagggacgaggaaaggagcaggcggatgcaaacgaagactctctttcacaactgcttgtaaataaggtagtttaacgatatcaagatcttgaacggtgccctttagccctatcacttgtcttatctcttcttgaactttcactatcatcttagggtttcgaagtaactccgccatagcccattccaccgcactcgaactcgtgtctactcccgccagaaacaagtcctaatacacaattacatggatttagctaagaacatgtatagaagccaatttgttttggcttatttaagacttacgagaagcagatgtttgatattattgtcatcgagttctgactccttcttatgagcaatatccaaaagagaatctaacatatcgttgttatttctcgaagttgatgatctctttgtatcgatgaatccttgaaaaaccctaaacagtttgtgcatcaatagcctcgcttcttttctagctccttgcagatcaagaaacccaagaaaagggaagaaatcagcgaggttgggttttccggagatctccatcatccgaatcaccacgttttggaaatcgtgaaatgtctttgagtcatcaaagtttgcgaggtttgtggaaaacagagcgttcgagattatattgagtgatgtgatgaatgatgctcgagagatgttcacagcttctcgtctctcgcagcatttgttaacgaagttcatgagttcttgcaccttcctcgtccttatagcactggttgcttctagacgttgcgttgagaataattggttcctcgttatctttcgtagaaacctgataaagtgtacaaaaaatgtgaaacaatacggtttagggacgcatattatattgaaatcgagcgaaaccaatcattttgaaaaaactgattaatactaagtcagtaagtttgtaataactaccattgtatggaacaaaacaaaccaaaaccaaagtaatacaaaatttaacctaactgaataaagtaaactatacaataatcctttttaaagaaaataattcactagtttttctaatactcatgaaattattcattcatttatactctatactcaaaactgaaccaaaaccgatttaaatctgaaccgcaccgacttgtatttatttacctccaacgagccaacggaggaatccagagcaaggaaagctcgtgatgaccagcggctcgaaccgggtcactggagactcgataagacaagacatgatcatgtgttttcagcacttcttttgctgtttccggtgaagatatgaccactgtggtcaaacagccaagcttaaaactcataacgcttccgtaaattcttgagagatcggcaagtgaacggtgaggtttttcaacagtttgaaggatgttacgaagcagagatagctttgaaggacccggtgggttcttggctccaccgggacatgattttccggtggtgtagaaaaagaagaagagaaagaagataaagagcagagacaatactattgctacaatatccatctaatattatgcacgcttcgtcaaaccagattataaattattggaagtgctttaggaaaatcttatatgatgcacattttaagtagtgacaatctttgtaagaaaatttgaggtttgtaattgtaagaaactgtgtcattatatcaggaagacacgttatttgtcccttcaccgattccattgtcttgatgttacatgtggaggtcgaccaaccaacaagtgattcttgcaaattttatcagataaaactgttgaaattatgctttttcatgaaattgattaaatcaactaaatttctatatataacttttgaaccgaatcacaaagctgaaatgacataacatattctgatttccactttccatttcttacgagtgataacaaattggggcatgctaaacgaaactagccatatttaaatgtgaaatataaatttggtaataagtgcaacgattatgtaaaacgtaaaatcattaattaacactgaattagagaattcaagttcaataaaactgaaacagcttatctttaaccacaaaagttgacgtatataaatttaaacgactaattgcctcctatagctagttcatcgatggtcaacggtcaacgtcgcccgtgtaggagatgtgattttgtggtaaagacgtctttaactctttaaagagatgtgttttttaccaagtcacgactcacgtggaacatcgaatcatcaaaacgttcgttgcctcgttaacgaggcagaatctttaatttctcaaaatggtccatgtattattgctcacattccaattttgaccacatattcgtttattgtttcaatcgtaccaaattctcaattctattatctaagaagaatttttttaatagggattattgacaaaataaaataaaataaaagataaagctgattcttttaaaaaaaaaataaaaaaattattcaacaatatggcattccacttaactgaatcatgtatgatttgatgctaaagtagaatcagaaactgaagggcaaaatttgagaaaatataaaatatgagggatgaatagtgaaggaaaatgaattaaatacaatcgcgattcgaaaagaaccgtttctaatctgtcgcctggcgcatcctcttcccatttatctcactctctggcctaccaaaaatacttcaatgcgttcttaattttgttctgattctccccacttgaccaaccccgtgaggataaactgttgccgacgcttctcgccgataacaccggttttgttgtgacggaaaggtttgcattcgtggttcgatttctagggtttcttcaagttcctgatcggttgtttgagcttattcggtaatctttgtttcggttgcaggaaaaatgggtttgatttctgggattctgttcgggattatcttcggcgtagctctaatggctggctggagtcgtatgatgactcaccgatcgtccaagcgagtcgccaaggttcgattaaatcaatgtacttattcgattaaaatccatgatttggttctgaaattgattcatcggagatattttaagattttaaatctgggattttaaattcgtcgtgatatgtgttggatagattagtttgtctcggtctcgggaattagctgaatcgcgtaaattatcactatcggcttagcaaaatccctctgcaatttctaactattgacatcaatgtaccaatttagtgttcatctgttgactctacttagcgtgctggtggttcactattttactgattaactatgcttctgtgtgagaagtgacatggcttgctttactttctaagtttgagtagaggattttcttggccttacaataacagaatacgtatactcttaccttctgacaggcagttgatatgaaactactaggctctcttagcagagacgatttgaagaaaatttgtggtgataatttccctcaatggatatcgtttccagcatttgaacaggtactacttgtcatcatttctctttgttaacttttctaactcagtgttcatcttccatatttgggtggtccgtggttgacatgatttctgtgattcattgagtttatagatttgtttgcctcattactctgattggagaaatctagttctggttccattatccttgagtttaacaatacttgaatttgcgtaatgtctctggttttggaacagtctattacagtttaacttctcggtttctcagaaacatagcaaaaattttaaactgcaaaccttttgttctttcttttttttcaggtcaaatggctgaataaactactgagcaagatgtggccatatattgcagaggtgagattctaattttcttttgttgcagtattaggtgttttaatttcccgtgtatgcggttggaagttggctattaaatctttagcatatttaccctgaataatggtaactgaagatatcctaggaagagtagagttgttatactgtcaagttgtactacaaagtccgaaattattgaaaaacagtaagatttagcttatctagattggactcgtagactgccttttttatttctgctacacaaatcgagtgtttcttgacacctaagataggtccaatttgttggaatggaaaacacttgccataatgcagcttggaaatcaaagagtgtaatattcgttgttgtgttgactaatttccaggcagcaacaatggtaataagagattctgttgaacctctgcttgaagattacagaccaccaggaattacttccctgaagttcagcaaattgacgttgggtaacgtagcaccaaagattgaaggtaaagtacggtggacaacataatttttgtgatggctatcttttctcttccatttttcaacctggtattgtcctattatttattttggatgagttacctgccaaatgctaatgaatccttgtgcttgaaagaacatcatgcagttgtctcttaggttagttttgctgtaagcctgagcatatgcataataaatcattgttgcaggtattcgtgttcaaagtttcaaggaaggtcaagtcacaatggacgttgatcttcgatggggtggtgatccaaatattgttttaggtgtgacagcacttgttgcctccatacccattcaggttactagagagatattttagtatttgtcgtttgggttgtcgtttgtgccaatagagattgagtatctctacaaacacttgtttctggctgaaacagttgaaggatcttcaagttttcacagttgcacgtgttatctttcaacttgcggatgagattccttgtatatctgctgttgttgttgctctacttgctgaggtacacttttcctgtaaaggtccagaataagattcatttttcttatatcattttatatctcctgtcttacaatgaccaactatttaaatgatctcaaccagccaaaaccaagaattgattacactctgaaggctgttggtggaagcttaacagcaattcctggactatctgatatgattgatgtaagttcctctcttggtagttcaagcagtttcaagaggttttatttgttcccatttggtcttatacacagcttttgcttctctctatgttaggatactgttgatactatcgtcaaagacatgcttcagtggcctcatagaattgttgttcccattggtggtattcctgttgatttaaggtactcatgtgttctgcttgattttcattttgcgttttttcactcacaacatttttgcctgccactgccaatcttttgtcttttcttctcttctgttatagccataggatttacgtattgccaatcttggggaggtcatgatacgtattgagaaagcactagatagtttgacgattctctctatcttttctctttcccagtgatttggagcttaagccacagggaaagcttatagtaacagttgtgaaagcaactaacttgaagaataaggaattgattggaaaatctgacccttatgctaccatctacattcgtcctgtattcaagtataaaacaaaggcaatcgagaacaatctgaatcctgtctgggatcaaacattcgaattgattgcagaggacaaagaaacccagtcgctcactgtagaggtctggaatctgaaatatttatgcttcatacttgttcaattttgccattgcaaacgttaactattctgttcattctattaaacattttgcaggtatttgataaagacgtaggtcaagatgagcgccttggacttgtgaaacttcccttaagcagtttggaagccggagttacaaaagaactggagctaaatctgttgtcttcacttgatactttgaaagtaaaagataagaaagatagaggaagcataactcttaaggtatatagatcttccttgaataaactgcaaaccttttcttttcgctgattcctaaattgacttgaattgaaggtacattatcatgagttcaacaaagaggagcaaatggctgcgttggaagacgagaagaagatcatggaagaaaggaagagactgaaggaagcaggagtgataggtagcacaatggatgcagtcgggatggtgggaagtgggctcggtgctggtgtaggaatggttgggaccggtattggcacaggagtcggattggttggaagcggtgtgagctcgggtgttgggatggttggtagcggttttggagcggtcggtagtggattgagcaaagcagggagatttatgggaagaacaatcacaggtcagtctagcaaacgtagtggctcctcaacacctgtgaataccgttccagaaaacgatggtgcaaaacagcagtgagtaaactttgggtttaagcaagatttgtgatcatgacttcgtttttactctttattgttctgtttttttcccctttaactctctcgaacttgatttctggattcactgcagtaatttgttttcgttgtgagccttcaaattaaaatcttgtacaaaagtcatttgcttaatcgtcctataaacaatagattccctctcaatgatttggtggtttaactttccagaatgttatattacgggaattatgtgtcagacttgcatacacacactagttaagtatatctaaaacatgctaacatcatcggtttaagtttacaaatataaaaactgattgattgcaagtaaattactcagttaagaatatagataagtggcattcgccatcccactttcagatataaggtcgttctcggagctctccttgtcatatgtataaatcatgacgagaaaatatagatagactcaacaaacaaaaatccctaacagacagagcacaagaggaaaatctttcttatctattttggaccaattttcaaagtaccattattggtattataatatgttaatattatgttaaaatatgtggcttccagtcgattagtgtctcttccacctttaggctttagtcgttgcaagaccaatagttttagataacctcactcaaaaaatctaaaaaaagaatctacattaaaatacaaacaaacgaaattttgtaaacgcaaataattgtatattttttcttctttcttttaaagctttgaactatttcatcttcataagatcaagttgatgatgatcagcaatatctattgcgtttgttgatattatctacttattaaaaatcataacaatatctggagactgggacgagaaaattggatgacgtgttaacacgagcctatgacttggatccacgtaagcctgaactgtgggaagttctaaactgtgtactgattggttgatacgtaagccaagtggataaagtgtcccgaccacaagaccgacatgatttacttattttattcgtaaataattgcattaagaagtggccacgatatggaacttttccaaatatatgaaatgatgattagttaaggcaatttgcttttgttaattggccagcttaggtcaaaatagatcctaattaatgcaaatcttgttccttttttcttctactaatgttatcatacgaagccttcgatcaaaagtacattacgtcatgtcatcacaattcccaatatatttttcttagttgatcagtttacaacactgattgcaacatttgatatgtaccgtattaatttcaccatgcatgctacatatttaatccatattattaatcgggtacgtacttatacaataacaacggaaagttcatacaaattttgcatatttacaataattcattttggaaatcgaaatttatttatgctgttgaacaacacctgtagtccacgaactatgtatttatataattatatccaattatattcatttcgatcgagagttccaccgttattagatgctcttgatcaccgcagcaaaacactccatatccataacttttaaaaataaaacaaagaacaacaaaaatggataacgtggactcgagtcgacaatgtatgatcaccaaattaaaatgtttgttgttaattatatacacatccaatcaaacagatgtttaaactattctaacttcaagttactattaagaagtaaccatatctaaaactaaaaaattcaacctcagacacaaacttagccaggtgttctggttaaaagttccctaaccccacgtattgactacaacacgtgtaatgtaatgcacttttaaccaaaactattaggccaagtggccaacttttgatcactttatctgaacgactaaacccgacccgacccgatcgacataaaccggaccacgagtatatgtatgtacacacatcttcagatgtagtagatacgtatagtacactgcaggattatataattgttaggctcaggagaattgaccttttgaatatttcatacggttaaaaaattcttctatatataaagttgctttgaatattttgtagtctctgtatgttcaaaaccgtttaacaataacaacaacaaaaagcttccttttttgttttttgagttttcgtcgatcgattggtttaaatcctgtcgtatcaatttgttctcgattctccgcgaccatgcaaatttagggtcttcgttttgtttgatgggcgcgaatatctcgggaggttcaccggagtttgaccggaacgatgacgtttactcgaggaaactcagattggtggatttacctgagaattgtgtagcgttgattatgacacggcttgatccacctgagatttgccggcttgctcgtctcaacaggatgttccgtcgcgcttcctcagctgatttcatttgggaatcaaagttgcctgcgaattatcgtgttattgcacacaaggtgttcgatgaaattactctgacgaaattaataaagaaagatctttatgcaaagcttagccagcctaatctcttcgacgatggcacaaaggtttgaaattttgttcccgttgaatctctctttatctttaaatcttaaaaaaaaaaatcttatttttcaaactttctctatgattgagcaggaattgtggatagataagaacacgggtcgtctttgtttatctatttcttcaaaggcactaaggattactggaattgatgatcggagatactggagtcatatcccaactgatgaatccaggtaaggattacgatcaaaggtgtggttttttcctaagaaatttcatcagttttgaccatcttcttgtcttgattagactctagtattgttgaccatcttgttagtttcaactatattccatggttgtgttgcaatgagcttgtaccccaaatctttgaattacttgagatcaatgagtaatctcatccaatatctatgtatatgcaggttccagtcagctgcttatgttcaacagatatggtggtttgaagtaggaggagagtttgagatccagtttccatctggaacatatagtctcttcttccgtatccagctcggtaaaacatcaaagaggcttggaaggaggatctgcaactctgaacacattcatggatgggacataaaacctgtaaggttccagctcgccacttcggacaaccaacaagctgtatcattgtgttatctgaacaacaaccctgggagctggagtcactatcacgttggagatttcaaagtgacaaatccagatgtatcaacaggaatcaaattctccatgactcaaatcgattgcactcacacgaaaggtgggctatgcatagactctgttcttatattacctaaagaatgtgcaaaagaagtcattggatcacaatagttttgtagatatagagtgagattgtttgtaaagggtgagagattatttttcagtgaaacattcactatactgtttttttttcttgatctgggctgcattctcaagatgaatctcagatctggaactgtgtacacatggttgggttgtctctagttttgtctgtagttacaaggtggtcgtgattgtaaatactacttctccattcagagattattacacttgcttgcttcttcatattttgcaaaagttgatgaaaacatgaattatcgaacatcaaatgatttcctctctactatgtaggaacagagtcttgttcaaaatgagaaacaaacacaaatttctaatcaaaaaatcttgaagatgtatcataataatcttattctaaaacttatcattattcttgcaaacgcgttataagagcagcaaattcattcaaaggaggaacatagactccttagaatacctgaacacaataggtttactgatgaatatgaaacaattattctgaaagtctagagaacaagcttattccttcttcaaggtgtcttcaacttggggcgcgatggaagcaactgtgtggttacagaagaaaaaatggtgaattattttcgatatcagacaaggatgtgaaattgcaagtgggtttgtggaaaggaagagagagttttacctgataacaagagataagtgaggtggtaaacccgaaagcaccagtgacacgaggactaatcgtctttggagctaactgaaggagaccaatggctacaataatgtccatgcttgatttaatcaaagctagagttctgtcgtttgatttctgaagcttagcacgatacagctcatcctgcgtttttaacaaagggaatgagttttgataaagatagaagaaaaaagatgagaggagttacacatgagagtttttacatcagctttgagttccttttccatcttcttcatagatgaagagagccttccaagctcaccaatctgatacacataggaagatcaagatcgggatttatgtttatacgcgagcaaatcaaaatgttgagaagagattaaaaaaaacctcgactgcacttgtacaaacggatgatcccagccagcagaaaagtgatatacgtccaagcaattcagttcgttctttgttctgcgatgcgattgaacaagaatttttagtcacttaacagagcaaatgaaacatcaaaacttcaaaagaccattatggattattgccttaaacttatctcaccttgtatatgccggatctaccaagccagacgatttgatcaagaaacaaaaaggtagacaagagcgcattcttcgactgaaacggtcaaccaacaaacaaaaacagaagttaaagagattgaatcaaatcaagatatgaagaaatgatgtgaaaattcaacatctctttagcaccttcccgagtaagacaagaggaagtggagtccctttaggcacggggctgataagaccgtgaaaatcattgacaaactgcacattcgaaaccatttgctaatcagaaatcaaaacattttcaatccaaataataagaaagaagcaacaatgaagccggttccaattctaagaaacaaagatagaaatagcaacaatgagggcatgaccttgaaaagacggaaaacttttctcgccaagctggtgtttttgtcgacagtttgagcagtaccaggttggccaccgctcaaaaatttggaaccatattggatagctctgcatatcttatctctagcctcagctttgttcaaatagagaacaataagagcaagctcggctctggtcaaatctagtgtagtcatgctttcttctgtcagaaaaacaacaacaacgcaacccaagattcatcaacacacctttacacgagctcaaactaaactatgaatctagaaacagagttgttcccatctaaattaaacacacaaaaaatcaagagctatagcaaaattcatccttctctaataaagtcacgtttgattaatgagaaacatgagaaaaatgttggctttgatcaaattcaagccagaacattaacttcatcaccaaccacaaagatttaaaacacaacaatgcaattagcaagtttacaaaaatgaaaaagaacgtcaaatctaaggcatgtgaaacttgaaaacattcaaaaatttcagaaattgggattccaatccacttacctagatgatcacgataacgacgacccaggagatgattatacaattgagatttcagagcaattcagccttcaaaagactcaaaacccagaaagattataaatagaaaaaatatcaaaatatcgtgaaagtggatccgagatttattgcctttagggagatggcaaagctagctgttcttacttaaaatgtcaaataatcttcctcgttttgtgtcatcggagatagaaactatgataaaggcgtgtttggtcatctctcctttttatttctttctttataaatagaccaaaacacgtcgttttgttcaacgatctaatctcctaatcgtttcatttctaaccgtcgataagttccgtgtacaccacaggcctcatctatacgcgcgtgtggcacacttatcgaggaaggagaacacatcttaaaacgcagcgtttcgtagtgttaatgggccaggcctcaagaagccttatttttttcatttttttaaaaagctggttctgaagttaaacaagacaaggatgaagataactttgtatccaaacagtcaccgaaataagcttggacgggaaattgaataacggccacatgaagaataataccaaagccgggagaagaagaaaatggcggtggcttctcttagtatttgcttctctgctcggccacatcttcttcttcgcaacttctctcctcgacccaaatttgttgctagtaagttatctttagcttatgttggtgttggatgaacaatatttcattgttttgatataatggaggcaaatttacgaattttgtatttctctgttctcaaaagagcaaactttagttactgttttgatcatactaattgaatttcatctgtttaattgattggttagtggctgcaatgagtgaggatccaattcgtgaatggattcttacagaaggaaaagcaactcagataacaaagattggttctgttggtggtggatgcattaatcttgcaagtcattatcaaactgatgctggttctttcttcgttaaaactaacaggtatattaattgatgtcttactaaacctctctggtattcatagtcaagacttttaatgttttgttgtttgttacactggttttaggagtattggacctgccatgtttgagggagaggctcttggtcttgaggctatgtatgaaaccagaacaatccgtgttccaaatccacacaaagcaagtttaatctttcttttctttctttggcgtatatacattattatttttgttgatctctctaatcatagattcttgtttaaaagtgttaacaggctggggaattgccaacaggtggatcttatatcatcatggagtttatagattttgggggatcaagaggcaatcaggtgataatgatgaatataaactatgaaccaatgttaagaactttagtttcatgggttcatggttattagtcattaggctgaattaggaaggaagctagctgagatgcataaagccgggaaaacttcgaaaggttttggctttgaggttgacaacactattggcaggtggaatgaattccattttcaaaaatcttagtcacttttattgagttgctgtcttctctcacaatcttcatgatgtgcaatgtgcctattttagtaccccgcagatcaatacttggtcttcggattggattgaattttatggtgagaagagattgggttaccagcttaagttagctagggatcagtatggtgactctgctatttatcagaaaggtttctttctctcttctctctcgttataaacttggtgagaacagattggtttaaggtttgaagaaaatatttgaacaggtcatacactgatacagaacatggcacctctctttgagaatgttgtcatagaaccgtgcttgttacatggtgatctctggagcgggaatatcgcatacgacaagaacaacgaacctgtcattcttgatcctgcctgttactgtataagctttcattctcaaattcttgatatattttaccattttcaagcaccgttttgatctcattcctcctccacagatgggcataacgaggcggattttggaatgtcgtggtgcgcaggatttggagaatctttctacaatgcctatttcaaggttctcttccttttctcacagtttctgtatcaactaaaatcaagtttaaaggttgttttgtttcattgctccctcaaggtaatgccaaaacaagcgggatatgagaagaggagggatctgtatttgctctatcattacttgaaccattataacctgtttggctcgggctaccgatcatctgcgatgtcaatcatcgatgattatctacggatgctcaaagcttaagatgaggagggaaagctgctgcttatatgctttctttatgtgtgtatttgtgtgttggtgttatgtaaggtggtttatacgaagaaagatgtctgtcatacatgtttaaatcgatgatctggttgtacataggtggtaatgtgatggagagaagaattcacaatcgattttaaacattacaaataacaactagtaataaaagcagcatagttaatgacaagagttactaaggtctggttcttcttgggttttggggagagggtctcctccagcagagaggctttcccaaacccattcgtcagtgatgatcatttccaaaggctttctgcagacaggacattttctgtctacgttttctggctgtgctacgagaatgttgaaattcaagtttttgtacattacgaaagaagaggcgaactcagtgctgtctcgtgacattaccatcaaagttgatttacgattgtcatttccccagcaaaagaaatcattacacatcctcataaatctcgctccttcatctcctgaaaccatcaacagagatctctaagatacggacataaagtaaaagaaaaagacaagtactgtgtttctttacctgcgggtaagaacatgatatcagcgaggagaaagtcatccttgaacttattagtcctctcaccataaactctgattgagacattacatggacgataaccctttttctcaagagcaagtttgatattctcacaaaccacagatggctccacaccatcagggactgggcattcctccacgtcccagaagacgcctaccttagtctctgtcagcaaggtttttcgaaaacggaagatgcattacaaatcagcatcgagagaatacaatttgaatagatccattacaaatgacatgatagagagagaacgagagcttaccagcattttcgcttgtcaaagaagacatggtttcgagtgacctagactgagagagacttcttctgaacaaagttgacaacattgggacaaaagttattaattgttcctcaactagaaagggtcagtaatgggcctctggttgggctttaaaataaatggtcccggaatggttgcattctgtacaacgaagttaatgggctcttttgtgggtgttgtactagggacttcttatttacaagttgctcaaaatgtgaattctggaacatagaatgctcctttctcgtttctactagtatatagtaaacagagtcttgttcaaaatgagatgaaaaaaaaaaaagtcttgttcaaaatgagaaacaacaccaatctctctaatcaagaattctgtgcaagtttacattttgagtaacttgtaatactgggaaggccatggagtgagtttaagagcagctgaactggtcgtaccgggaacttgacttaaccagcccctactactcgatctatgtcgggaacttgtaatactcatcagaacccacaagtatcatattcagttttattataagattaatcaatattcatgcaaaggagtgagtttaagagcagcaaatgcattcaaaggagcaacaaacttttaattttaacacagaaaacgttaagaactataacaagattcacccttttgattaatgagaagatacgaaaatgttaaaacaatccaatttcgagtcggtaatgtcaagtagaattcacaatcgattgaaacgatgaataactaactaagctcgggtgatagggtctcctccaagtgataggctttcccaaacccattgttgagtgaaaagctcgtccaaactcgtaactttgcagttgctacatttccctggtgctttttctggctctgctccgaaaatgtacaagtctttggctttccaatctgcgagataagtggcgaacttcgagttgactcgtgagatcaccatcaaatctgattcatcattgtccaatgcccatttatcaatatccttcaccatcctattatatctcgcatttgcatctcctgaaaaccatagttatatcaatggagatatctaagacaactaaggggagtgagtagtgttaaagagggagaggaaatgatcacctgcgggtacgaacatgatattagcgaggagaaactcatccttgaactcatgattcttcttaccgtaaaccctgattgacacattacaaggaagataaccctgtctatctagagctgattcgatattctcagaaacctcagaaggctcgagatcatcagggagtgggcattctacgacgtcccagaagacgactaccttatcctcttcctctagatacaaaaaaggcggcaaaatgcattaacaatcagtatccagagaattactattgatttgttcctccacatactattagagagatagagagagagagagctaaccagtggtcatggtttcgaccaacacccgagaaatcagggttttagatctgcggcggtggaagagcgagctctctcttggtttggttgggtttaaaaagaaatggtccgggaactttggtttagtaatttagaaatcgaaacagagcaacaaaagttgatatggccgagttggtctaaggcgccagattaaggttctggtccgaaagggcgtgggttcaaatcccactgtcaacaatttacttttttgtcttttggtggatgactcttcttaaaataaaaagagaatgtaaaccctccaattcgatgagaaggttcaaaaggatagcaaggtcagattatggtgttaatatataaaggagacattaagtggtaaccctagaaaccctttctctctcgcctattgttgccgttgcttgctatctttcgccgtcgtctctttagcttcttgcgaagatggttagttctctcttgcactttattctcgtcttcatctctctccctatacgtctcttgatatgattttgttatagaaaaacgaatccttttagtgaaatttcgagtcactcaagagttttatgtaaattctcttttgatatcttcttctataaaaagcttgaatctttaggttttagtcacgtttacgaaatatatattagcttattagaagtgtggttttcatcattgggttgatctaatgctctaagctaattttgtttttgttgatgtggaacaggttcttcaaaacgatatcgatctgcttaacccacctgctgagcttgagaagaggaagcacaagctcaagcgtcttgtccagtctcccaattccttcttcatggtaatcaaaattttaaagctttctccttctcttgaaccctttagcaaataagtctctgtgattagaactgtatgttaatttggagtttaatgattttctcataatccctagctttgacagtgtgttatgtgatggcgatttttggatgtaagtttgagaatctatgtaactagtttcgagtttgtgaattgtatgtatgttttgagtttgtgaatttgatttgtatctgattctcatttactcttttatggactctgattgttgtttcttttcttgtatatcttactactgtaggatgtgaagtgccaaggctgcttcaacatgtaagttctgaaaacaatctctttctttttcgacattattacacatatatagaggaacataatcttatcgggttctgttttggtatcgcagcactactgttttcagtcactcgcagactgttgtggtgtgcggaaactgccagacaattctgtgccagcctacaggaggaaaggcaaagctcaccgaaggatgctctttcaggagaaagggtgattgattgaagcaatcatcaaaataatgaaggctgttttctttttcttttttttttgttgttgttggctatgatgttatctctggaattttaaaatgtttggatttttaatataagtaagcagagtttgctcttttacttttgagattatccccaagtctaaaatagtttactgcttgcttgcatctaatccatttggtatctcaaaatactcactttgattggttgtttgtactttatatttcgtcaaaaaaaagtaattaaagaagttaagaactaaatgttggtacgtttgtgtttgaactttgaagcaaccgttatgcaagttttttatcaagctggtcgccaagctcccaatcgttatggatcccaaacgttgttttaaaacactgaagaacgaggttgttgctagaagaccaaagacatatgagagtaaaaaagcctttcatgaacatttcagggctttctttgatcaaattggtaacgaatccatgaaagcaaatccttcagtgtcaactattaatatttgaaacaaccaatggtaaaggaggactgaaaactggttggtattaaaaaagagacaagcttatgatgatatctgattcaatcggtaagcttcctgaaagagcatcctactgtgagcttggccttgcctcctgtaggttggcacagaacgttctgacactttccgcataccacgactgtctgtgagtgactgaaaatagttgtgctgcagtaaaagaacaaagcccataataagttttaagtttcttaatttatcttatgtaacaggaaaatattgatttcaaatcttacatgttgatacagtcagagcacctaacaagctacagtaaaattaaacaaaaatcagagtccacagaaagagtagataaacttcatacaagtaaattagaatccgattaaaaaacttgaagtattacagtttctaaacagagagatttggtttttacaggattctaaataaggagaaaggtttcaaagttttattaccatgaaataggaatttggtgatggaacaagacgcttgagcttatgcttcctcttctcaagctcagccggaggattaagcagatcgatatcgttttgaagaacctgttccatatcaacaaataataacaattaactttgcatctcatcagtactcaaatcaaatgacacaaccacacttctaattagcttacttcccatctcgttaccgtgattaaaacccttataacaaaatcaaatcaggagatgtaaatggagagcatccagtgcaagagatctaaccatcttcgcaagactctcaagagacgacggcgaaagctagcaagcaacggcaacaattcgcgagagaggtttttataattactcactgccggttgtgaacaaacgaggatgggaatatattaggtttacttagttacttggagaccaattaatctgaaaatcttctagaatgggcctagagcatctacatagttaagaaaacacaacaaatttgacctttcagtcaaagtagaggctttatttacattctctttttttttttttttttttttttcttttttttttgaacacgaatttacattctctttttatccataaataaacaaacaaaaaacatcctaaatttgtctagttttttttttttttttttttttaactttttcttatgtaagtcttgtttccaaacatttttcagtatgtagagagaatttcaataatatactaatactacatccataaggcacactgcattaaagcaaccatgaggtgaatctgattctggtagctaagattcataacatcaaaactcctcaattacgaatgatgtggttgcaaatataaactcaaagtaataacaatgagccagagattacaaaggtttgtggaatgttcatcacaagtagttggaaacgatcaaaatgatcaaggctctgctatttcaatattcatccaccgtgcagagtcgaaatgaaaactataacatctttatcttctaatgttgtatcgagctgaccactaagttcccaatcgcagtcattaaccagcacgagaactccaggcctcctgcgtttatgaattccaaaccaccattgttattaaacactaaaaacagagttcttgctggaaatcaaggaaagaaaagagagaagctt

SEQ ID NO: 1377 - DNA, 142001 bp, Arabidopsis thaliana
gaattctcattagcataactccatcttctgtactgacgtgggatagaagagctacataggatactgggttgttgaagagtgacacaaaatgcatgttatatattgtttagttatagcattagcaacgtgaaacatgaaatgaaatctctatttctgactctcctttttattttatgtgtgaaatcagtttggcagaaattggaagaagaaaacgcagactttttcagggcatattatataaggctgaaactgaagaagcaaataattttgttcaatcatttgcttgagcaccagtaccatctcatgaagtatcctcctggacctccaaaagttcctctggcaccgatacaaaacggaatgcatcccatggcacctggtaataagtctgaaaccctatatcacctaaaaacttgtatacttatcacaagtaaaataagtttgatattgaacttcacttttatttaacactgttgtttcgcagtgcagttaacatgccgatgggatacccagtactacaacatcctcaaatgcatgttccaggccatccccatcatcttgatgcaatgggagtatcgagctgccatgttgttaatggagtccctgcccctgctaatttccatcctttgagaatgaatacagcgaatgagtaagaactaactcgcagtagaatgattattatcatcagttgatggcatgtcctgagaaaaatctccatttttcttagtatggtgatcgatacaactgcgaacgatgcaactcctcaagtgattccaccaaacagtggtgcgatgcctgagatggtagcgagtccagcttctgtggcgtcaagtggacactttccatttgctgcttcagacatgtcgggtatggtaatggacacttcagtacttgattcggcattcacatctgacgttggaccggatggagaaggagccgggaattccagagattccctcaggtcatttgatcagatcccttggaactttagcctttctgatctcaccgcagatttgtcaaatctgggaggtaagtttcaatgtcatccttctctttttatttctggctatggaattgtcagttttataaagagctgattatcagataaagatatgtatgttgcagatttaggagccttaggaaactatccaggctctccatttcttccatctgattcagagattttcctggattctcctgaacaagaggacataggtactctcttatttttcaactcttcttcttcctccggtttcactagtcttgaatcagattgaactagatttggtacaatgaataataaattgaaaacccaatttgaagctgaacataaacttcaagtttggttgatatagtgttatgctctctgatcattatttaaattgatgcacattatctctttatctgtatgaatagaggagtttttcgtggattcggtgcctggacctcgttctaattcagatgaagagaagccttgaattgaaaggtagagacggccataatcatctacagtcaccaagcattattaaaataacaagtattgatatataaatcagagtattatgaataaaatgaagctgcagttgtagtctccttgtatctctattacaattctcttaaatgaagcaagaaataggcgtagactagtttccttttcttttatttgtttcaatcctatgctttggtcatatgttatgttgtagttatctctaaatggatattttctttaaaaacttttttagaaatatgtcttacaaaacactgtaaatgtcgttgaactctttagcagcattctgcatcaaaccggatatgagacataatacgcttgagtgtacttataagaaatttgtctaaatgaggtgagagcgtaagtgtacttataagaaatttgtctaaatgaggtgagatttatgtttaacagatcaaaaattaatgatttatgtttagtctttcgcgttgtcgaatccggaaaagaagcacaaagcttgaaagtactaacgaaataaaaaggcctataatcacacaaatcagactgtacaaaaaaagggaaaaaaacttaaaagcatcaatgtttcttattattcgatgatgctatgacataaatgcttataaactattcacaaagtcgttgattcagtctatcacgagtttctaagtttttttacatgaaggcttactagagtcaggacctcgcttggcgtacaaggaaccagccgctgatatattagaaggcagagagaccgtcgcagagagaggttggaaattagtgtttccaacgaaccagtagagagcccatttgaggttgcagagagtatactttagtgctttggtccaactctcttgcttgttgaagctctgtgttattgaataccccaatactttgtccttttcgatcctgcaaaaaagattttatatgagaaacttgtaagtttttccattgcacccattaacaaaaaaagataagcgacgacaaagattttggtctaaaagaatggggacttgcttgtatggaaggttgaggcaattatctggtggaatattgttctcttggtcctttgaatttgcaaaatcagcaaagtctttaagacacatcaaatacagtgtcatggctttatcgtaccgagtgctccaaaacaagttaacaggaccaaacctgccgaagattatcaacagcttttagttaaaaagggtcaagaaaaacaaagacaaaactcagcacaggacatctgttttcagttcaaccccaataacaaaccaggacaagaatatgcaatttacttacagctcataagtttcgttgttgctgtctacaattctaggataactccccatcggctgtattttaacttgacatcttaaaaggggttactggtcaaggataaacttcatatacagtcaacagaatcaaacaaaaagggtaaaataaggaaaaggactgtgagatagttataaggatactgaaactttggccggaaatagttacacatcgtatggaggagaagacaggcttggccccaagcagcattgatctcatcccactcaacctaaatatgtttcatgttgtttagacaaaaatatgagcagaacgagattataaacatacaaggaaagtagcaaaacttacttttatggcagggagtcttccaagtcgaaaattgttaattgtaccaaattccccatcattccgtatggggaaggcatcaataagtacatttgtcttatttaataactctaaatgtgcttgtgaaacttcaatctttgccaagattgcatctctctcttcctgttaacaaagacatatcttttacactagatctaagaaacgagtgttacactgataaagcctaaacctaatcaagtgctatggctactaataccacaataagagagaactattatcaagtgctatgaatactaataccacaatgagagagaactattatcacgaatctgtgaagcaaacgaatgaaggctctggactctctaaagtatcatttagtaaaatgaaaaataagggagaaccctaagagtatcaccagaaacgcacctgatgggcaattaattgaaactgaaaattattgaactcttgccaatacctataccagaaaagtcgaaaaaacatgtcagaaaataaaaccaggcattataaatgtatcgttggccaataaggaaacagtgagagagcttaccgatcttcaagttcgttaaaacgatttcccttgaattctagctccttcagttgatggtttacttcagcattttgtttctctgtttcttctatagctgcaacaagttttctttcttcttcctcaatctaagtagagcaggaaacaacaaccaacttctaacttaagattatatgaaattcatcatctttagagtcaaacaatatggtaaaagctgaaatataccttcttcttttccttgagaaaatcagcttcactaagaacatcttgcgtctctccttctaacctctgaacgcatgcttcgtatgcttccacgtccctcgtcacatcctcgacttctttttcaagtttatcagacaataccctcatgcattctaagcacaatggctgttcaacctataaaattcaaaaaaggggaaagtaaaacatattatcaggtccacatgactcaaatttatcgagcagatatactcttgtaacaagaacaaaaacgttagagcgtcatgatacctgtgtctgagttctagcaatatcaaaagcacgagttaagacattgatagtcgcattaaagccagaagtatttgaatgtaagggaccgttttggcccacttcaagagacagattgtgagaaccaccagaatcagaaacaggctcagacttatagacaactacaaacgattcctccatcgcctttccagattgagtagcatcaggctgaggtgaggacgccccgcgaggacgtggaggaatgccctgagattgaggaggcttatgtcgaggtaaaacaacaaaagagttgtccatgcgtgttgaaccaagaacactgttagctccatggatagatgagccctgcgtagctggatgcaacaaatcacattttcattatgaacttttagacacataacaaatcattcatcatagtaataacttaaaatatgctcgaagaagaaccaatcctaattctccaaggcctaacttacagattggatctaaatcaacaattgaactctatctatctatgatgaacaagaacgcaattaccaaacatgaattccaaaaaagggaacgagagggaggaagaaggggctaaccggacggagggggatcgttgaagaacttgccggcgtaggaatcgacgccgacgatggtaagggagtggtgacagttttggcagacccatttcggcagattcggatcgatcgggatagtccgacttttatctggaatctcctctttcctcatcgctctcccagtttttgtgggggttttaaccaaagagaaactccgtacgcaatcaatctagggttagggtttgaatttgtctacaccaaacaatctgtgtgtgtgatgcttgttactaatctaaatcattcaccgcctaattttagatttctctcccagagatagaaatccgataaactgaagaagaaggaagaccttgatagatttgtagacaaaactcacacggaatttatagttttaaactaaaattatcatgtcttaatcaaaagcaccagtggtctagtggtagaatagtaccctgccacggtacagacccgggttcgattcccggctggtgcattgttatttttgccttccaaatatttttctatcgctcaaaacttcacaatgcacgtgaacttcgattacattaaaacataaacgagtttagtttgtaaactattcaagtttcattagattgacgataatttttgttgttgttatattacacacacaaaacattaagaaaagaaaaacaagtttgtatcctcgagacctcataaaaatcaagtttgtatatcctcagacctcataatttaattaaatcatcgttacgttttaaaaacaaatcactaaataatgggcttttaaacactaatgtatataagagatatgagccgtccaaaaaaacaaaaatcaacggtctagaaataatagctgcaaaacaaaacaaataaataaagaagaaaaaaacaaaaaccctagctagagaattgtctcagaacatgaggtcttcgttgctcggcaatcttcggaagaagttgaggctcccatcgggtaaattattgcggaaccacggtagttgcacccagtagcaaataaatacgaaaatcaaacacttacgaacatgtagatcccaaccaaggcaaacgacgagcatggagcaataacagagggccaataagataatcaaaacgaatggccgctcaagcaacgtaaaagccgctagtaaccgttcgccttgtgtagcagcatcccccattaataacatgacgttctccataatcttcctcaacctatcgtacctcatcctaagaatgttcaaatcgttctccgacgacggaaacgagtcaaactcttcggctaactcgtctaggttgatcgagtcaagtttccgtagcttcaaatcgacgagaatcaaaggaggcggagtgacgttccgataaaacaaccagttatatgtttgcctcggggacttgaggatttcccgtaaaagtataaccacaatgcaaagcacaatgcaatacgcaactagccacgaagtcaccaaccaatatatgtagtactcccaaaaaagaaacacaaaactgactccaagcgcaatgaatttcggagtacaggctgtcgtggatctgaccgatgcaatgaccgaaacacaccacaagaccatcttaacgactgtataaagcctatcaaaattatctttggatattcttatactgaagttcctactctttggtttcaacatatctgacacaacttcgcttctcaaagccggctctgttctcgcaagattcgcacaattaatctcaacagcttgtgctctcaacttgtcgatctgatacatggacaatggagatttgtaatgagctttcggtaacatccaacggaaaggagctgaataccgtgcatacccttgcgcaacataaacaaaacgaactgctagctgaagctctcccatcttcttcagtccgctgcttcccaacttcagaataggatacgagcaagtgtaaatccagtcactttgtacccggttcaatggaatcctcactttcccgatcggaacatcgttcgccttattcttgtcctccaagatttgtcgattatcgtagattccaagggttaacaccgtacacttctcgtaaacatcccacgaatactgctcgttccacttgggtgagacactattaaccacggttcgagtcctggcccatttattcccgtatttagccactacgtaactgtcgatagtctgttttttctcgtcgcttccctttaaaccggttgctcccaagatcccgatttctaatttcccgagcagaccgggccataacccttttacaaaagctctattgtcgctcgagtattgggtgcattcctcggcgacgtgataagcttgatcagtggctagtttcatcttgagtctgctagcgaacctcctcgaatcgccagccggtttgacttcagtcggcatttcaatgtcgtagaacaaagccggtgcggaacttggaactttgagcggagtcatctctgtcagcttcttcttcaacgtccctatgcatccttcgtgttgttcgtcttctctgtcgattaacctaatgtagacagttccttctaacggctctgatgcaacaaagattagatcttggttccatgacgggtttgtaccggaagaaactttcgtttttagagcgactttacctagagtagctgtcacataaaccgaaggagtcttgtttttatccttggaaatcaaatcatgacctgaaacaatcgtaaccctaacataacagagccttggggctaggtagaccttaggtcgcgtgttgatcacgcgagaggcacacacttcacaggcgtctgaaaaccaagcctctggataaacctcatcaacttgtgtaccgaaccaaactgacatcagcaactccatgtaaaagtcggtttcggtattatgcatagagtaccactgcggtgcgattcttgcatcgggaggaaccctagtcggaatttccgaggccagcttgaagttgcgcttgttgattacggtattggtcggaccgtctttaagagtaaccgacaagacatcacctttggatttgtcgaaagcaaagacttggttccaatccatatttggtcccattggcagatttttggtagaggatttgtagttcccgagagtgatttcgacgacggggcaacatatgcgggcactagggtttacaacagagttgttgatggcttggattacttgtacgtaaagaaactccatctgttcgacgaggtcgtgtgaagaagttggaccgtaacgagggtttcgagctcctctttctcctcccagctttggaaagatttgcttgacggagaattcatctttattggcagccatctctgaaacaaaaacaaaaaaagaaagatatgaataagaaactgaatttcagacataagtaaacacacgaattagtaataaagctttaaacgaactgacttagatagctaaacaagaaccctgaagcaaatacaaatctatggggaataagaattagactaccaaatttttgatcctttaacatatatcaacagttttcaagttccgagtgaataaattaggtattggatcttaggggaaattaaagatcgaacctttagtagagaaagaagcagagaagaatcgagatgaagcaaataaagcggtaaatatttgagagatgagtcaaaggaagtaactcacagacaatgtttgggacttgttttgcttccgtcttctccggtcagcttccttaggtttcttctaaagcaaggcttgattattctttttgatatatatatatatatatatatattatatatatatatatataactcatatagaatatacacaaagagttgaatagagaaacaagatttagagaataatctataggatatttacaaagagtcgaatgcttatatgtaatatcttctttcctaatagaaacaatgtaatctgctattatttgtaaactaaaattgttaacaactttaaaacgatgaaaatgtttatatgaaattaatttgcaatactttcccattttcgtggtttcatagaatctgccgaagaaaatctacgaattctctcattggcatttttacttttctcttggcgtttgggtttgggtttggttttgacatagtatttaatgcaattatagagagatccaaattccaaattctatacaaacgttacaagactattaaaaacaattaatcgcgcgccgacaaaccgggcagaactatgcaacttgagccacgcatcaatacattcggtatggaagcaatgttcacattcaggtaaacacctaacagtttctttggttgcgtattccgacaaacaaatgggacatacaacatcactggacccggtcgggagtctcctactctcccctagctcaactttcttgtatgactcaatcgtagactcatcgagacctgtcctcgcgacttcctcgcttggctgcggcattacggatccagagaggcgtgcaaccactgcgtgttgtatctgggaagagactctctaggactttacaatcagggcaatagtaattgttgtgctccagttccttaaaacgataaccaaattacaactgtcagtcattcggcagttgtcctaactacttagaatcaaaagttaagaagcacggagatgtataactgcaccttaaagcgctcattcgtaatgatgtcgcacccagcatgaacccatacgttacgcccatcacaacacacgtaatacatcaaatcacgtcagctacatattgtagatgtaatagtttataactcaggtcagtatttcaccgagcatggtcaaagagactcttgcagatgccacaatactgattggatttccacaactgaaacaaaaaaaattggattcaactctttttggccaaagaaaactgaagagtgaggaaattttggtaagaacctttgaacagtgtctgaaccatgcatagtagattaatgagcagaagttgagaaaaaaggatagtagaaataaatggatatgaggcccatattatttcaagcccaattgtgtgggcctcagattttgtttgaagctcattaatttaggcctaatgtggtaagcccacatttattctcaccaaattttgccaaacacatatatttcctgatattacctattctgattattttaacaccaattgccaaacacatttatagaatcctaaacttaccagaaaaaataattcaaataataaactagaattaatgtgaacaaaacttgtaatatataaactggcattgatgcatttaaatacaaaacaattaaaatggttatattgaaaccataattaaatgttcatacaaaacaaagatttgtaaatttagactaacaaaagttaggtgttgcaactgctttgacgaatgtcttttatagtgataaactaagtgttctaactaataatatgtgcttagactaaattttggctcaaattcaaatatttatatgagttgatggctcttttcatcgcccgtggtgaatactagaaaggactacttttcattttcaccgtaaaggtaaaagattcatacacccttggcatcatctgtaaactttgttattttggttttcttactctttgtgcagactccatggttagataacatgcattgtgtttggacaagtcattgaaggtatgaagcttgtgaggacacttgaatcccaggagaaaggttgcagaatctatgcctgcggagagctcccgatggaagcttaaaaaccaccattaaaaccggtgcattgtcattgatatccttgttctgttttcttattatgactattcttaatagagtttctctttaaacctgaaccatggttgcaaccatggcttgttgaacaattggcttttctcgtcttttttgtcttcccattattgaaccggaacatcaaaccagctcattttttttttttttgaataaaatgtcaaattatactcaaaagaaaaaatatactttttacatcagcttttttgatattttgataataagagaaacagagctagatcaaaaacagagtaaatagaattgagagagcaaaaacagagtcttctttcttagaggatgctatggacgcatggcaaaccagctcatttttcctacatctcattcattataaagcgcaagtcatcatcttgccaaacagcaaatagtctaatttcgttatagaatggtccaacactaaagcttcttaaatattcattgggtttgtgttgtgtatataagttcaatattcagtcagattattcttgcaacatattctggggacaaataaatgttactgaagaggaaaaggatttgaatactagaaatgcttaaagctttgtgtgactttgagacaatgcactgtgaaggaatcagagaagttgctgggagattctgatggaaacaatgtcaccgtctgttcctgctttcattgtgtggtacttcacaaggattcctgcaatttagatttgtaaaagaattgtaattgtgtttcttacttgctagataaagatggttgattatgcaaagtgatttggacatgtaccttcgttttcttgcagtcttgtgtgaacagcaacagcgtggggtgcgataactgctttaggttgggaatcatttgactctccggtccaagacttgaggttgagaatacctattattcatgtgaaaatgtatgagacccaaggagaatgatctaaagaggaggagtaaaggaacagaaaagtaatgtagatttgaagttacctgaatatgaagattctttaaggtgtttgaggtcaaatatggctccacaagctgcacttgcgtttttctgcaacttatgagatccgatcagattgtaatcccagcttccatctttgtagccttcactaaggaagagttcaatgtgcctagcatcaagagtttgcattgttcctatacatagtaaaacagaaactctcttagttgcaatttagttatttcatagactaacatcaatagaaacagactagaagttgattagtgtcttttaccatcacaggtactgaggtcacaaacagggcaacgtacaagctgtaaatctggaacatgagataagccatgttatagttttctttttctgcagtagataaagtttctaaagaaattgttcttacctgcaatccaaataccgcttttgatgtcgttgataagacatgaaccactggattgtaacatccgttctatggttccttcccttgggaatttcagacgaccactcaaactctcagtcaggagtgaagttcgagagtcaagaacaaaggcacctatccgcatccaatctataatgacagtgtcaaaacgagatcaaaatgaggctgtgatcagcaaatgaagtacttcaaagtcaaagatctgtacaacatcttaacatgactaagaagagagtatgatggatccaattcaaggactaaccaatatgcttctccttctgacggaacaagtaagagtgactcccatctgcagttttccatatcttttcttagtttaccattgtagaagaatgtatcataagtccgaaatggatgtgaaacttaccaaaagctgaagcataaatcttaatccaggtggaagaaacgggaaacggcacagggacctgaagatcacgcaagcaggcaaacctccaaacagtatcctccattgcgatcttatagaaccatttgtttgttgctcccagcttcaccagtgatttaccatccaaaaaccttgaaatgtatgtccatatatcttgctcatacctgattttgcagagaaaattataagatacgctgatatagagacttagatctaagaaacgtgatatagcgatgtgattttcaaaattcttcctcgtttgaatctggattcagtttttgacgattgaaagcggaataatatgaagaaaaactcaaatcccaggtttcagcaaccacacagtcacgatcagagatcgatataagcatctgaatctcatacaaatcaaattgattccagaaggtaccgaagatgattgatcgaactctatctcctagatccatccaatacagtaagattaaacgccgtacaaacatttcaaaatcaaattcgagctcaacccaaactcacacacacaaataatatctgagaatagatctatttcgttcataggggagaagaaaataccatgaaaagcgagactggtaagtctgagcagagcaccgtggagatacacagccacgaattcctctgaggatcttcccgttcttctggtcgctgctctgaacgattcttctcttagctctaccatcttcttctctctgaatatcgttcttctgttcgttgctctgcaccaattttctcttccgtccaccatttccttctcccaccggagctatcatcttccctctactatctccttcggcatcactagatctcgtcttcattctctctctctctatctctcttctcactcagtatctcactagtcgctaatttgttaagcggaaaattgtttcagaatttggtttttgctctgaaccgtgtagctgtgatatatagccgcgagggagacacagcgaatttgaaaatttcgaatgtcaaatgacgtatatacccctgtaacaaactttctacctctgtagattttaaaatttttaaaatacttttcaattttagttagaacccggtttagcaccaacagacgtagcattaaccgagagggtcccagtgagtgtggtttccatgattatgaaaaatcaagatagtatggattttttttaatagaaaattcagaaactgtattatggaaaatgttaaaagctatattaacacttcaacattttggaactttaggttgttggctgtgaagttattttcttagagtcggtgaattctagacatttacaaaattgctacgccggaaaagtatctagctgaatgtacatttaatgaatcaatcggaaagaagccagcatcatgtcaagggatttcccgtaagctagccgccgaggaaacaaatcggttagcttcccaccgccattactgttcaattagaaagcaagtttgaacgtttgcaagaatggtttagacttaagagagctctagttcatgaatttgcggcagtttggagctttacaaaggcagggcactttgatctcttcagattcatcaacctcaaagagataatcatacctgtagagaaataggttttcatgatcaaggttaataatgcatatggatttaatctatatcttatgaaaagagaagctgaagaaatgttttacgtaagctcttccccagctgcgacattggtttttgcaatgaggacgattctgttgtcttctccatcacccatactcactatacgagcatagcaattgggcatacactgcacaagacataaacatccttagtattaattaccaggttttgatctcgtgtgccaatttagggaacttactgaatgattgatcaatcgtgcgatgttcccagagtctgtggcatcaattactatctcttcgcttatcttgaatagctgcgttgttgttgttagacaataagttacttattagatgcagcggttaatgttttaatctaagcaagcaagcaatcggaacttacgtaacaatctttgccctgcgaacgatagtttgcctctctcagatctgcaacacttctcctaactttcaccccacgatactcgatgatctgcacaagaattttaataatcagtagttagtttgcctcaagaatttcaatttagccatatcaaaaccacgaataatacaacgtaaactaaataccatttctccttcttgaatacttttccttgcaaacaaaccccatccatgtatgccagatttaccaaagcagactcgaaaattttctgtcctctgaagaagataatatattgtttataaatattctaggataacaagatggagaaaatattaactcttcatgaatcaatgtttacctgcaaatgttttagccgttctctgaatgatgtaaaatctgcttcctggtgtgtaacaaggtaaatggaaattaagatcttcctaagatattcagaaaacgttgccccaagaaagcaaaacactgacatgaatggagctcggaatgagaaacttgccttaaaagagtttagattctcgattgcactcaaagaatgatggcttggtcccttaagcctgtgggatatagcctccagatcaatcttctgaaacgtcagcagtaaaagatatgaagtagtagctttgctagggaatagttaataacgaaagactctccaacgtccaagaataaacaagatccccagatgcatacctttgtgtttgatctactatagatacggcatcttgctgcagaaagagaatcaaatacacgactctgttcagcttgggtttgggtttggaaacctggaagcttcatcttcttggtcaaaacgagtcttgaacctttggcgcgcccatattgattctgaagcaaatttctagagccaaatactcctgagggtgtgtgcacaactacaacactatctggatctggctttctacatagtaatgatacaggcgatcagttggtcccagtatcacataacaggtcagttaaagaatatgtcggagaaacaaacctgtgaaatgaacagtaaactgacttcctggttctctgcacaccatttttttccaggcagtgcaactaaattccatagacaaaaacatcacttacacatccctaagatgattaactaacaggacagaacacctttgcaaggggtttaacgtgaaaaatgaagattatcataagcacagaggctaagcagtttaaggacttgactaacctccatgttgtaacctgcccgtgatgcacacattgcgtggaagtgagttgcacacttgcagcaatgaacgcaggaaccatgtgtctgcttacaaattgtgcaaacctaaaaggaattttcagaaaatatgaatgatgtataatataataaaacttctaatagaacatgttggttatactttccacttctagcattcatttataccttaagaaatgaatttgctggaattttgaaaagtccaacagcaggctccatattttcatgattcaaaaacccaacttccggtcggaaccaagcacatgttacatgaacccacaaaccctcaacgtcgcttggttttaaagcaccacctacataatggaagagttcaggaaagaactagaaatatggaaagtgagttcaatttagagcacatctacccaaaagcgaattctcagaatgactgtatggaaccttgtgacaggacagtcaagaataaaacatcactaatgcaagatcaggaaaaaaatcataaagagagctaattctgcagtagtaccttttacaggacaaagacaacaatctctctcaatgtctggtgtttcacatgctctgcatacccaggaagtgaggtcctgagatttgcttaccccataacattcttggtgcacagccacttgacacctgcttacagatttggtcagatttatgactcatgtttagttataagaacgctgtagaattcagtataaccaaattatgccattaaagtaacctgttacagatgatcattttattttcttcccagtcttctacccatctgcatacagcacacctttcagtcgtccacttagccctgactggctcatacttttctgtgcatataaaataagtagtaagcaagtatcttagcaattttaaactccaaaagaaggacgccaagaattaagatatactctaccttctagcaaagagagcatcttttgcttatccaacatctgggtttctagagtataggtactgaattctgcaatctgtaatatcttgttgtcagtattatacttcttatagacatcatgcatgtaaatttcaggggtatataagggaaagtttatgagagagttaagcataagggatgtacccatttttctagaggtagcattgtgtctttcactcttacactatacttccactttttggctctgcagcctgtatgccgttcccattcacttggtgactgcttccttgacccacatgaaccacacttgcactcaattctgaaaacaatagttccaagataaatgtgttgttttaatctctggaacaacaagagaatggtaacagaagcctaggatcaagcgcagaattgtcgtcttcagagaaaaaatcatcttacggcattgcattgtacagtcatggacaaacaaaatcctgctcaaatgaggaaattgaaataaagatgatgcatctaatacttacgcatgaaattttctgatatatgtcccttccatgccattacagactacagtaatcgcatcaggcagcccagtctctgttgtcttttctgtagacctgtcccaaagaggttgtgaagaggaattttgcaaattaaagaattagcaatagaacaatgcaaataataaaagcaggagaagatatttttttcgagaagactaaagtgagagaacatgagatgttaacaacatacttaaacactgagttctgttcttctaatattgttggcgtaagctcgtgttggactttacaatcagggcaatagtaattgttgtgctccagttccttaagatgaaaccaaattagaacagtcattcgacaatagtcttcaatacttaaaatcaaaagataagatgcacggcgatgtataacggcaccttaaagcgttcattcgtaatgttgtcgcattcagcatgtacccatacgtcacacccatcacaacaaacctaatacatcaaatcaagtcagctatatagatattataatttcttactcaggtcagtatttcaccaaacatggtcacagatattctcacccaatctccatcatctgaagggtgccatattctcttgcagatgccacaatactgattggatttccgcaactgaaacaaaaatttggattcaattcccgtcgatcaaagaaaactgaagagggaggaagttttgataagaacctttgagcagtgtttgcataaaagctcttccggttgtgagtctttagtcctttttagagattttaatggcattactgagccacaaccgtcgcatgtccttatgtcctcatgatatgaaccctacacaataattaaatcagcaaatcgtttaggggaaggtatttccagtaactataaaagagtcagatacaaacagtacatctacgcctatgtagtatgtttaaacttcatgacttagaacagaaagtatatcaccagacgtagacactacaagatgcttatagaactgtccagaattgatttacttttgtcttcccaaaacaattagaagagcaaacttgaacatctaaccaaaaaaaagaaaaggaatatgtgtcaagaaaacgtgcctgaaatctagaagcaggtccatagtcctggtcggattccgtcgcagaggaatctggggagatgatttcagcatctccaaaattaccattttctgctaaaactgcttcctctagtgccttgttaaattcacttgccttgtaattgaacaagtttgtctgatcctgaaatctgaagagatgaaagactagtaaggaacaagaaacaaacacacaagtatgaaagatttccagaaagagcgtctcatgtacttacttgtccataaattccgtaaatggatacaccatcccttgtcttacccatgcatagtcctgttaatgaccacaagttttcagaaaaaaagatagtaaaaataaacgccagcttgaagacagattaggattaaagagattaccctctgagttccatccttggagtacccaaaaaacatgacacaaattgcgccagggacgcaatgtttcaagaccccatcaggcgcttgtgatatcggatcgatcaccacagccggccatgctgggaatcttttcccacacttggcccacacaagatcgccaaccgtaaattcctctggtttgtacacgcccttacgcgaggcgtcggactttttcggcataccaaagttagcatcgtcgtaggaaatttgaacatcccagtaatcgcaatctacttcactgctgtctccgttatccttacgtggaaacaccttcgagtctttgctgcgatgcaatttcgagcttccactgaaacctttgaccttcttccccagagatacgtcgtcgtcatcatgactagactccgtcgactctcccttgcgacggctagatttccatgtaccaacaatggagtccttgaacctagaaggaaccgctcgaactctgccacgcgaagacttggactggtcagagcaaacttgttgagattcttctttgcttgtcaaggagcttgagctactagtaagaagttctggttctttgctacatggttgatccacggttgctctttgtctcttcttatacactataatctcaccctttttcctcccatactcaatttctgaatcaattttgcaccgcttcagattctgattctcgaatgtcgtcaaggtccgtttcaaaatcatatcctacctaagcaatcctcgcctattcaacataaacgactatccaaattccgattccaaaaccctaatttcatcaaacaaaacagatttcgcacttcggacctccggaaggaaaaagaagaaactcgtaacgtttaaattcctctcgcaaattggctcaatagtcaacgaacccaatgcgaaaccgcttctctaaccctaaattcgaaaacgaaaaccaaattctcgtttccctcaacaggatagaattaagaaatcaaacgacggagaaatcgttaaactctaaaacgacggagaaacaacaaatcctcctcgtagattccctggagaaaattatcagtcggtttcagtacggagaagataaaaccttaaaatcgacggcaagggaaaacaaaagaggaggagaaggatctttgtgttctgatgaaggagacacacaccgtccgtcgtcggtttatatatttctccttattattattttatggttaattctgaaattaattcgcctaaacaaataataaaaacgaaaataaaaaaaacgaatatgctgacgtggcggttgaatggaacagtgtttggctccagggattggggacgagggaagactgcgaattttcaggcgtacgagagcgccaagtcgaaatcttccttttcatcaaatctgacgtggcgcatcaataaataactctctcgtttttcttcttgtcacacaacttatttagaaaaatcgaagcttgttgggctacatattgggcctacgatgtttctcgtggaacattttgacaattaataaaagaaacaacttcgagttaggcccaatatgaacactgtatgtttctcatgcaacaacattttgacattaccagacaatggaggaagatgatccttttttcatttcaaataagactcaaaacttatcatccaattatacgttcatgatttatatgaaagatgagagattgcatttgcatacaaaaggaccatatttttgttaatcgctccataatgttagccttagggtctagggacgtctatgcacatttacaaactcataaggaattaaagaattacgtatatttcactttccaggaacaacaaccttcaaaactcaacttacatgacaacaaattgagatccaaaaagaaacaaaccttaaaaaaacaaatatcaccatgttgctctaaagtctaaaccaagaccgatttccacttgaaaatcatattgccgaaccaaaaaaaaaaaaaaaaaattacaacacatatggactataaaatcagtgaccaatgattatggggaaaacaaaaaaagtacctttatgtacaagaaaaaaaaaacagaagatcttgaatcaaacactagtactagaacttggatgtgtctcaaaagagggagggctgcgagaagatggtgagccgatagtgccacgaatcctgaatatttcaagaacaacaaaagcaagtaacgtgactgacagaacaaatccatatccaattttccatccatctcctccattatccgccattcgaattccaagaacaatgttcactgctccaaaaaagagagagatcctcccaatccaatgatgataccaattccaatatctcctcatctttgtctccttctgtggccgtgcaaagaaagccaaaacctgaagagtgctaaggactagaagaaagatcccaatgcctcgatgcgcaggtatatccggctggatcctattgtaaagctgaatcccaagaataactgcggctaaaccgaagataaagcccgtgaactgaaaaccgatatgaagatagtaccaaagagggtctttatgtcttagatatcttgctaggattgcccctacaggaagtaagaaaccccatccgagtatcgccattactccatgttttgtcttctccgtagaagttgtcgtctttatggaggttgctccactagctgcattgaccaagaacatacaactattgaactctcccctgtttttaacatgtatagattagactagtatatacattatattacctttggaaaaatcgacgatgactgtagttttatcatcatgcttagtcaaacggcctagcttggaaggataagcagtgctaaacgctagaatgacagctctccgaggaactctaacggcgaatttcacctggaaagctaagtaaatcattgctccgtgaagagccaccaccggcgggactttttgtagttgcaattctccttgatccggcacaacttggtctctctccgttccttggagatagtattgtttgattttggcgtgaccctttttcgaaatccatccgatcatcgcgcttgatccaaccattcttccttctttcgagaatccaatcccaacccacccggttgtgtataaagccgatactataatcgtcatcacattgtctctgttttctgagtactgcaaaacagagcaagcagcgttgaaaatcaaaattatgggttttaggaaaagttggtttatgtttttcggtttacccgtaagacgaacgtgttccaaagaggagtacagggcatgttatcggagatattgctgtacggtggagggaggaaatcggataatcggtttgcaaaacagagattctgggtcgaatcgtttatgacattgacgtcatctgcagctaagaaaggcagatcttgtccgattaagaaacagaggatgtaaaatccgaccaaagttttcatggttggaatcgaaacagagacgagaaggagcgaggaacaatggaagctttttgggtgatggttacttgaagaagaagaagagtgattgagtttggtggtgaaagtggttggagatggagatcaatcataatcatcaaattgttttaaatcagctccggttggattttgagaaagatacttggagttgatgtttcactggttaagtatcggacaatttatgtcccctctgtcactaaatcgacacgtgaaccgacagaaaaataccaagatgctatgaaattattgctttttctttgccagttaaaacaattggcaattgctatttgaggttgagaaattacgaatagatttttaagatatggacaatctggagttttttactttgcttatttagggaaaaaaagaagaagaagacagagatgggagcgagagagtggggtcgtaaactggaccatagtgggaagtggatcagtcttagtctgaatcattactcattaggtatatttggtcaggatagtgccacgatcaacatcatcttttcttttcttggaggagatattggaagggaacttggaaacaaagtaaacaataataaattaaccaatgagtacagctttacagcttccatgagtaccaatcacacaaacaaacaatttcatttgttcgttgtaaaacacaaactcaaatgagaaaaaaggtattgtgttgcaattgcaaaatggtaatgtaaaacaatttaaacagtattactattacgcatggcgggatcggtatcagtcaacgactaagcgttttatgtaatcgatatcataattcaaaattattcaactttaacataataaaagggattaacataataagttagccaatatggggatgtagctcatatggtagagcgctcgcttcgcatgcgagaggcacggggttcgattccccgcatctccaattttgttgatttttttaattttagtttgctcttcttcttctgtttgctcttcttcttctgtttgcttgctccttttgttctctctttccggtggtttaaaacagagaggagatcacgtcatatgtttcttcagtccatgaaatctatttattttttgaaaaataatttggtcaaccatattctactgcgccaaccatcgtcttacaaaaacttttattcagaaacaatgataactcgaacaccgaatacaatgacaaatggaaaaaaaaaagagacaaaaaaatgtagaaggaaacgtatcctaaagaaacaaaaaatggagtgtgaagagagggtctcgtctctctacttggaccaagcaactgcttcaatatccgtttgagcacttctatacaattccagcctcttcgcaatcgaagtccttcgctgctgaaccgcaggatcctcatccaacaatttcgacaatttgctcatctataatttttaacaccaaaccattttaacattcttactcgtatcttatacaattgtcaatttgctcatataggttttttagtatatctttattgttacctctttctggccaagttcggtgaagaagatgtctagaaggcttcgttttgcttcacggacttgacagtaaacaatggatttcggtatggagtttctcaagccagcgcagaccatgttcacatatgacaacacatttgagccgattcttcggagataagcatcgttgtatctgtcgaatatcgaatgtgtcggattcccacctttttcagaatcttgcgggagtttcctgaagaactcgaccgttaagtaaccagactccatgtccactagtaacagagttgctttcctgctttcgtctctcattcgatccaatgaatccacggctgcacctgatacttctactctgagtgttggatattgcttcagttcctgtagtcatgatgaaaacacataatcatgcttcaaaactcataagtgttattgttgttgttgggtttatgactttgagcagagatattcttacagatgtttcgcccatggatttgtggataagatccttgagaatggaatgaaccgcatcaacagctgcttcagcagggcctctaatggagactaagcatgattctatgagccggcgataaccttgttcaggagctatgagatgaggttgatatccatctgcttcagtgatcagtttccgtacattgtccatggagagatgtttgtcgaattgcagtcttttaatggcagctgggaattgattgtcgaacacagaatttatcttttcaccacctgaacgcctgtaaggttgttagtggttatcaattataaagctagaaaattgaattagcaacaatccagaaacatgcggatgacttacgtgccatccaggtgttctttaaaagtttgatcaaaggcacggcaaatttccatgatcatataaagttttccctgcattcaggagaatgagtattaacgaaggagggatgtgaaatgagacaagaaaccgaagaatgaaaggctaaaaggtccttaagacagaagatccttacaccagcatcagctgctacaggcttcccaagacggcttagctctgtctctaactcggaaattgtctttgtgataagagactgaagtcccgggattctagacttgataacaacttccaaatgctgaaaagttatagctggttttagagcaactacaaaatcttttatgctaaaatcttcatacataccaagctcctcaattatataccttagagagcatctttcctaaatactctgaacccattctttcagttaaatgtctgtactctgggctagtctggaagtaatcacgttcacgccgacgagcagcaatcatatcaacacttttattaatgtcagcttgagaccggtttacaacaccaacccaaggataccttaatttgtatccccttccttcaagtatctgaaatctccaaacatttagaatacttagggactgttaaatattcactaaccattctttagtgagattctcatatttatcttcattgtgtcctttcataatgcagttagagatagattgcttgcagattagacgataatcttgactaatgatatgtagaatgtattactatcatctgaatgtaaacttacatcaacagcattagtgccttggtccatgagatcaatttttgttaaaactccaaaagtcctgtctcctgatagcataaagtgcagcgaagcaaacattaaacaacaagaatcaatcaattcgaaatactatcatcatctaagcattgatgatgctaatcaatcatatatacaatgctccatagaacttaaaccatatttaccatgtcctagtcgcttatatctcacaaaaaagaagctcaaagtgaattcagaaagcagttgtatcaaaatataaaaaaggaagaatctggcacctttgggatcaacttcacgagagatcttaatggcatcagatgttgcaagatcctgatttgcaggggaaatagcaagtatgatgcagttgggctgtcaaaaggtgaatgatcaatctttgttatttgcttgaacacacgacctttagaggatagtagcatcatctttccacaattgaattctgctacatacttgtaatttctttcaaatcatagttaccttctcaataaacgatctgaccatgttctcgatgtcttgaacaatgctttcaggctggccatctacaacataattggcaccatatttcattactctttcactaaagaggacttggggtgtgggatatcatggaaaacaaagactgtctcacttaccaacagctacctttgttagcccaggaagatcgacaagtgtcaaattcacaactacaaacatttgaagtaaataaaatcgttaagagtatggagactggaagacaaatgggaaagatggtagaaaacataaatttaagatttgattgaatttcacaccctgtgtacaagaacctaaggatcctaaagcatgtttagttaatttcttaatgcaaatgtaggaagtacaaaggcttctcttaccattaggagagaagatactgagatgaattgggactgtggatattactttgctgctgcgaccagtttcacgatctgtctcatccgagatctcctgcctcacagcagctacataacaaggaagaagatgagaagaatgtgggcacgtaaacaacactacagatactgcaagcagtcacaggaaaactaaggagcataaactcctcccaaacaataccaaaatctgtgaacttcttctttggaagatgcataaactctgcatactctttcccttcatcaattctatgaagctgcaggacaagaggtctgcgtgtaacaatccctacacggaagacattgttgttctaagtaagtgttctttcagaaaataatcttcagatatttttctaagaaagcttaccagctccacgaggtagaaaatcttttccaacaacactctctagcactgaagactttccagaactctacaatttcatcaaatcgatcggattacacgcattgcatgaatactcaacagtttttgattaagaacaaaggatctcacaacagaaacattatcattagtttcgatcaaatcaatgattcaatgggagccatcagacgattcgttgaaaaatgagatgagattatttctacgcaatgcctatgatctaaagatcaccgattcaaaattccatgccaaaaatcaagagaaagagaccaaacctgaccaccgacgacggcaattgcaggcaatgagtcccagagagttgggagggagcttccctcgccgtgatctcccagagccgtacaggctctctgaatcttgttcacaagcgcaatcaaactctccataacggaatcaaaactaaggagctccgattaatcaacggatgaatcaatcttccggcgagatttggtctccgacgggtccgtatgagcaggagaagagaacgcaaacgttataaccgcgagaattgctatcattcgggcgaccgttgaatttttctcagaaaataaaaatatataagctaaagattcataatacccaaagtacccctattgaaaagtcaaaccttgtagcaagcccaaaggcccactttatttgagcccagttatcctcttttggacacatttttggtatattcgagtcacgatactcgaatggtatttccgttataatttacgaaaacaatgtctcttcttttctctacaaccacacgatttcgatgttaattaccaaaaaagtgtgtttaatttagctaaactaattgttttcgttgattaggcccagttgggttgaagaaaatctccaatctttcttcgccaagtctcccacaacactttgtgttctaatctctctgtatgtcgcaaagtagcagcaacttaattctctcatggagtctcttacatcaaatccttccttcgcttgtttctctaaaaccatttctcattacccttctcgtttctccttcgtaaagctaacctctatccaaaagttggaagcttccaacaacaccttatcgttattctgctgtaaatcatcttcgaatcctaaaccagattgcaatcgtcgtatcaagttaaaccctttatgtgtattgcgtccaatcattcgaacaataaagggtttggtttcttctcaatccaggcaatggatgtctcgttttcgagcttacagagacgacacggcggcgttttctgaggatttcgctggagatttgaagcataacggtggattagggattgcccttttgagcgttactgcttctgctaagataaagattagccctttcgttgcgacgctctctgcgaatccaactttcgtttcagctgtagtcgcgtggttctttgcgcaatcgagtaaaatggttatcaatttcttcattgagaggaaatgggattttcgtcttctctatgcttctggtgggatgccttcgtctcactcagctttatgtatggctttgacgacctctgtggcgctttgtcatggagttgcagattccttgtttcctgtttgtttagggtttagcttgattgtcatgtatgatgcaattggtgttagacgccatgccggtatgcaagctgaggtaaaaagttaaaccaaatctgcttcaagttttgagttttggagatttttacagagtttgactttggtcttattaaatgctttgtctattctacaagttgactagattttcatgttgatgagtgtgtatagtttaatgtattactatttccatgttgatgagtgtgtatagtttaatgtattactagaatctggtgatggattcgactttcactacattgttgaatttttgtgaatgcttttatgtgtaaaagttggcgtgcttgagttttcaatgtgtgcacaattgaagtacatcactagatttggaattatggagagttagatgttgatttctgttcttggttcttgaatcttttatatgatggttttgcattgttgagagcgtaatacaagtttctcgaaattatggacattgggcacatgttgatgatagctgttattggttgtagaatgaccttgataaaattgcagagaattaagagttttgaaagaggattcacacagagtctaagtcatgtttgctcttggttcttaaatcttttagatgatggttttgcattgttgagagcacaatacaagtttctcgaaattatggatattagccacatattgatgatagttgttgttggttgtagaatgatcttgataaaattgcagagaattaagagttttgaaagagggtctgtacagagtctaagtctagtttgttgttctttgtaagataagattaacaatgttttgtatttgttgatgtcaggttctgaacttgatcattagggacttgttcgaaggacatcccatcagtcaaagaaagcttaaggaactgcttggtcacactccttcgcaggttcttgctggagcattggttggtattgtgattgcttgcttttgttgccaaggctatctcgtctcagtctaagaagatgtcttttattccaagtgatctggttggtttttgatttgggtagcctaaaaaaacagagtgttttaagtatcgcttaacattgattttggctaagattcatgttgtagtatcatatgttttgttcagcaatagagaaaactcttgtttcttcttccttgtggcttttatttttttgagtttttgtattccctgagaatgcaatgagagcttcttttgtttaaagcgtttaaagcaatgcatgacatgttcagtgactgctgcagaaacacacacacacacacacacacaaagttaaccataataactaagatttacgtcattagagcaagcaactgaagtgtttagtggagaggatagcacagatatacttgagatctaacggccaaaaagcagtttcttagctcggaatgttctcccgtaagatctaataaatcctaaaccccttgatcattctgctccaattagtttatcgtgttcgtttcgtaatcttccgtctccttgaagcgttagatcttgatctatgcgttgattgatgatatatggtttcagacaataaagatgggagagataagaagattttcgtagatctttattttggggcggttgacaatcctgcaccatcaaatgtgatgctaatcatgggagacatctcacaagaagattgcatcatcacgatatgaaagcggcaaagtacaatgttatcttagcacagcatcaaaacccatcagggttgttactaaccattccaagctcactatggctttggacaagcctatcagctggagacaagcctattgaccaaaccggaagaggacagcttagtgaggcaaaaggattactgattttgtgtagccatatgtgtgaataccttgaacctctctaaatctcttgtttgtagaaaactctttaaattaagtaaactctttatttcttcttccttgagggttcttttttgcgttttttgtattccctgaatatgcaatgagagcttgtttttgtttaaaccaatgcaaatctttatgatgatgacatgtttagtgacttaatgcatcagtaacttactgtaactctcaaactgcacaacagattaagcatgttagagacagactatcttagaacagataatcgacaacaacaaatttttgtgggtctcttagagggtttaagaagaactgactaatacgctttggtgatccaagaactaaagtaggatcacatactctctctctaaccaacctatgatcaatcaaaaaggcaaggtttaaaacacacaacatgtgtctatcatacacgaaaatagaagctatttatttgggggagattgtgggaatgggcattttgtaagcccaaaaaatatggatttgagccttttcagtcctttggatttcttgtgcataaaagggcccaaattcgttgaacgaattaacatatgtaacgaagaaagaagtagcccaaattcgctggacgaatcaacataacgaactacgaaagtaccctcagctatcatttctaagtttgcctccaatctctgtttgctataggccctttggattggtgcctcagctacttttcttgttagaatctttaagagcctgctttgatcgttttcttcttcggccagtaggtttggtcttcaggttaaagacacctttcatcaacgagcttatatccacagatcgttctcccatgatcttatcatggtacatcttgcttcctatctcacagatctcttcctctacttcttctaatggctcgtcaatattcaacttcagttctcctttcctaataaccgttacaccaaatccattcgccttggcttctcgatatgcatcctgtgtaggttaaagagaacaactttgaattgataacagaaacacgtctagttaaagtttcttcattggctaaattcattacctttggcgggcgcggaacaatgaaaacgtttccacttcgtagcatatccaaatgagcttgaataatgtaacagaggtttcgacagtctgcagcgtcctcgaaagcaatcacatgatgtggtttgggttctaactcgagatctgttgccatctccaatgtgtagaaccctacttgctgctctccgttttcatcaactgtgtacaactcaaggcactaaaacatgaaaagacatatcagattttcaaggacttttgtgtttctccaatgtcagtcaactgtttagcaggaaaacataccagtacatgcggaaggtccaaccaccatagataatcttcttccttatcttctccatactcgcggtatttgctcaaaacagcttgaggaccaaacaactccatctctctcttgagtttgttgagtttcttttccatgaacttcttgttcctctctggcagcttttccattatatcagcagcgtctttgatttcgtcttcagtaatccatcggtctaagtcttttcccatgtctctcataacagctttcacttctggatcagtctctgcattgtacaactcaaggaacccacgtgaccacttcttcgtgtgctgccaatactcctttcctgattttttaccaggtctaacagatccatcacttccttctacaacaatctttggctggcttgaggtaatttcagatgaaggggtgagagtgttctcagaggaagcagactctgataattcctgatgagagctctgttcttcatatttcacaggagatacagatgcagctttttcagaaaacagtgcttcacgctgttcatgatagttattgagaaactcggggttcttatcaagtgaaggccctttccatctcggtatgatcttttctagtggatcatacacactgacgccatctgaataataagaggaagggagatggttgagatatattttgacaagctgattaatgcataatttgtgtacgtaagatattgagcaaactgagtctcaatcaaagttgtagaagattacctactccgtagtcaaggttttcaatgtttgaatgaatccactgatgcagatgagacagtttctcattttctttctcaactttcttctccaagccttgcaaaaacatagctttatcttcatcatcaatcaggtgaaatggatccctaccagccagctcattatctcgaacatggaagacaatgtcccttagcttctcgtccttcatccactcaagctcatcattatactcactgcggtaaagttctgcaatttcagcaattgtacctggctcccgagtttcaccctctctagcagccatataattatccctaaatcctgctctcattttttcaacaacaggctcaaattcatggtagttattctctatccaattccccttccctgatggttcttccttctctatatgttcagtaccaccagaagaacttttggcaaatttaaaattgtgctcttcgattttatttgaagaatttatttgcttgctcgatcccttaactgcattcccaggttctgagagtttttggtaatcattcttttggggttgacaatcagcatccttccccaacggttcagaagaagtagactcaagtgcagatttcaaggttccattgacagctgcaccaaggattttatttttgtcaaccaattcgtgttttctagctacaccacgctcttcgtcgctctgctttgagaagatttcaacactatcttgggctatcatctgagaaggttcctgagtaagctctttctcaccacttcttcttgaaaggaactctttagcctcttttacagaccgtatgacccgtgacttacgaccagtgctattcttcatcatacttaactgatccttagagacatcagaagattggatgactccgtctgtaggaactggtggtaccacattactcaccttttctttgtcagatgctgccatttcatgattcagaaaaccaaaatctaccatagccccattcaacatcggaacagcaaaaccagaaagttcagtgttctcactgtcagtcgaagttcccaagcgttcatctttatcatcatcaccttcactgtgtgtcaaagcctcatgtggaagactcttctgtgactgaatgcttatatcttcctcattgtcgcctgtttctttgttcacatcgagcttctgcttttcattaagttctatgccagcttctatctcccgtgctcgtctagccattgctttgatttcatggatcttatcaacaaagtccagctcaacatgaggagaattcacgagttccagtttcttctctgaacccttaactttagaaatactagtcataagttcatttcgatcaaacttaggcttctcaaatgacatcaatggcttttccaaaccctccttgtgcaaaacttccacggtacctttctccgacatatccctttcctgccaagctttcatctttctcctcatcatctccttctccaactctgtacactcaacctcattactcttcctatacacaagcaccgtcttcagcaaccagagtccaatgtaaccacacaaaacagctcttccaatcgccggcaactttggaattaagtcaagacgaagaattgcgttttggactgagctaacgagacgaaactcttcctctgaagaagaagaagaagaaacgaacttgacaagagaactctccttatggatcacatgttccccattctccatttgttcagctaatttcttcgcatatacaagcttagaactcactgattccaaatccccaagagctgatcttcttctactcaagacctcgtcttcatcaacctctactttctctacgtttccaacagaatcctgatagacagtgaaaatgggattcgaaccaataccccaaaactctgcttccttgttataccgagcaacccaatcttcaagctcattcagcaaatttgaatcttgagcaaccctatctttcaatccctcggtgctacttaaatcatcacagtgaccaaacttatggctttcgtttagaggtttcgtacctggttcagaagatttcggagtcgaacgccaatactcatcaccgatgatcttcttcctcagcgaattacgtcgcctcgaggtctctccgaaccgagccgagactcggagaattgaaacgcgatagtagtggaatttggagatgggcaagttgaatcgacgttggttagcgagtctcctgttcgaattggacgagaaagacgagaaattgaagaaaccatcattggagtttagtagaacctccattgatggaaaccaaagggataaagctcacttccgagtgagaaaacccccaaaagctgggtttaacagaacaatgatgaaacgtcgtcgtttcttaaacaaagctaacgcctttgaacaacactacagttgaaaaaaggttcaacattttacattttccagatataaagctcatcacttccaagttccaaaagctgggtttaacagaacaatgatgaaacgtcgtcgtttcgtggacacaacacaagcattacataaatttatgaacactacagttgataaaagtaaaaggttcaacattttacgtttttcctccagatatagcagaattgtaatgaactatatattttataataaaaaaacctccatgacatgagaaagacagagagagatacataagaacaaccccaagtttatcgtcagagaaaaccctaattacagataaccatggttacagagacaaggccaaatcggtgaggttttcaaaatcagtttgattttttttttttaattttcaagacaagtttgggatacaagctcctccaccttcaccactttgttgttgctctttccatatccttccagtgactcgaagtttcagctctttcctatctccacctgagaagaagagagccatgtttctttgtataattagtccatcatgactgtctctaactttcctgtggctgtctcttacgcttcttggtgttccttcccatatcagcttccgaccataacctcccacttctaaactgtaattgtagtttcgagcttctgtctcgtcccccatgaaacgcaggaacgccatgtagactggagccattccgagctggaatgcctcaaagtgaagacagaagtattgaccgaagcagtgaaagacctgattttcatttttgaaccagaaacaaaaccaaaacagaggaaaccttgataagcattaaagtatatcaagtcaacatgtatagcgagatggaagattcacaattcacaaccatagattagataaataactggaccttctctaggaaagctaactcgcaacaaaagcaaaatttgactcagctgatcacattacagtttataccagacagatcaaattttatcacaaatataatcctattactttaaacaaagcctcctaacttatctaagtgtatactatgaagcacgattcatatgtacttacagttaacatccatgtggcgttttcgacttcacgaggattagacttgacataacgatggttgaaagtacacccagaatgcatatccaccttatgatcatccctcagatgagcaactaagaaagggatatcgcccgtaacagaacactcggatccagcataagggcagctataaggtctgaagttacatacagtctcatgtttgagcttactgtaataagggaagatttcaggacatccaagtgacatgtgtttacaaggtagttcaagtgattcggctactttttccagtgccaaacaacggatatcaccgagctcttgtctacaagttgggcagcggttgtgaaccctggctttacaggttgaacacaacgtatgtccattgtgacactgtagggaaatcaaataattgtctatctgttattccataattctctaaagaaacaataagaagaatcttagaaactatcaaagctattgacaaaatttagtgacaattgtttcaattgtagccattagtgaatggataaaactaaatttcaagttacaagagcaacacaaccactgcttcaacatccatgattcacatcattaactcaaaaccctaaacaaaatcaacaaattaaagatccggggaaacgaaatcagagaacaagggattgaaaagaaagacctgatgaatgggagggtacatagaattggtgcagacaggacattcgagaagctcatgaacactggtggtggtagggagaagcccagaagcagcagcattaacgttggtggtgttgttattagtatgatgatgcttggaaacagaagcgtaggaatggcgatcttggtggatctcttcatcatctgtcacatccatggttgatgtacagtccatgctatccaaatccattgaagaaaggtggagactttgattgatcttcgatcgaaacgaaagatcaaaatccggaattgaagaaacaccaccgaaacaggtcaaccctcgtgaagtgttgttaattttcaaaaacaaaaaagatagatgctcttcttcatcaattctctagagagagagagagagatagttgccgtcaaatgaaccggaaacgctgatttaagatcggacggtcacaaaggcggctgtgttaaagagagaatgttatttggaaacaaattgaattataagagattcagaagaatttactggataggggaaaaataatcatattctaataatatacgtacagtatatcctctctcactcaatgatttctttgtttttaattaaagggccatgatccagtagagatgggcctaaatatgtacatggtgcacatgattgcttctttttttttattctagatgtttttctctctagtgggattctgtctatcattattgtgtgttctttttttacttttaattcaaacaatttcttttcctttgtacaagaaaaatgattttcaacttctaaaatgacagctaaattcaaagattcatgaaaaacatgctcatctttctgtttactttaacaaaaactttaagagatgtatttaggtaaaattagacggtttaagaatatgaaattcataagaggaataataagtaatgggatgtggcttgggttcaaagtcacttcaaagaccaatgataatgtaaatgaacattttactcttcttcatctcaagcaaactctcacaatcttaaaagcaaattattcaattaataattgcttctcatcagtgatcggtctcatgagtgatatcatccttaaacacaccacataaaagaaaaagaaaaaagcgaacaacaacgatccatccagcttcaatgatctgtcgttgctttttaacagaacatgtcaattgtactattatctttctgttgggttttgtgacttttgtctgagaaaaatataaagcttcaaagaatctgggacttgacttaagaactgttttcacagctacaagagatcacaagcggatctgattattcattcatcaaatattctttagctttttactcctatttgcatcaaacaatcaaatttaaggcactactggatcaaaactagaaagattttagttatttgttaccactggttagccgatgtatcccggcacttttcatcattgccctgagccaactgctgtggattagtaccttttactcgattactaaacagtctctgggatattctatctttagccgttgttttcttacgccttgtggaaaaggtttgcttcttgtttttcttttcagcaaaaactctatcaaactcatcatccatagcattcgatctagaagttgaggctattgccgcaccacgcagaacttcatgattgtgttccttaaccttaaccttaacaagctttgctcttttcctcaccacttctttgtctttctcccggatattcttcagagcctctttcgctatttgcctagctaactgattaggatcagaatctgaagttgtttcatccatagacacatcctggttggtccctgaagttgaagaagtttggttttcactctcatctaatggagattcctggattatggtgtttccttcatcatcccggggtacaatgggtccgtgaaacggacagactctgagatctcttctctggcaaagaccacctttctttagagaagcacggcatggaggtgtctctgttctctcttctctatacacggttgcctgaagattcaattctgctattttatctgctggaattatagcatcttgatccaccctgccccagtggctctcgatctctaaaccccggtaattagctcgaacttccgtagttgattcccaattagtcaactgtgatccccaattcatcacaggcgcttcagaaattagcttgtctctaagagagtttccactgcttccaacttttttagtgttcgacactttattggacctagcttctgatgtagacttctttgcttcacctgatgatggtaaagatgaattctcactctgctgagttctcatcacatgagccacgttcttgactgaatcagttttaaccttgccatcatcctcctcccagatatcttcttcttcctcgtttgtttcttcattaccgtgaatatcagtcattcttgacattgtaaaaccagcttcttcccatttctttttagctgccaatatgttattcctgatatcaatcaagtccttcaacatggaatctctcgttctgttatcacttacgtcaaccctaatgagaagagagatcccttcttgaaccgagatcagatgctttgtcactagaagcttgcactgttccctcaacacatcaaatacaattctgttttcaccagtttcttcaaccttttctgattgtttcagtgaatcaagacgaatttgcctcagatgagaacaacggatctcctcaaaatcttcctcatctaagatcgcaagtggaacaccatcatcccctctccactgaacaatttccatacactccttgatttcctttatcgttacctcaatctcatacttgaagagtccaaaactaactctcaaggaatcaaacttgttccgcaaaatctcttttgtcttcatctccctctcctgtctctctcgttgaatccgtgcagcattagcctgtaaatcagggaactttaacttgagggtattcttaaggtaatcaaacccaagtctaagctccttgtaatgaaacccaaaagacaaattccacttctccaagaactcaatagcctttgaacgcaacgtagtggcaacagcaggtggtgcaggaagaggcagattgcttctaaacccaatacttaaactcaaaagctgatcaagattctcaattatcaaagttctaaagagctttgatctcatgaatagctcgtcgattatgaaaagcgtcagatatcgaacctgtcaaagaaaattatcaccgcgttatttgaccaacaaacctgatcaatcaacattgactagtccttaaaagagcaagtttcaatgaattgaacggatcagaaattgttcaaataatgtgaaaaaaacctgagagtggttatgtctcatgagctccattagggtttgcgaactaagtcggacctccgaatcagaatagcgaacaatggatttgatcgccttgagaagcctcgggtcaacctcttgagcagttgatttcgtcgctttctctatcaacccaataactttccctccgccgtcatctcttccttccatcgccggcaatcagaaattcagattttcttctcctttctaatttccgaagaagacgatataaaaagaaaaccgaaaaagaaaaaattagatttgtgttggtttaatatttgtacccactatagtcggtttacttggttaaacgaaatgacttatttacccctctctccccaattggttcgaagtaacgtatttgcccctgtttgtctaacctctattcaccaacttagatgggtgttaatgtaattacgataaatatcgtttatatagttgatgtgaagttttcctcttcccaccaaaatcactcaacacagtcgagagaagatgaagatgatcctgatgacgacgatgcaaaacgctttctggattctcttggttttttccatctcaatggcttcttgctccacgattccatcgcttgtaggtaaataatctggtgattctgttatacttttcccgagaaaaaattgattctttttctctcattttccttcactttctcgttcgttttccaggtccacaaatcggaatcaactacggagaatacagctccaatcttgaagatagtagtaatcttcgattccattgtgtgattcacgagaacatcgaatctttttaactctcaatgacttttttttgtttgtttttccaggtccagtgatcggaatcaactatggtcgttacggctcaaacctaccaccaccagaagcaataccatcgctagtcaactctctctccatcaaacatgtcaaaacctttgacttggatccaagaatcaccaaatctttcgccaacactggaatcactctctccctctgtatccccaacgacaagatcccatctctagccaccaatctctccgaagctgaatcaatcatcagaaacttcatcttaccttaccacaagaacacaatcatcacagcaatctccgtcggaaacgaagtctccttactcccgcaattctccaaccacctagtctcagctatggtcaacgttcacaaagcaatcaagagatacagattacacaagaagatcaaagtctccacaacgcattctctcgcgattctttccagaagattccctccttcgactgctgttttccatcaatcgatcggtgattcggttttggaaccactcataaggtttctacaaagaacaaattcacctctcatggtgaacgtttacccttacctcgcttataaacaatcattcccttcgattcctctggattttgctctgtttcagccgatgaacagccccagacgccggagatacatagatccgtacactggagttgcatacaccaatctgttcgacataatgctggattctgttgactccgccgtgaaatccttagggttacctgaaattccggtggttgtatcggagattgggtggccgacgaggggagatccgggtgaaacagctgctaatttggagaacgctagggtttttaaccaacggctcgttgagcatctgagaagaagatggaataaagttccggtgtatatctttgctctgttcgatgaagaccagaaaactggaaacgccgtggagaagcactggggattgctttacggtaacggatcgaggaagtatgatctgaatttctcgccgccgatttgaagtttgaacggcgcaaagatggaagaagatttatgaggtaatgggcctattgttttgttttattatgggtctattgaattgtttttagaccaggccagtattacgacatattaatccaccgggcttacttgtaaataatacaaagttgataaagaaataataaaaagtggagatgattgaaggcttgtgtcatgtttttcctttgtcccatatgtcacgtgcaagatgatagattcgtggacttggagtcagtaatatcaatcaatctaacaaaacatttgtcccggaataaattggaaatgcaaattgtcatcatgttactgaaagttgtcctatattttaaatttagttttaacagttttattttatttttatatgaacgaaataaaaataaaataaaagaagtgagagccactctatttacaaaccaatgaaaataaataagggtggaaatatgggaaaaatggaaagtaacgttttaattgtgttgatggataatgtgtattttatgatagaaacaaataaaatcaccttgttataagttgtaaggctccaaaatcacattaaaacatatgctagtgaattaccaataatttgacaaatatgttaaattcacataatttattgagagaatggaaatcatgactcgtgactcatgactaatgactaatgagtgagtcttgttgttgtatatagagactatatattcatctgaataataagtttctagaaggctgaattttgataagaggagcataaaaatgactgatcacacatcgcccactaaatacgcaagtgagtgagtgatcggagatatttacggaggaaagagcgggaagggagtgggtataaaattggtggctcgttcggtggttgcattattctgtccatgtgggccaacgtaccgcactttgtctctgtatccgtcattgaggatttttttgtttattttattttcccatctcacttatgatttttgttattattaatgattagtgatttgttacttactgaagcaattattttgtcaaaatagagactgcttcacataacacataaaaccaagaactggtgtcggatattcacactctctcattcacatggagaaccaaaaaccaagaacatacgtccatcttgcattaacgataccgtgtgtcgtttacgataggcacaatatatacatatatgtacgctcataccaaaaatatcgagatgcactaaccaatgccatatataacatgagcattgagcacaatagtaggatgagttatgaaaagaaggaaaaaaataatcgctactaatccaaagcaagatgagaagatacattgaatttcactttaaaacgagcacttaagctagtgaattaccaataatttcattttggtttaagaaatttcaaaggacaaaagcacctttaagattcacttctctttgacttttgacagtacagaagtactagtacaatatttaatctagggatcttcatgaatgatgactaatgagtagtatgatagtcgatgatgataacaatgtttgataatttgctttgtcaattttctcccaaaaagtctttgggaataaatcagtcaactcaagctcaaaatctaacacgcgcgagacaaaaacccgacccgtgacccgaccaagtcataagcgacccggaaaccttgttgctgtatgtttccaatgattgacaaactccccatagttccggcaaacgcaaaacagaaccgtccttcagtgttaaccgggatcagataattactcgccggaagcgaaacctctccgcctccgaaatgaaacacaaccgtcggaaccttcacagtcgtcattcccgagagatcaaaacacgtgtcgaacaaagaatacgatggagcacgtttcagcttcgtagcaccaagtctaaaagcgtctctaagcgctacgtaagcaggttgcgtcagccgagtaaccgaagtaccggaatctataatgacaccgccgtttccggtggcgtcaagcttgaactgcgactccgaaacgccgggaacgcgcgaaccaccaacgctgattccaagaagctgcaagtaataaaacgtgtcgagtttcgggttcgttagtaacggcgtgaaaacagaggttttcggaacggcggcgtttccaaacacgattgttgacggtggtttagaagaagaaccggaactcgtccggtcaaccaaacagtaagagaattttccgttataacggtttttcgtctgcgacgggaaagataacccaccacggcccaagcccaaaagcccagccgcaccaacgaacaagccttcgttatcgtgaccgcatcctaacggcacgtgatcaacacgcgctccatgaaacgtcagcgtttcagttgagaaatctccttcggtgaatgatccgtcaccgtacgatacttggtagagacaagtcttgcttcgacgagtgacacattccgacgagtcgtctagtctccggcaaaggcgagatccacatggtacggtggcgaaagttttggatttcttcgggtcaaaaatggcgtcggtctggttgtaacaggctttgcaaggagagcattggagccaaacgacgtcgcttcctgtgtcgagcaccatgtaaacgttagtcgccggagttccaacacctaacctcataaaatactctccgcttccttgtgagaggccagagataactgcgccgctaaatccaccggcggtacgtggagttcttttcgtagcatttcgtccggttgatacggcggcgaggctggtaatagatttgacgcggagagagtctcgttggagacggaggttgaagaggtccgccggagatgcgtcggagaaggaagacagagcatccacgtgtgataaatggacagagagtgaagttgtggactcggataaagattcatcagttaaagattcggactcgggccatgagagtgttgcggaagaaggaagagtgttgacgacaagagtttggtattgggaagaagcagaggaggtgaagaagagaacggcaaagacggagaaggcgagggtattcaagactttgcgctccattggaaatgaaaatatgaggattttaactattgtcacatggatcttatatagactatagtctgtctatctatctactcaaaagtatacaaaggcaaaatgaagctcgtgtgtgaaagcacatagtttactttaattatgtaataacgactttgttttttctttctttttctttatcattaccaaattattgactttattccccatttcctactgacgaagtaatggagttctaattttgtagcttggaatatataagattattgggtgagacggtgcaaattggttccatggtctagtggtcaggacattggactctgaatccagtaacccgagttcaagtctcggtggaacctttaaattagaatttttttgtttccattgtacacttttagtattcttgatgagactttagcccatattttttgggggcagggtggggcttcaagacatagccaaaaaatgtctaagaggccactgagaattatctctaaagcatttgagttatgcaataagccaataaccaataaggatagataaactatgtgggctcgttgagtttatgtacttaaggcctgatatctcccttcatgggttgtaaaatttggagtccatcatattaaggattaccggaactagcagtttggcaatttagttggatttaatagtttggagattttgtgtgaagcaagcatacagaaactatgaagataatacttggggtttgtatatttttgaagggttctttacttattttatagaagaaatacgacgcttgctaaatatagcacgaaatatttcaaaagtctgcataaaattcgaggaaagctccatttctaaaattaaaaaacgaaattttatgatatacttgttaattgaaaaaatcagtttaatttatttgcttaacgagataatagaataactaagaaacttaaaaaccagtggaaggagaagtaggtggcacacatgctccataattgatattaaatttttgccagtattggattttaaaaactctttagaaaacaaaaaaagtggaaacttgaggagaagagatagctaatgaacaaatgagaatgggagcatgaacacgaaagcccctatctactaatctagtctagtttattaattagttacacctaatcgcctccatttctcattgtcatctcccaataatttcggtttctaaagtccatagcctatataactcatcctcacttggtccctaccctctctcaattcttttcatattaatcccctataatttcactgacatattcatgtttctagcacaataatatgttatagttaaacatttattgttagagtgtttagttgctatatagtgttaattttcaatataccagaaaagatttaaacgtttacaagtaaaaacttaaccagaaccagaaggtttatatatgcagggacaaataatgggggaagaagagaaattgaggcccatcttcgcagagtctgatcaagagatcatgtgatatatctatctttatggtcccctctgctcttatattattattcacctttttcacatcaatctaaaactgaatttatcactcactcacggattcactcaaagctacacataaattttaatttatagtgtataattgaatccagaatcaaacatatatatgtgcattgtttttgtcttttggctgttctttactttccatttataatgataacaaatcgatcaatatcccttgtcgaaattgtgatgtaacattcacatttgattaactgaataaaaatgaaaacaataaatatagattggtatatccttggagtcatacctaactatttttaaacaaatttaataaaagagaacattaatggacgaaaacacagaatctcacctaagttagtcctatattggtcagaggaacaatgtttggtttttttcataactactggatttaaatgtggtgccatgcaagtatcattaatgttgttttaacagtgtattgattgtatcaaacattagtcttgactcttgaactcgttcaatgagattgtttttatataaagaaaacgtacggagtcttttaaatagtatactttggtaaaaggatctcgaaaagattctcccagatgggagcttgaccttacggttaagtgggagtgaagtaggtcgaaagcgacccttgggactgtacggacgattttattagaattaccaaaataccccttaataattgacaattcctgcgacctgcgtgagtctccacttcaggtttgggatcgaagaagcggagaaaagagccaaagagtgcgaatgatatgattacaccatttgcatttcttttagatgtgtctaatgcagaagtcccaactttttcatatttggaaagtttctataattcaactcttattcttttttctctttttttttgtgtgtatacactatgaaccatcagatttgagcaaataattaatctgatctataacgaatggataataatacgtatgaaatttctacaaaatatttatggctattttttttttgtcaatgaatttgtggctaatatttatcaacctatatcgataacctatatattgaaaattatatcaacctatatattgttgagaaaataaagaacaaataaccttatcgatatatactacaaaagtaatgatcatatcttatgttccaaataaactgtaatcatacggagtacaaaaaagacatttaaaaaaaaaaacgtaatcatttgagccaaataaactgtaaacatgttaaatatacacacatgcctgtattttacgattatatatacatgtcgtgctaattagttttgttatttaattaataacatggaatataaaagtttgaatccgaatggcgagacatggatatcactaatacaaactactaaaattttaagtaattgtatagtacaaaaatagttttttttttcaaatactttttaagttttttttgcacgtaatgctttcataatttaatttcatcaaaaggaaaacatttccctgttacgtatggaaacaaggaaggatctgattacttaccctaatcgaatcaacggatccgatgcataccgcatggggcatacgcatagagagcttttaatttgtagattagtattattgactataaagataatcataattattggtcattagcaaacttagagttttaagacaccttaccctttaagtggagggaagagtcgtttttatgattttagcacagcttaaaattattgtttactattgtctaacaagacctatgctaagatttattaaaataattacccctaaaatgctcttgttaaggctccaccaaaatcaaaagaaaacaataaataagtttctgcttatataaaactctacaaatttctgatgttacgtatattgtatactcgttataagcaattaggcataatggaagacagggacgaaatgtggtgtacggtcaaatagtaaaattgtacaaaataagtttggtttgtggaaagtttgaaagttcaattattgcaagaggttgaaggtaaatacgacagttggaatcaaatgttatttgcttgactgggttatcaacctaagcaagaaatttggttcttaaaacaatctaaacatattggtttgattagtacttcttaatctttctgcaatgataagtagtgtactgttgataaccataaccttatagtagaagataggaccatgttggtatttttccacaacttttccttctctttttacaattcataacaaatgaatactgtcgattagttcaatatataaatataagtaatacaaatattcctatattcttgtaaaatgacgtggtgactatgactaaacaggtgattaagtatattatcaaatatatcaatggaatataacagtgattaagaagaataaacaaaattaaaagattttgtggaatggattccactaaaccactacgcaatttaaaaataaaaatacttaactaatgtatagttatttattcccatccatgcgttcatattcactttgaatgatcatattcgtaatcctatttatttattttactatttgaaccttttgtgtgtataaataatttcaactagagagaatatccgcagcagctcgttaaattagtcattgaattaaaaaaagatattcaaattttcacccaagaaaaacgaacgcaactaaaatgacgttcaaatttggcatcatctttaggtgtatattattgtgagagatatgcaagcatgaaatctcatgcaggataagaatcattgttaaatttattttaattccgttatatttatggtaatatcatcctattaccttttctaaaattatgtttcactctttagttcaacctttggtgatgaaattcgattctttcatatctcgtctccgctttgcaaggatttgtccgtacaataatcatatgcactattttaattatttttttgttgggtgggattcaaaaaagttttttttacccctctatcagctagttagagaagtgagactatatatgattccaatcaataatacatcacatctatatttcgtcttgtaacgcggccacataatcttcatcaacgaagcttgaatgttgtaatagtgtttcactatcaacaacacacatttgtaggccttatgtaattagcgagagaactctacagtctacactataactttgagtggaaataaatactcgtatatggtaacataaaaatactatgaacttatgattatacaaacttgtaagtaaaaaagagtggtaaggctatgtaatatcgtcgacgttttctaggtaaatcttaagctataaaaaagattttgaaacccaaatagtatcgagtgatagcattagtctcatcgggtggttacaagccaacattgattcgtgttgcaaattttattaaatacaagggtgtacacaaatcaaaacgcaataatatttttggatcatagtctttcttcactatcattgggaaaaataaaataaaataagaaaaatagcgatagaatttcctctgtaaatgagcaaaattggtaggacaagtcagcatttgacacgtgtcggtcatgaatacgactaaacagcgtggcaatttctcttactctgacgtgtccatgtggggaccactttctcctccgacacttcggcatggctttctcaactttttatcactcttcttcaccattctcatttactaagcgcgtgtctcccacctctatccgatttaattttttaaatttgacgtttcaaaagttccttctataaaagcaattaacgataattatatgaaatccgtaaacatgaatttttcaaataatttcgatttttgatttgctaagattaaaagcgcgtgaaagaaaaaaaagaatacagcatgaacaccagcgactcagaactgactcggcacgtggtaacataaaactcacacgcttcccaagacgctcgtcccataaagagtcatggctgtgaccttgtgcgagtgtgggtgtagccatagcctttgtgggtcctaaataaaaaaaacgatcaatggcataatgtgtaattaactcacattccacagtgttaaataaaaattaaatctgtaacggaaaaaacaatctatctgatgttacacaaaaaaaaaaaataacggaaaaaagaaaatgtggccggggtttaatagagaagccgacacgtttgcctgccacgatccagacacaagacgatgtgggtaacggcaccgtcaagtgctaacggcaacggggtcatcagtaaaaagggcaatttagggatatagagtaaagtcataagcttatttattactatcgtcttgatcggacggctgagatttgccctctcctttaaatgcaccgtacgttttttttttacataataaaatgtaattagttcataagcaattcccaaaacgccgcgtgacccttcgtttgcctttgaatacaatttgttttattttagcgcatttaatatatttgagtttcctttttagcgatgacatgataaaacaaaaaacaacaattttagaaaacatttaattaaatgaatagaaaaatagggagattcaactgaagttactgtgggtggaaatgacaggtctccaggatctgaactaagagaaagtctctctatattttgatatatagagagagataaagaaggagagagtgtgaatatatgtatgtgcatgatactgtgagacttcttcagtaaaggaagcagctttggtttgctgcggatcgggataaaaacggcgagaagtttgtgattgttgaagcaaaacaacacggaatctgaaaggaaaggagaagacaaaaaaaaaaaaagattttaagaggaagagagagagagatcggtttcgtggctgacggaaaaaaaaaggggagagatttagttttatccaacagtgcctgaattacgttctgcaatcaatacggacataaccgtccgttgtgtcctgtttataaagttttgctttttttattttctccattgatgggtcttttctttcttctctctctcgtgtttctttcatggggttaagactagtgtttaccgcgtgaaggtttttttttctttctattttctttcatttcctctccttctacttcttcttctccagttctcatctgggttcttcaatggcgagtgttgaaggtgatgatgatttcggaagttcttcgtcaagtgagtagtaaaaggctgagactttagaaagttttgtttttttttttgtttctaacagtgactctgtttggggttttactctgtagaatcaaaatcagctttgtaaagtttcgatttttttttctttcattttctcgggagacgagcttagaaagaaatagaaaaaaccccaactttcttatttttctcgtatagcttcaaagttcacatttttgttatagttttgccgcggaaatgtgactgttagggttttgttgttgtttgattttagggtcttatcaagatcaactatacacagagctatggaaagtttgtgcaggtccattagtggaagttcctcgtgctcaagagagagttttctacttccctcagggtcacatggaacaagtatatacccacccaaaaatcatctctttttaccccaatttttctttttccattctctttctaaattctgggtttttttgcagcttgtggcgtcaactaatcaaggaatcaattcagaagaaatacctgtttttgatcttcctccaaagatactttgtcgagttcttgatgtcactttaaaggtaaagttggatcataaatgttaaaatgttttatttcccctgaatctgttaactaaattttgatttataggcggagcatgaaacagatgaggtttacgctcagatcacattacaaccagaggaagatgtaagttcttaaaaaaaaaactcaactttatttcagtgagtgttaatttatattgattggaattgatttcaatttactgttttgtttgcagcaaagtgaaccaacaagtcttgatccacctattgttggaccaactaagcaagagtttcattcgtttgttaagattttaacggcttcagatacaagcactcatggtggattctctgttcttcgtaaacacgccactgaatgcttgccttctttggtaaatatattcttaaagaaaccttctcaattcaagaaactttagcttgaattctcactccaattttacactttttaggatatgacacaagctactcctactcaagaacttgtgactagagatcttcatggctttgaatggaggtttaagcatatattcagaggtattgattctaatcttggtgtgtttttgtgaaactgtgtttggactaaatgagacattgactcattgagtgccgtttttggtttaggacaaccacggaggcatttgcttactacgggttggagtacatttgtatcctcgaaaagacttgtagctggagatgcttttgtgttcttgaggtacttttgaaattgaaactttattcactggtcttgtttagtttcatgaacctaaatgtaatgcctttgtgtttttcaggggtgagaatggggatttacgggttggagtgagacgattagctcggcatcaaagcacaatgcctacttcggttatttcaagtcagagcatgcatttgggagttcttgctacagcttctcatgctgtgcgtacaacaacaatctttgttgtcttttacaagcctaggtatatagtaatgttctttagatgattttgctttatatacatagatggtttaggactctttgattgaagaaaagttttctctctttgcaggataagccaattcatagttggggtgaacaagtatatggaagctataaagcatggattttctctcggtacccgattcagaatgaggtttgaaggagaagagtctcctgagagaatgtaagaatccattttctctgatcatttcttttttgtcagtgttcttgattctgaaacctggaacgtcttcagatttactggtacgattgtgggaagtggagatctatcttcacaatggccagcttctaaatggaggtcattgcaggttcagttaaccattccacgttcttacattttagtgttttacttattacgtggtctttatataacgtttttgtcttggtctttcttaggtacaatgggatgagccaacaacagttcagagaccagataaagtctcaccatgggagatagagcctttcttggcaacttccccaatttcaactcctgctcaacaaccacaatcgaaatgcaagcggtcaagacccatcgagccatcagttaaaacaccagccccacctagtttcttgtacagcctccctcagagccaagattccattaatgcatcccttaaactgtttcaagatccatcacttgagagaatttcaggtggatactcctcaaacaacagcttcaaacccgagactcctcctcctccaacgaattgtagctataggttgtttggatttgatctcacaagcaattctcctgctccaatccctcaagacaagcaaccgatggatacttgtggagctgccaagtgtcaagaacccatcactccaacctcaatgagtgagcagaagaagcaacaaacatcaagaagtcgaactaaagtaattttctttatcaactcatataataacatagcaacaatgttttgaaaatctgatttctttgatcttggattgaaaaaggtgcaaatgcaaggcattgcggttggtcgtgcggttgatttaacactgttgaaatcttacgatgaactgattgatgagcttgaggagatgtttgagattcaaggacagcttcttgcccgagacaaatggatcgttgtcttcactgatgatgaaggagatatgatgcttgctggtgatgatccgtggaagtaagttctaaaataacagagttaaacatttccggtttagctcaaatcagttaaatgtgaacttaaaccggaactgattttgcaatgttctgttgtgtgggattgtgcagtgagttttgcaagatggcaaagaagatatttatatattcgagcgatgaggttaagaaaatgacaacgaaactgaagatttcttcgtcgttagagaatgaggaatatggtaatgaatcattcgaaaatcgtagtagggggtgagagttttagctgttaattaaggttaattcggcgacgtcgttttagtgcgtaagtgtctaaagactttttttttagtctgtgtatataaagtcttgtcctctttttcatgtcaatttttcaagttggcgatttaatatttcggttttgggacagtggttgatggggcggttttacatcttttatgtgtatgtacttgttccataaccattcaattttcaaaaccaagtacattcaattagttatgggttcaaagattatatttctaatcaataattaaggcttaaaaaaaaaaaaactacagtattagagaagaatacaaaatacgtgaaggcgtggaaatcaacgcggcgggcatcatatgaaagtcatggaaaagtaaaggagtcaaacgactagttaagattctcttttggagttggtaaaaatatttgtggattaatgaacttctaggatatagtgttattagaaaattgaactgaaatcgaaaaaaatgaaaactaaactttggaagttcatgttatcgtgccaaaaataagtctccatgatgttctctataaaaattcttaagttttaatttccaaaccttttagctgcatcagatttttctttaataaaatgcaaatgacaaaagaaagaaaatctattttgttttcggataaagtcacatatgaagtgtatactgtagttgatatttgtcaaaaaaaaaaatattgttttaaacttttaattcagatttgccttataatgaagaagaaaacaatacaattattttcaaacttagtattggtttggtggtggttatgtacttatgtagtatggagcaactgttttttttttgctaaagattaattgtttttggtatggagaaattgttttactttgacaaaaaccaaaaaagcctcaagctaactaaactgaatagattttggagctgtagtatagaaaaaaaaaaaaaacatttttctgtttggataaaagatttgtaaaaacatttctacctttataaatgatataaagtttcagtccgaacaaatcatacaaaacgaacatccataggaccatcatactcaaagtatgagctacaaatatcgtactccattaatataaaatcaaacaaaacttaaattttcatacatatactaagaaattaataggtgacagaaaacaaaattaaacacgatcgtagttttagttgtagtcgaattaaatctgactaattttcctcaaccaaagagtacgggtttgactttcagttcgaggaatggttatagttaaacagcgttgcatcttcaatgacaattacatatatttaatccattgtcttcttcttcaaacgaatcataataagcagaaacaagaaagagatatggttaaaacccaaaaaaagaacaagaaagatacaagttttgacgcagacgataatgagacgatgataatcatcacatcgaaacttcaacatgtattagccgcgaaatcgagaaggctacaatacttatcatcaccggtaacgactaaagacgtgtcattgtcactcatgtcgtcccctgatgattcactctctcgcgcttcgattcctttctcatgggaagaagaacctggcaagcctaaacaccatgttcgtcatccttcttactccaagtgtcttgatttgccaccgaggatgctctttcctgacgaatttaccaaaatgcctcggacagcgaatcatggtcgttatctcgccgggtggaaacggtggttccggtggaagaaagagagagatggtgatgcttatgtggccggaagtggaagttatatttatccatcggaagatgaagatgataccaagaccacaagaacaaaaggtctccattgtttctcttacgtcactaggtgttacttctgggtaaattaaccttaaacttcattctatttctttaaaaaaaaaattctcttgtcttgtcagaaagaacatgtttgtatcttcttttgttttgcacgaagttccatggaagaacaagaagctgaaaatgaaagcttctgtgagagctttttaaaaaaataatacaaaacaatacgccgtcgtttacttgtatggaccatacttactcaattatgggcttttcttagtctatatactggcccaacaccttaataattgtcaaattattttatgatgctcgagctggattcgaatgtatagaagataggatgttgcgaaaaggcaatgtgggccagtaaaatggacaaataatgcataagatgtgatcttccatatgcgataatcattacatcaaatggtcctgcgaattattttttgtataaaaaaaattaaaaaagtttcgaattctggtggctaaattcgttcattttgtatttgagtcaagcaactaactaatatataccgatgttcttaagcccaataaatttgataggccatttagtataaaaggccggagaataaagaacaggtcgacttggtaggtcgtttaaggctaaataaaacgccacgcaaggcgaatctaggaaatcaaaacgacacgaaatgtggggtgggtgtttgggtaggaaagacagttgtcaacatcagggatttggattgaatcaaaaaaaaagtccttagatttcataaaagctaatcacgcctcaaaactggggcctatctcttcttttttgtcgcttcctgtcggtccttctctatttcttctccaacccctcatttttgaatatttacataacaaaccgttttactttctttggtcaaaattagacccaaaattctatattagtttaagatatgtggtctgtaatttattgttgtattgatataaaaattagttataagcgattatatttttatgctcaagtaactggtgttagttaactaaattccaccacgataatctgattacataaaatatgattttaatcattttagtaaaccatatcgcacgttggatgattaattttaacgttttaataacacgtgattaaattatttttagaatgattatttacaaacggaaaagctatatgtgacacaataactcgtgcagtattgttagtttgaaaagtgtatttggtttcttatatttggcctcgattttcagtttatgtgctttttacaaagttttattttagttatctgattaacgcgacatttgttgtatggctttaccgatttaagaataaaatcatattacctttatgtagccatgtgtggtgtaatatataataatggtccttctacgaaaaaagcagatcacaattgaaataaagggtgaaatttggtgtcccttttcttcgtcgaaataacagaactaaataaaagaaagtgttatagtatattacgtccgaagaataatccatattcctgaaatacagtcaacatattatatatttagtactttatataaagttaggaattaaatcatatgttttatcgaccatattaagtcacaactttatcataaattaatctgtaattagaattccaagttcgccaccgaatttcgtaacctaatctacatataatagataaaatatatatatgtagagtaattatgatatctatgtatgtagtcatggtatatgaattttgaaattggcaaggtaacattgacggatcgtaacccaacaaataatattaattacaaaatgggtgggcgggaatagtatacaactcataattccactcactttttgtattattaggatatgaaataagagtaatcaacatgcataataaagatgtataatttcttcatcttaaaaaacataactacatggtttaatacacaattttaccttttatcaaaaaagtatttcacaattcactcgcaaattacgaaatgatggctagtgcttcaactccaaatttcgaatattttaaatcacgatgtgtagaaccttttatttactggatactaatcactagtttattgagccaaccaattagttaaatagaacaatcaatattatagccagatattttttcctttaaaaatatttaaaagaggggccagaaaagaaccagagagggaggccatgagacattattatcactagtcaaaaacaacaaaccctccttttgctttttcatataaattattatattttattttgcaggtttcttctcttcttcttcttcttcttcttcttcttcctcttggctgctttctttcatcatccataaagtgaaagctaacgcatagagagagccatatcgtcccaaaaaaagcaaaagtccaaaaaaaaacaactccaaaacattctctcttagctctttactctttagtttctctctctctctctgcctttctctttgttgaagttcatggatgctacgaagtggactcaggtacgtaaaaagatatctctttgctatatctgtttgtttctagcttctccctgactcttacgctctctctctctctctctctctctttttatctctctactcacataaatatatacatgtgtgtgtatgcatgtttatatgtatgtatgaaaccagtagtggttatacagatagtctatatagagatatcaatatgatgtgttttaatttagactttttatatatccgtttgaaacttccgaagttctcgaatggagttaagaaagttttgttctctacaagttcaatttttcttgtcattaattataaaactctgataactaatggataaaaaaggtatgctttgttagttaccttttgttcttggtgctcaggtcttaccatttttttcctaaattttaattagtctcctttctttaattaattttatgttaacgcactgacgatttaacgttaacaaaaaaacctagattctttttcttttcaatagagcataattattacttcaatttcatttatctcacactaaaccctaatcttggcgaaattccttttatatatataaatttaattaatttttccacaatcttggcggaattcaggactcggttttgcttgttattgttctctctttaatttgacatggttagggaatacttaaagtatgtcttaattttatagggttttcaagaaatgataaacgtaaagccaatggagcaaatgatttctagcaccaacaacaacacaccgcaacaacaaccaacattcatcgccaccaacacaaggccaaacgccaccgcatccaatggtggctccggaggaaataccaacaacacggctacgatggaaactagaaaggcgaggccacaagagaaagtaaattgtccaagatgcaactcaacaaacacaaagttctgttattacaacaactacagtctcacgcaaccaagatacttctgcaaaggttgtcgaaggtattggaccgaaggtggctctcttcgtaacgtcccagtcggaggtagctcaagaaagaacaagagatcctctacacctttagcttcaccttctaatcccaaacttccagatctaaacccaccgattcttttctcaagccaaatccctaataagtcaaataaagatctcaacttgctatctttcccggtcatgcaagatcatcatcatcatggtatgtctcatttttttcatatgcccaagatagagaacaacaatacttcatcctcaatctatgcttcatcatctcctgtctcagctcttgagcttctaagatccaatggagtctcttcaagaggcatgaacacgttcttgcctggtcaaatgatggattcaaactcagtcctgtactcatctttagggtttccaacaatgcctgattacaaacagagtaataacaacctttcattctccattgatcatcatcaagggattggacataacaccatcaacagtaaccaaagagctcaagataacaatgatgacatgaatggagcaagtagggttttgttccctttttcagacatgaaagagctttcaagcacaacccaagagaagagtcatggtaataatacatattggaatgggatgttcagtaatacaggaggatcttcatggtgaaaaaaggttaaaaagagctcatgaactatcagctttcttctctttttctgtttttttctcctattttattatagtttttactttgatgatcttttgttttttctcacatggggaactttacttaaagttgtcagaacttagtttacagattgtctttttattccttctttctggttttccttttttcctttttttatcagtctttttaaaatatgtatttcataattgggtttgatcattcatatttattagtatcaaaatagagtctatgttcatgagggagtgttaaggggtgtgagggtagaagaataagtgaatacgagggcttcgtgtgtaatcagtgagatctgtattcatcgtttcttctatttgtagaagtatttctgtaatttattcatatttttcaacaaaaaaaaaaaatcatctttatatccaatcattatccgattgaaattaaaattgtgttaaccctaagcttgaatagattgttttaatttgttgagaatttccatcgtaacttgttatatatttactccagtgcagttacttgccgttgtacatgagtgacactttattacttactgagagtctcagatagaacaaactaatatatggaactattgaacaaagttatgacggtattgattacaaattatatgatggtatatatcaataaagatttgatacgctaattaattagtgaattgttcttgagacttatgaaatttgttaatcttgataattccaaattattcatgtataaacggcactattagaataaaatactaaaccttaaaataaatatgaaaaaatgccattggtgtgaactatagaaactgacgatatttctcagttttttgtcatcttaaaatatacaattattactgatttcttaaattaaatagtaaaaagaaaaaagaaactataaccaactaaattaataagtaccaatctgtcaaaatataaaaatacacaaaaataaaaccttcgaatttatgtgtatacattgttttcgtttttttttaccaactaataatcaaccagaagttaaaccatttacagcccaaaacttaaagatttcataatatgtagtctttttagttcatataattgctgataaaaataaagatgatcggaatcatcatccacgaatagtcatatgactcataattatcaaatcccaaagcatcgcattttggggacactaatataaataaacttatagagctcctcagctttttgacttttgagcccgtgcgtgaacgtagcaatgtttatcttctttcatgtaaattaagtactacattttcaaattaatactccctagctccattgttcaaataaaatattcataattttccagtaaatagattttcgaaattatgtatagaatcctgtgtcgctgtatacccctataaattaagttgatatttttttttaatatcaaatgtttcactttcacccatattgattatgtgcaaacattttattttttaaatcaagatatacaaaaacgatgattattttgcttttcaaaagttatctatacctttttttaagaacttcaagcaaggaattaactagcaaaaataaattcttttaggcctacgttaacctaccccaactagaagccgtttgtaacattaatcacgttaagaattgtagattttgtagtattatgtagatctgtaaatttggtcatattaagtaatcatcatcatttgtaaattatactaattaaattctcataaagcaaacacccactaagattcggagacgacggcacggtttccttgaattctcgttattaccagatttaccgcagtgtcacattcccacttgacattattttttccttttttaatataaataccgtaccttcacagttcatccacctaatccgatccgctaattaatcttccaattagtcggaaaagattaatcttcttattgatttatagacttatactagtgtattgacacaatccactctataacaaaccatttcaccattattattttttatatacactacatattttggtcaatgcttaacgtttagtttacatttcattaacctgaaatgatgataatatacggtttcaagtatgaaatattcataaactatcggacgtacgtatattatggtcggaatatagtaaatgtaataatgtaaatactgtgtatgaacacatgatgattagtagctggcttgaaatgcggaagtagatgcccactttatagtgcccgccaaccaaacatgaatttttcattgggtttgtgttgttttgattatttaattacatgactactcctgtttaaatttaaatatccaagatgaaatcaaacgcgatattctcctagtctataagaaatctacatttatctgcgcgcatggtcgctttattcaaaacaattaagaaaacataatgcaacggatcgatggagtcaactatatatttataaaaatattatacaaagctgtttatcttcaggccaaagaaatcgaaggaataaaaggacatgtctcacaaatattttaactagttaataatatcattatagaaaagttataaaaagaattccacctcgattctcaattgtcttttttttacaattttaccttatacaatttttctttcttttcgatcacaagtttcacaaaaatcaaaagattataagaatgtttatcaaaaaaaaaaaaaaagtttattagaagcgacggcatagcgtttgactaaagaatttcggagagtttttgggcctatcggcccaattatcccacctgatgggaagcgttgccctcaaagtaattgtttgcaggtaattaattgttcaaacaaagtgacaatttccttccgttgtcatataggaaaaaagttgcatcaaaatgatttattttctggcaaacttgtgtcattgttaatttatatgggatttagaataattaatgacgaatgaaaagagtatatgaaccaagtaacagatcgtgacaaagcgccattatgaagtttctactgattttaagataaaagtctaagatcccaaagttaacaaggatttcaaaacatcaaaaagcatcttctaactcaaaacacaacatagataaatttaccctttcgaaaaactcattcttcgaagcttctgttttctgcattgatcaaggtcttcctcttgggactggagaacgactgttcaatcaaaaacattacataagaacatcaatgggacttgagtgaacagtaagaagccaaagccatttttttttttttttaccttctgtatcggtcataaccagggctcctttgtctaccataatcagaactccttcgtccataatctggactcctccgtctttcataagctgctggacctttgtatctgtcgtattctgggcttcgagcacgaccataatctggacttggacgcctaccctgaccagggcttggacgcctgccataatctggacttggacgcctacgatacacaggactaagagaccttctcgggctacgaccaccatttcgatcatctctttcatcgtcatctttcaacgcatactccacggaaacaaccctatccaatattttgctgaggaaacaaaaaggggatgtttttagagaggcaaatgtactaaaagtttgacggaaaaagtaactagaagaagtgttgttttaccttctttgagtagcttcaagggcttttgtagcatcctcttgtgtttcaaactgaacaaatgagaagttgcgtctgatacgcacgttggtgaccttaccatagggctcaaagtgtttttcaatgtcgtgctcttttgttctaatggggtcaaagttaatgacaaacagtgtctttgtaggcttcagatttgaaggggctttcgcgtcaccacgaggcctgccacgttcaccctgaaaaccgaaagaaactttaaaaggtttcttaaatatgcggcatagtgcaagcttcaataaaaaccagaaaaaaatttatacctttgcccattcaactgataacctgcgtttctcatatccaaaaggaaaattgtcgagtttgcgaatagcgtcttcagcatcacgttcatcctcaaagtacacaaaagcatatcctgcaacaaaagaaagcacaaggattacaaaacgcaacacaaagagtgacaatcctcctgtccattaacctgctgcatatctcgtttaccctagaaaataactaaatagatatacaacaccttcatataagtgaaggctggtgaatatgagagatgtagaggcattccatgatgtagtagaaaaacaagatttgtagcataacacaggaattcaggatttttatttttaaaaacaccaattttatattaaaaaatctgagtgatttgccaggcatgcttaaacattctgagtggaggagttcagatatggaaggcaaggcatggcaatgatggattcaatagacttccatctgaagcatcgatgattggtaatagacagacaaattccaaagtttctctagagtcagtgaagattggtaggcacaagatgataaaggcaggtatgaaaatgtagaaatgattttgcaggaagaagaagaagatggcaaatcttgttcctttgaagaaaagttcctgcgaacaaataaacactcaatacaaccatcctctctactgcataaaccccctaccacacttaacacattcgggaaaaataaaaccaatcttttctatgtaacggtactatatataaaccttcaaatcatgtatgaaactggaactagttctaagtatccagaatcctaggtcaagcagaaactaaacctaagcaaagatgatttatcaaccagaagacgaattcgaattcgagacggacaaacaacaaaatttcaccggcgtataacttagaagacactttaccagatttcatgtccactcggtcgactctcccatacttgtcgaacaaccgttccagatccgactggcgagtttcatactcgaaattgccgacgaacactggcctcatctttatcttaattcgcaattcctaacgatccaataactcgaaattagtaacatgtaagggataaaataaggtatatggacatgagcaagtataattatcggagaaaagttacctctgaacaatcggagaagaaacgaaaaacaaaccctagacgacgacgacgactactacgctcatcgaagaaaagcagagcctggttgacttaaaaaagcccgtcataccatcatgggtacattcggaaattcaaaaatcataatgggccttctttataaataggcccacaataagttagccccataccgaagaactcgttggagtcttttcttatagaattaaatttatacatgtttatatacagacccattttccgtcggtgaagaagaaaagaattaaagtttatgtaagtgtccagttttctgacacgtggagattcaacggagttctcttatctgttttggttcgatcatttttgcggtttaggatgtctctattgtttcttcttcactctttttgccacaatctctgttccaagaatcgcgagtatggcgaccacacttcattgtctctccacactccatcttcttcctcgcactcatcaccctaaaaccctaaactctctcaaaccaatcaccaccaaatcacaaccatgtaaaaccccagaaataccctccactcccaacgctcttcagctccttaaatcatcctctctccctctcgcagtcatcgcattgcctttcttcctcgacccacaggtaatcaaaaagtttcacatctttccccaatagtttcacattctacaaatataaccagatgatcaagattcttgttttctttgcaatttcaaaaggatgcagcagcagctggaggagaattcggaatattagaagggagatcatttgcgttgatacacccaattgtgatgggaggtttatttgcatacactctttggactggttacttaggttggcaatggagacgtgtccgtacgatacagagtgagattagtgatctcaagaaacagcttaaaccaactcctgtttcccctgatggttccacagccgttgattcttcgtcgcctccttctacgactgagcttcagatccaacggctaactgaagagaggaaagagttggtcaaagggtcttacagagacaaacactttgacgctggctctgttttgttaggtttcggtgttttggaagctgtctttggtggtgttaacacttatcttcgtactggtaaactcttccccggtcctcatctttacgccggtgcaggtaccttaaacctatctctcgtcttatttttcatttccttgattttaggttctaatttatcaaagtgtgtaatcttgggttgcttagtcaggttttggcttggtctgatgtggtttaagttttgatcagaactttggattttagttatattggtataaatagtattgtgccatttcaaaagttaccattcatcacaactatgagaaaaaatgtggtttatatttgttattggatgtacaaaacgtgtcacattttgtgttcatggtggtggtggtggcaggaataacggtgttgtgggcggcggcggcagcattggtgccggcaatgcagaaagggaacgatacggcgaggagtctacatatagcgttgaatgcagtaaatgttcttcttttcatttggcaaatcccaacaggtcttgatatcgttcttaaggtctttgagttcactaaatggccatagatattaatatttggatgtgttatttatgagtttgtgactctatatatgcaaatattcttcaactttttttgaggtttgtagatgatgaattgtaaaaatcatgcaattagagtggatattggaataatggtggaaaaacgatcaataatactcttttaccagtcctttgttttcacctgattgtgtcaaatataaattggatacgctatgattgtgtcaaagattagtagattactgacatttgtctcacctaaaaaaaaaaagaatactgacatttattatatcttaaatgtctatcaaataatatactttgtcaattttggcccatgtatatagatacaatggtatttatgttgataggcccaaattggttatcgataattcttgatcaagccaattttcagtttacatgtaaatcatgttttgtttgcacttggactacaaattgcggaaacaaaatagtcatatcttttgctgcaatcacttttattgagaaacatacatggcgtcgcgtcattatgaaaacctctcagcaaccagtgaagatgtttccaccataaaaaaaactttctttatagagatacttatccacttttaagatctctcagttgtatatatgattagaccacaattagttcaaatcttgtcatattttgttctttcctaatgcttatgtgcctgctcctcactggatcaaaaataccaccatcctttaataattcatgtgtcacaatctttcgtatctataaacataaattcaagaactcttattatcatgattttttatttttttatgttcgatcacacaatttgaagtttgaaaatattttcagtcaaattatcttatataaactattactttaaaattagttttttttttcttttccatatttagtaatcgactagtagtaaatagtggttaggttttttttttttttgaaaaggctttaaatagtggttagtttgtttgtcaaacacactaaccatgtggccaacattttaaactaggaggtctccatcttgatatatgtctaagagattattatccattctcttaaaatgggtgtctagtagatttgggcaagtataaaggcctgccggtcgttttctctatattaagttgttaatcgtttactataccataaattgagttttattaattatattgattattgaatttgattgtttagtactttagttatatcgagtgagtttttcttttatttttaaagaaaacaaaaaacatggaaagttatattaattatatcgagtgagaactctggctactctatttcaactaatattatatatgaaaaatagaaagaaataatttaaaaccaataaaatatgaattccatatatacatatagtagttttaagtaaatatatctacagcacatacgttatattttttgtttatttgtaatgtaattattgatctttacacatatagtagacaaataataaacagtaagggagatgatatgtcgaatctgcaactttaataaagacgaaactttttgtatatttttggctggggaaaaaaaatgtgaaaacaactcattcgatttattcggctattttttttttgaaaaatatgtgttcgctagcattatcggtcgacaattttaaaaatttaaggttacatgggatttgagtttcttacccaaaaatatattctatacatgtatgaacttgcttcattatgatgaattggtatagcctaatgtattcaacatttattattgtaattttttcttcttgaaataaaatgaatttaaataataattacattattaattactatgttttaagttttctgatctgtgatgaaaggatgatatagtatatttgcttgtaatcggggctttgtttgtgttcaagcgaagatcgtttcccatgaaacgaggaaatcaagttttgaaatttagattaacaaaaaatcagaatgccaaaagaaagcgagaaaaaaatattaaaaaacacatagtattaacttttctttgtgacattaatgttttcatcatatatacaacacgtatcaagatgttagtttaatataaaagcttcattaccattcttattagtattttttgtatgattctttttttttgtttcctttactttctttgttctttattttattcttttgctttaaattcacactaattttccttcgctttagttaccactgtatctgtgtatagccttagccttatcatacactaaaactgcgcctggggcgtaatttagcagcaagaggattagccatctcacacgagagcctcagtttctcggacaagtcaacggtcttctcatcggacggcgtcagccattcaaactcatgcaaaagcgtcgcagtccaaaacgtcacggtggtcaaaccaagattcttcccggggcaaacccgacgaccggacccgaacggtgcaagcctcaaatcagacccaagaaccgagaactcaacctcaccttccttggctacaaaacgttcgggtttaaactccaacggattctcccacacgtgtggatcgtgtgcaatagcccacatgttcaccattgcggtggtccccgccggaacacgacgaccgtcgatgatcgtgtctgtgattgctaaacgggcccatgagagtagtgggcctggcgggtgaagcctcaagacttctttcaccacagccgttagatatactagagacaccacgtcagactcttcgacagcccttgatcgtcccacgatttgatcaagctcattgtgaaccgtcgattgaatatctggatgaaggaccatcctagcaagaatccactcgatcaaaacagccaccgtgtcagttcctctgaatatcatttcctgttgttattaaaacccaaaattgccaatactttagttacttaaaatggcatatttaattatccaaaaatcatagtataaatgtaattaaacgcatacagtacaataaatatgaatttttgtaagttttttcttcagtacaaaagtaaaaatacaagccacgtgtacatacccatagaacggcgatgatatcagggtcggataatttatcaggaccatcgagagagagcaatacgtcaacgaagtcactcggtgagtcacgagtttgttcacggtggtcagagataatccggttcacaaaccggtttacttttgggacgagattagagcatctagaccggattctttgaggatcaaattcagagagccatgggagatgatcggtccaattcagtgtaccgagtaaatcataaccttcttccaccaattcacgtagctcactcacttcttcatgctcttcctcaagctcgtattcttttccgaaaacagagcacatcatgttattaagcgatgccgttttgatcaagtcacgtgcgaaacagagacctttggtgttactctgttttgtgagacacttcacgatttgattcgcgatcacgcttctctgcgtttcggaacgtttaatctgtttcgggctgaaaagatgattagacgcgatttttctcaaggttcgccagtaaacgccgtaaggagcgaaaccgatagcacggttaaacatgagggaataagctgattccttaaccgggcggtcagcgaaaaccggactgtttagaatctctttagctacatcaggattgcacgtgacgatcacgcgagtttctcccaaactaaacgccattaaccgttcggctctaaatttctctgcggttgcggctatgcaacggtgagccagagtgtttgacatgagagacatgcttccgacaaaaggtaagcctcttggcccgggtatcacggtggtttgacggcggcggtggaggaagtactttccccatgcgggtcctccgggatgagaccagaagaagagagaaagagcgagagaagctagggaggctacgaggagagagagagcaagattggtttgagtaaggaggctacatttggacaagagggccaaaagtaagctactggtgtcgagcttggtggccatggatgcagaggaacaagagagagagagaaaggagagtggctttttgctgtggggtttaagacgaaaggcttcaggtatttatatagaaaaaaacattagaagcccctcttgttagtttttgtaattagttcaaaaactatattatatttcatttataataggtattattattatataactgaaagagtgaaggaaatgttgttttttatattaaacactatattttttgtgtgtatttcattcttcttaccttaatattgtacttttaacttgatacacttgggcaagtttgaatttgcttgcttccttgttgtaacataaaatttgaacttgtagtttttctccgaaaaaaagtttttaaaacctttatttatttgaagtttaccgaaaatcttgtattattatgtgggttctgataattattttatttgattaaacataaaccaaatttatttcaggatatttttaaaaaaaagcaaggccttgcagccacaagaaaaaaagttgattaaatgcaatgaattaatatgctctttattcaccaatctagtagacaaatacacatcaaatataaaagtgcaaaaattaaaagtgattaagatttcggaccacttacaaaacatatctttttataaaacgaaacgtaagctccgggaattttttttttcataccatgagatggatttgaatgtaaaattaatcttcatttcgaaaaattattgacaaagtcagttacaaagttaaaaacgtaagatcaagaggtgtaaatgcaatggcagtaatgcatatagcaattaacataacttctcgtggccgttaaataaaactgatgaaacttgatagacccactattgtgaattcattgaatttgttaattgtaatcgtagttagctgatttaactggtaaactatatatctatattcgtaaatttttgtaaaaatgtcttttattatagatttaacgtcatagctttgttatggaattaattccaactgagagtactgttaaaacttaaaaacaacggttacttttacttgcagtgcatatgcgttagtctcggtgcagttaagtacatattcgatcacagcatacgacatcaagttctaatattttaatacttgatgattattttataagaaaaaataattgatttaatctgtatgctgcacggttgcaggcttgcagcactatatattattatatttatttactaacagtaagtgtgttggacatttaagaataatatctttgttaaatacagtccatgatcgtaacgttttttatgtatattttaactttcactcgtaataaggagtgtagttatctttcctttgttaatgttaactatctattaaactaatcaacaatatgtcatccaatagtaacaagaaagtgtaaacgtataatttaaaagacaaattataacggtagagttgttgttgttggcaaaatgagatttaacggtttagcgccgccatgcgcgagggatgtgaactgaatggcaggttacgttagggcgcgtgacacttacgctttgtgtgatctatgattcttcggatgacgtcatattcgaagagctcttttataatatgctttgtgttactgctcgataatcgatatatgtatgatcgaagtcaaccgaatcaggggatttttagaagatactaagcatatatgatataacgtaataataatatacagagaatacaacaatatctggttaatagaatgttcaagttgaatgtaaactaaatcagcaatttatttaattttctcttgaatataagtatcaactgtacgtcttattataaaacgagatatactttattttaaatttaactgaatatactattccaagagttaaattagttttaacgttaactaacctgttgttgaccctttcgacctattttatcatcgaagacgtgggggcaatcaaggacttcaacaatggcttgtccacatctattgttatgtaaactacaaattaatatcattttaaacgaccaatatgtattctctactcatccggaatagatcaatgaataaattttaaatctatattctctaaattaagcatacgcttatctaggacaatggtcagctagatcaaattattaatggtccaatacattgccatacttccgacatcctaaaacagttacgattgaccatatgaaacagtaaatataataaaactcaaatgtcatttttagtcaagtttgtcgaatttcctaaatagacatcaggccatatccgctaattatgttgaagttcgaattaatagcatatacctcatcgattataattaaaaacgagtagaaagcgacatatgaggaagtgcaaaaaatgaaaaaaaacaaaattctatttgggtatattcctatatcagagaaaatagtttcgtgatagaacattcttatttgatagtatataaattcatagcttaaatttgtaaataaaaaatgaatcaactatgccatttatatgtatattatattttttaaatggcgatttaaaatgcataacgggcgccacacaaaaacaaatggttaatacagaacttaacaaataaatatattttttaaacatatacaaataaataaatgataattataaagaacaatgtattattgaccttttggtatgggcttaagacacaaattgactttgtgcgtgtgaagaagacattttttgggtcacaaatagattatgtggatcttcaattgtcggttgagatatggtatggcgtggtgcactgcacacaactacacctcctgattttcatccgttggatctcatttttgattcatgcaaaacgtcccacaggcttgatcgtcgaggttcttgcagtatggtgggttaaatttagaaatgcacacttggcgtgtcttcttcgagtgtcgattaccaaaatacccatctttatgaaaaagaaggatttgtccgcattacgattagaggaagggtatatctgtctctgcaggaatcagacaactcacttgaccggtatcccacctggtccccccaaattggttcgttgttaatcgtcgatgccttctatcaacggtcacattttgctgatcgaagtgtgagagatgcctacccgttgatctaattaacatctactaaaggcggaagaaaacaaaactaaattaacatttactaaagttttgctcatctattttagtcttgtgaaaaaaagatcaacattatattttttttacgagtaaactaaactaagtagactatggacatttataaaagtagacaaataactactacaagtttttttaacaattgaatagtcatttgcttaatatttttatattcgttttactttttccggattaaaatttactcatctagccattacccattagctattaccacatacttatttttttgtattcaaagataccggaaaaatgttggataattttcgattatacaaatgatcatataatccaaatttatttggcaagtaaaagtttataataattcaaacaaaatagatatagtattttagacggagtaatgaaaactagtcaataaaagagaatatgtgttaataaggtgaggaccgaagactaagaatgagctgaattgtgtcaacacaaacacaaattctgattgcaacttcccacctaataacaatgattcataattagaaaaaattgagagaacatgcttttagataaaatcacgagccagttttggtaattccatataattaattaccatcaacaagaatggaaatatgtatatggaaaaaattaaattgtaagcgaatgttttgtcattatctaaaaacgagagaacattattgcaattaggaccattaatttgtctgaaatttgtcatttgatgagtatgataagtcaatttattagggggacacatctatatatatactactagtctactagaacttaacgttacatgataaatgtgtgttcgttgccctattagaaggggcaaattattgtaacatgttgttaaatgtttttctgtttacaaagctatttgcaagtgtgtatgccaccatattcaatcatcaaacataggttaaggtagattacaaaactaccactatatatctaggacttaaaaaagagtattaatcatagatatcataactcataatcgattgacacacgagatagcttaaacgatgcagaataagcaaatattgtatttcaattggggttggtgggtgagctatatagttatcaaatatgtataacgttccatttttacaaaagctgactaaatctacgagcaaattgcacggattccttaatccgttgttgatatgattacataatcatatgattagattagatattaaactattaaacaataaaccatgccattcaaagggtaaataactttatattattttacttcgtatggtattggtacctcagtggaccgtcgtagctaggtacacagcatccttgtactttagaaagttggctaaacttttgcatagattaatgccaattgatttgctcaatatgtgtgggaatattaatcttagatatatcgaataatctgttgatttggttttagtttgcggatcaaaagaccctatttattatagatttagtgtgcatgtattccattaagatttaagaccatacttatttttatccaatcatttaaataaaagtgcaatttgagctggtttattagaacatagttatatttgaattcgagtataattacctggctagttatgtattaatgttcatgagaagtatgactaatgatctcataaatagtttctagctctgaataacttttatattactctaaagcatatagggttaaatttatatcaaagacaagttttaaactaattcactgatataagtcacaccaaaaaattcagacaattggaatctatatatgtcacacttcaaatttcactagttttagacacgaccaccagtgatgacatagtctgatatgcttaattacaataatatatattttgctatttattaccaagtcatatatattcgagggtctaaaaatcaaataaagcaaacaacatgtcgaatcgtggagttgaatcggaaacttttgacagtctctgtcactagaaaaagcaaaaaatagaataacacaaaagaatcttgaactttggaatttatcacagcagggaaataaccaatcaatcgacatccgtgttaaacaaaacaaattttatatatatatgcgtgcatgtaatatttttcttttttgattaccaaagtaggttaaattcctcaccagcgatatttgtgtgatttctatttgtacaaaacaaatatattctcactcagtaaagctttatctcttttgagagtaaaagatcttgtcaggtcaaaatgtgtatgtatagaaatttaacagtggtttttcatattttattcactgaaagtatccaatatctagatattgttcttggtccaagatttggatttgtttcgaagataaaaagtaaaatggaagtgatatgcaaaccctgttgggtaactctttctaagttgggtttagtttgatgaataagagttttaaagcccatcgtgataaggcccatattgtccgacccatttcgaagggtttgctttatacaggagcgggactttaaaaaaggaaacatatgaaagagacgttgaaaacttcaattcccaaaatacccccatattatacagaacagaaccataagagaaacattggtttgctttgatttctcaaggaagaagggatgatccaggggctaccgttgctacaagattaaggacactataaagacttgacttagagccattcttttacattctgttgagagtctggttacaaagcacatgtcccacatgacatcaatcataggaagattatcatgactcgattgttccttataaactggaaagacaaacaccaaaaggaactagttctgcatctacaagaagttgttccatatctgccaatccagctacaaatatctcataggaagggagtgacagagtaacctgagctgatgaaccggaatgtgatcaaaactgatatttggtgataaaattcatagacaattcatctcgaggatattgaaagcattatagcagagcaccaatatagagataaatgcacttagtttcaaatttaggtcaatttttagtccgtttcgagatcattatggacgaagactcttgtacttgtgatcattacgcttggtccaacactcttagagccaacttgcaatcacaaatttaaccttggtgacttcaaaacttttctagtctcattataagctactaattagctacaaagagtattgaacatagtagatacatagatcgaaacaagatttaaactaaactaaatttatttttcttaacacataatttacaaactattcacactctttctcttcgcttatgttctgtttttttcttatatgcttttatgaccaaaactcccaccagttagggtaattgctgctagattggtctaagagagaatcagaattgaaacctccccaattctcagaagatgtcaagcaactatcatcagctttctccacaatgttcatcagctcatgatcagtctcttcctcgaacccaaaatactctgttttaatgttgttgttgtaatcaccatcattacatagaacactcccttggtctaacctcccttctggctcactctttccattatgcgactctgtgctgctgcttagagccagtccttgatcaccacaacactcatgatgcttttcttctttaggcctttgcatctcttcgtttagtctctgcagctgcaaatagagattgattaatatcaaattaggcaaaatgatcgagaatttacatcccccaaaaaccaataaatgccaagactgtatttgctattttatactttataaaaaaaaaagatcattatcaattattgtttctatcactgttcaattaaagataaagatatcgatagaatcattatgtacctcagagaccagagattgcttttctttcttcatgatttcaaattgtgaagccaaattgttgtaattggctctaagagtgttatactctttctcaagttgcttagttttccatcgagccctcttgttttgaaaccatatagccacttgtcttggttgcagccctagctctctagctacctgaaccttcttcctcggctcaagcctcgtctcagactcaaatataagctcaagtgacttgatctgttcctcgctaaacctcttttggttattgctcttcttcatcttcttcttattcatggtcatgccactactaatctcgctgaaacagcagttgaaaaaatctccttcttccatggttttcaccagatcttgtaagtttcttgattttgattaagagagaaggttttggaattatttgtttcttttttttctttctttctggaatctctgagttgctgatattggccgcttatatataatgtgggagttactatgtgtgcttgtgtagggcctcggatttctattattttttatatttggaaatttcattattcaaccaagacaaaataaactcattgaataaaaagacctgcaaatattgtggaaccacgggctaaaaatatacgtccaaaatttgtggctcgacacgaattggctcatgtctctttcagtttaagtcgtatttcatttagatgtgaactaatcatctaactactgataatattttcatactttttttcctttataatataagtattatcagcttttatatgtttcatggaagtgatcaagtgaatgataacgtgggttgacaatcaaacgggcgaactggctttggttacatcaattaatcaccatacatattttactttttaacagtttggccgttcctaagaaaaatgaagcagtttataatgaaacaaaaaaaaaaactcgattattttgcttttcttgcatataaaaggcatttttgaaaatagaatttagcagcagcctagatgatcgttgtactatgttttaacatgcaacaacgtatatcatcatttaacatgtgactgccaaggccttgcgatacttttattagtcaagataatattgatagataatcattacgaaagagagagaaagacggatcgtattaagcaataattttattcgattgtgtaacgagattccacgttcacatatcaggatgtttgacgggtgttaattagtgtgttataattaagattaaaataatctccattttcatttgagatttcatttgtcgttactcgcacgccatactttagaggtcggttacgtgaaacacgttttaacgagacttttcattagtgtattatatactatgttctaaaataaacctactcttgatttatctcgctaaattccaaaagaagattaatcatggttaaaattgtggccgcatgtggtaagctggcaaataattttgcaactcttcaattcattgcccaagaaaaataaaaaataaaaaataaattaagatatatttgcatatcacataccgtactatagtttacgcgatgttttacgcgtttaatttcgttacacggaaacaataagatgatcacgagtaaggattatagatttattgacttccatgcaaatgtttaaagttttaaactcaattatgagatttcttgactttcttgtaactaaacaagtaatctgacctaattactatcctcttggtttccttttcaacatgccgttttagttttcttctaaaaagtatacacaatccagaaaagaaatataaaccagtggtgttcctattatttatttgacctttttccatttttctaaaaccaatagtactaaatataatatgaaatctaaaaagattattatacctctattaataagctaactattatggatagaagtatcttgtctaaaatatatgcattaaacatacaaaataacagtttacataaacagaaataaattaaaattctacaacaattacttattagaaaacgaagtcagtgtagtatgtttttttttagacacgaagttaatatgtttattcttacaaaattacacaagttccgttccgtcttaggctctgaaacactaattatcttaaccatgggattttgaaagtttgtaattttaagcaacaatattaatgataaacgcaacttatataattaatgttctaatgattagtttaaggttacgttcaccttgcttctcggaaatctcttttgacttattaaatacaaacaacaaattaaattcggccatttgtgaactatggcggcttcatcgatccaacgtcactttagccttaagccattaaaattaaaaaaattataaataatctattactttgctttaaaaccagaaaattacttcatgaaaaaaaatatttgaatagaatgacttacatcgacttatttcaacaaggaaatggacgaaagttttggtatacaatgtaatgaatcagatctgtagacatttcagacaagtagcaatcaaagttgtcaagatcaaccactgactcattgccatttggcaccattaagaaagccaagttgatgagaagatgacgtggtgattgctttgtggctgtgtatgaaaattgcgtccgacaaatgttatcacgtgtcgaggttagcttaaatgtagcagttcttgataagatgcgtaagagaagatgattctttacttctattttttctttcatttgtctaagagaaatctggttctgtttaatgataaagattaaactagtaatatggttttgagaaataaaacttaagaaatcaaatttcgtcctctttaattagatttacatcttggctatgatttctaatacttactaaacgtagttttggctcatttaatttggataaatttaacagaacatatacataagactatagagccttttaaagtcatatttgtttaattattatttttaaggcgccttgtcatttcatgtttgtattttgcatattcttccaacctcttggccttgccgcgtgtaaagcttttgaaatattcacagatttataaatatgcacattcttcgtaaagcttaaatttcagttaatgtatatgaaaatacatacaggtaatgtttaggctgttaattatgatgatctactggctaaaatagcacaaactgtcattcgaaaatgatactaaaacctcgattttgtgaaaataaataagtgatcattaagcttaccataaataccatgtataaataaatacatctgaaaaacgatgaaatgaaaagaaatttttttgatgaaatgaatatgatccaacttattcaagacaagtagggtccatgataagatgccaatccaatgaggaagagacatttattttaccaccgtcctaaaacacaaactatatgtgatgataataacctttacagaaattatatcaaaaatgaaaagaacttataaaaagaacttttgatgaattcactcattagtttattgatgttgttatttgcaaactatatagagtatactttaagattaaactctctatcacgcgaaactctaatggccaacaatcttccgctacttatttaactactaattgaagaatctgttaacgaaaaaaaaaactactacttgaggaaccttcggattcatctagaaggtttgtaatataaagtcacgtgcaaggcactactctcggtgttagtagatgggcaaaagatcgtaatttgttattacatatgcccatgccgctgagttgtttaattttcttcctgttactataatggtagaaacaaacatttactagaaaaattgaaaccttttttttgtcatgataactcatgacaagattggtatatattgaccgttcggatgcgtttgtcagtgtgtgaatgaaagatctgaatgtcagcaacacatctttaaaatcgagtttggttctttctaaaattcggcccatatcagaattagaaggcccaaataagaagctacttaaattaaaagcccagttagaccatctgaaccagttatacaagttttatttgatagctagaatgggctttgtatacaagtagtgtactgttatgtagatatgcttgttatataaaaaggagacaagtctaatatgaaagagtgatggacatttttagaggacatggtaaaaagaacagtgaaaaaaaagctatgacaagcgtcttatcaaaagacctttgaatgtttcttatgaaaaatttcaaagtgttttcattgtgaccgcaaaagacatactaataataaacgaatgaattaggtacaaataaaaaagctatttaaatgagtttggaatctgagacgagagagcagaaggagtaattaatgagagaaagaagatggcagagaatacgaacaaagaggcattaaatgctattgtactctcgctctttctcttttccctaattacaatgctacccctaccctatttatttatgcactttcctcttaattggtttatttgggaattgttgcagattaaactactgcaaaagctcgttaaggaccagaatttatatattagtagtagtttgtatatgtaaacataatacaaattaaagtttgacaattatacgtgtttcaattgtacacaatataaaaaattggttcttacagaattaagttatatatatatatatatatatatatatatatacttacattaaaatcttattttcttttggtcctacttccacattttaactgtaaatcgaaattcaaattacttatattgttgtaggtgatattttgaaatttcaaaaagccataatgcccaagtcggcaaaacattttttttttaaaacaatctatgtttttttttgtcttaaaatttcatttatgttgtgggcaatttataacgcatgatgtaaaagtgggacttagataaaaacgtaaaagtttcctactaattttgatgtcatattttggaacgaattcacaattcttgacagaagggaatacactttttccacaaattatgtgtaagagattcaatatataattggtgtaagttaagagattcaataatttttgtttcctctgttaagagattcaatatataattgatattagcatactaaaagatgtataattatttgcttttgaaaatgaaaaggaatgtaggagtgggacaacgtggggatttgacgttttcctctttgtttctctcttccaagatacaacacattacacatctctcgaagactgtcaacaacgttgaaattggagctaagaatcgtcttctccatttgtcattctcatgcacagtctacgtattactccacgcttacactaacatacgcatgcatttcattcttttgtacatacctgtataagtgactcgataatctcgaaactttcgttgacaacttgaaacatattgaaaaccgaatcatatgtagctatgaagatatcatatacctgttttttttttttttataacacatacatgaatttgcagatatttcatctctatgttagtttttggtttaaatagaactaaaatttctgaccatagatttgaattatagaccatagaatctatactcaattaaattttttgctgcagtaaattttaatatagatttcgctgtttatatattacgaggagatttcattaggtttcttggacactaggaaactaacaaaatgtttcagcacatgtcgcgggcactctctagctaaagctacaatctttattttaaaacattaaaaatattttcttctgtatatatttcatatttggtgatgtacaaaacaataaatacgttaagaccttttccgtatgaaataatatactagtatatatatcgagtttcaagaagatcttttaaaacccaaacaaaacatttcactacaacggtcatcagatgatttcatatgatttaagttaaattaactttgaatcttctatataaaaatatttttgaatctataatattacagctggctgggtgatcgtattattcgtttttttttaaaatgcacaaatacaaacatatcgatattggtttggttgacaaaaggaaagactttttgttctagctgaaaggaattcttcggaaagtacctttttctgtgttccccgtttttagaataattacagtatagtgatatttgaagtagattttgctgacactagttaattattttattttatttttgtttcactagttaagttttgttatgtgtaactaactgccagtataattaataaatgtaggaaatttaattctcctatctatactgatttaccaatatttttcagtgtaactccgtacgtcattagcgcatataatacttagtcaaaaatatactaaggcaatataaaaagacgacgttttctatcttatacaaaaaagttgaatggaacagaagaattataatgaaacgatggcgaatattaattttcattactagaaaggagaaagaaaatgggattaaaaaaaaaaggctgagagacaataaatgaagaatggtaatattgggcagatcaataactcaaccactcccctgactaacttttatagacagccctcttttctctttttgattcccttttccatttcttctctattactacactaaagactaataatattactattccatctttatttttgtgatttgatcgttctcttttaccttcatccctttttggtttccttttcacggtcactgattatcatcttccttgtttttcccctttgatttggtcaaatcgtcgcaaagccaaagtaaatcagtaaatgaaaaaatcttacaaattatgggcgtgaaaggaaaactgatagggtatggactactacgttcgtgattttactttaacaagtaaaaaccatggtaaaatgagaaatccattgacatgtctcaaaaagtaaatccaaatgtttacgttgaaaatcttgaaacttgaaatatttttacactgtttgaccaaaacataaatacaaaatattcacaaagtaaatagatatgggacccagccatccagaacccatgtttattttgtcttgtatagctttggctctctctccacttacttactctcttgagtttttttctcttcttaaaaacctcttcttcacttatccttctcatcattctcttcatcatcaccacattcatctctctctctctctctctctctctctctttctcttccttgatcttagccggatctgttgggggacgaacacatgagagatagataaaatataagaaatttctcgaaaaaacctaatagaaaaaggtctgtttcttaaagaagaagaagaagaggatttaaagagggatttttcttttgaggggactgttgtctggctcgaggactcttattctaatacaatctcatttgaatacattcagatctgatgattgattagggttttagtgtcgtcggaccaggcttcattccccccaattatcactccctcacaatccgaattaacgaagaagatttgtccattttcaacttttgatctagggtttctatctatgaatccatgtgatatatttcaataattcagtgtaaaacttagttcgatctttaactctttctctgactcaattatttttgtaggtcttcaagatcttctgagtttcaggtgggtttgattttttttttaaacagattggtgtaatgatgaaggagtctgactcatgtgagaaactaaaaagtctatcatcattactaactttttctctagctatgattttgtaatgattttttttttttttatgatgtcaggacaagttagcattcagagaggctaaatctattcctggtcatgattaatgattagggttatttactttcagatccgtttgtttctaaaaaatcaaaccagatctgctagatctgaagctagtagatctgagtctttcaaactactgctatatttatgtttcttgttagtacaactattagccttagggtttcgtcattacattacttcaaagatttaatactttatatttatagattctcatatttttctttcttctttctctggttgattgttattgttctatccacactcgcattttgtcttcagcagttacttcaagcatggaagatgaagaaactctgatcagattttgtctaattttgcaatattgaaaatgtaataacatcggattagctgttctatcttaattataccaatatatgtcaatgtatagctgatctttatttacatagtggatccatcttaaacagtttttggtggtgcttatatatatttctcatgtaaattagaaacaaagacatcgtagtgaatcgtactgtttgtgaaaactatttttattacttgtatgctataaaccaatctaaatcaaccacattgaaggtaagaatcaagtcgtcaaatccaataatcaacatttatgttaagaaattacaatttgttgcacgtttggtgaaatgtagtgtggaagaggaagtgaaactctttggttttcatatcatatcctctgtgaaaaagtgaaaatttacgaagtgaacggatataaagtgtaggaacgaaggaatgttttcttttagacatttcactggagcagaaaagaaaaaaaagaagataataaattaaaggatgaatactgaaaatgtacaccaatctaaagaaattgtgaaagaaattaaagttttattgtataagaaaaactgctttttgatttccaaaagttatcttttcactagtgagtgattacacaaattaccatgactcttacattttgtcttttttgacttcgtttgcttttaacaagttactatgttctttattaacgacgactttgacctcgttttttctatctacggtttcagtgtccgtcttactagtagctacctctaggatttgatgtcaaatttaattcttcattccattacatttattttttctttacatcgatcgtgagattcgtgacgcattattaattattctgcaacttttttgaataatttttgaagaaatacattaactaatagtttcatctatgtacgggaaatgttttctgatagattttgcttctgatgaagaaaaaactatttctatcccatgattaaccacattggaggtaataaatgatcaacttatcaacaagatttcgaaacatttggtaactggaacttcagatttggacattttaagtgaaaatgaaggcccagttcggcccattgagtgggcctaattaatttcacatcgcccatttggccatagggttgagttattttcttggaaatttgttgtctcgaacaaatatttcgtatttttgtaattcgcatacacaaatccagaaaagatgcttcattttattttattttgtggtatcgacctccaaattgtgtaatttattgatattgtatcgatgaaattttttgctagtataaaacttaaacgatcatctgattttatagcccttaaacagctaatcgttcataattaattatatgttttcataataagttccagatgtgaagaagcttccccatcaccaacttggaacggtcctttttcttcttttgtgtccatcctacatttgtaaactctttttcatttatactttcttccaaaacataactattattttatctttccttatggtaattggtagaatatttttataatcactattaagaataaagtttaagtagcatacaaaggtgaaccaaaccgttaatcttgaaaatgaatcaaacacgaacctaaaacatttgtatttgcttaaatatactgtccacaaaatttcagttgtgatcagtttgttttcggccaactctatcacttaacttcttggaagtatttaggcagcccttgaaagctcagaaaattatgtttactaaacaaaatttaaattcattaaattttgcacaaattaaatatatatgtaattatatatgactggttaactctttctttagggacagattttctaaacctttaaccaaataagaaaataaaatttgtttgaacgattactcgtcgatatcgtctgaataagtcgatgactaaggacatatgttattaaatgacatccatacgtgggcatgtcctgacgttgattcttcttgttcttcacatatacacattcatcaacagacaacaccttttctattttttttataactaactacaacgcaaatgcaagttataatgatgattattccacgtatcaaatttattaatttacttgtctttgtgtatcagatgaaatatttgcaagtgtctggtttttgttaactaaaaacaaatgcaaatggtgtctctctacttgcgtttccctatattctttttttttcctcacaattaatttaaaatataaaagtaccaaagtggattgttattaaatgatgcatatccgaaatgtaaaaatatccatactgcaatcctaagttacaaccaagtttcttttaattgcgaaatggatattctcatttaatttagtttaaaattatatctatgactgtcatcttaaatattgtgcccatataaataaaatgaaaaaatatgctattgattattatttattatcagtagagatgtagaatacattttccaataaattttgttaatttgttggatcttttcttctggtcaactactaaattgatttcccaaaaatgattactgaaattctctgtaaagattttgtgatcaacatatgtaataataaaggtatgttttttaaattatatattacgatttcctttttaaaaacatctccttaatatgagttttgacctttttattccactcattaaatccaaattctgtaaaaaataaacaactttataaaggtctcttaaattcgctccacctccactagtagagacccttggcctttctctcccgttctctagaaattttgttccctcttactcttcttatttcttcatcgtcttcggagtaatgggttccggagaaaaaatcctcaagagcgtccattcaaaccgtcccaataacgtgaaaagcaatagcaaacatgggatcaaagatgtgccaaaagggtgtttagcaatcaaagtgggatcaaaagaagaggagaaacagagatttgttgttcctgttttttattttaaccatccattgttcatgcaactcctaagggaagcagaggaagagtatggattcgagcagaaaggtaccatcacaatcccttgccacgtggaagtttttcgatatgttcaagacatgatcaacagagagagatcggttaattaccacaacaaccatcatgatcatcgtcataatcaaagtcataatcatcttgttggatgttttagagcttgatgatgatgatgatgcaagcaagcaaacggggtgtaaaaatttgcgtttcatatttagtttcttctttttgttttgtttttcctttcttttctaatgggtttgatcttgtggagttgtggagccaaacacggcctaacccacaagattaggagtagaagttctagtggtgtttggaaatatccataaatataaataagtgtgagattataaattaattgttcgtataatttttcttgtgatatatgtttatccgattgatggtagcgagagatgacgaacaagttttggcaatttgcgtatatgatatttttgttaagagacgtataaatttgaaaactgtcactaataaataaatacccttattacgacaaaaacaaattaattcccttattatatctgttaggagaaaaaagaagaagagattctccgttgatttcaaattttatcttttttttgtatctttctgttgtaacggccagtttcgacatcgcattaaattttattgacccgaaaaacaaatctatttttccatatagactacgttacagataaagaaaatatttgtcctcagagagtttagaaaagaaatctctttctataaataatgacctaatttatttgattttaagaaatacttaaaacgaatatagagataataagaaaattaagttattgtactcgatatttccaaagatatgaataacggaatggaagaaaaagtcggcaaaaatgggcacctctaggcatgaaaataagtctcttctaatcgatgtctttactcaatgttctaatccaaaaaaaaaacaagtctttactcaatgcgttaattccaaagattatactacccttttcaatacaaaccagtcaaccaaccactaggcatgaaaactaaagaaagtccaagaagtttttttttttttttttcactttcttttttgtgtattggcttccaacacaaatacataactatgttaatataatttttgcgagtactgtagtttttaccccattttaaaagaatcattttgattattatttatgtgtgatatctctgtaacaaagagatactatggtgttctttatatcaaagtagaaaagttaaaaagtaaacgatatacacattcattagttgtttgaactctggagattcccccaaattcccgtaagcaaaggagtacgaatacgaatccactcaagccaaacgatcatcagtcatcaatcacatgtaataagtggcctggattcatttgtcggtcgagtgtgtcgctattagtggaaagcctttattaatttgttaaataatgcttataacaataattagcataccttttttataaataatatgccctttcttattcctgtgtttatttttttaattcttttttacattagtagtcagtgaaagattacttgaaactaatccataaagggcacaaaattagcaatatatactatatgtttcgtgtgttaaatcatacggctttttgtgaagtcggaatttccattgtgttgtttacttcatcaaacagtttacgtgagagaagaggacgtgatgatgcgagaaaattatacgaaaatcaaagtatatttacatattcaagccgtaccacaaccgaacattaattagtactttaaaatcctataccgtatattatatttgtcaattcctaataagggaataacaaagagaaaaaaacaaggtctcacaaatttaaaattcacgaattaagacatcgagtggacctacactcacagtccatttgatgtcgttattgacctattaataaaatgggcctggcccaatatacttgtggtacaattaataccaagcagaactcacatgtaacagcccacacatttttgatatttccaatattttttattaaggtttaacccaaaaaataaaaaataaataacagtgaggatatttgagaaatcctccattttgcatcagctaaggtcaaagagaaaagagaaaaattaatgcctcgaattcaagtttcatgtaattgttgcgtttagtatttacaacatgatcaatatcaatacatcattataataaatcgaatctaatttcagaaagctaaagtggaaaatgaaaggtcaaaacgttacagttatggagtctgttactaatattatcacatgataaaaagaaagatgagaatatttgaatcctccatttttcttcaaaagtaagattccgcaccttgaaagagattattcaacaataagaacgaatactgtttgattaaatgctataattgaaaaataatgagtgtgattagctttgatgggtaggttaattagctactattattaagcacttggtgcatcttaatccaagtttgttggggtgattaattgggtaattaatctattcctaatgatgaatgaagcaaactattcaacatcaaactaagcatttaccaactaaatatctcaagtttctagtaaataaaacttcagtttaattgagagtaaaatgagaaactttgaataattaacgtaatggaaatcatctgttcctaaagttaatttgtcgacgaattaattatcattttggtcttttgtctctcttgaaatcataatcaacttttggtcaaaatccttttttcatataattgtaattagaaaacacccggcgatgcatgtgacagactatgatttcttacagtagaaaatgtaattgcctttttgttcatcgaatggcaattaagtttcaaaaagacaaaaactaatattcttgatccaaagaaattcaactatgcaaccaattcttttctataaagttaatcatgatataaaatgtacacagatatagagaacttttattttctgtaatgatatcacataactacgtactgtaattatcacaatctgaccatttataccgtaaaagtttcaacaactatatatatggtatgatgattattatatctttctacacaatgttttggtatgtcactcacttagtcacttcctctcttccatttccgttatccactaccgttcaacaagtggcatgtcgttctcgcgaaatctgcctcgttccataaatcaatctccggtatatagtaatctggtgttaaaccggtattacaaccggaccggttcagtccatgatacggtgattgtgaagtctcattaacggctggtattgaatacgagttgggcccatttaactgtgaggcaacgagccgatccaaagcggcccagctagtgatgaagctgggatccataactttgctgacgtggcagttgttgacttggtcgtcgattaaccactgataactcgtgatggtggtgttgttatggcattcgaggttagggagttttaagaaagggtctaaaactatctctcctttacaagattgccccataacttcgagaagttgctcgatagtctcctcattgaacgacggcgttttcaccgaactcgccgggctactactaatcatgtttttgcaaaggttatttttcttgaaaacacgacacaccacccatccttcgtcacttcctatgacatcacacgtttctacgttgacgtcatgatcgccacacgaggagattaatacactctcgtcgagtctatattcgtgcatgatccaatcggatttctgaccatgaggggctcgacctttgtagaagacaagcgtctttcgcatcccgattctatcaccattggtatatatggtcttgtcacgtcccgtcgctttccaaaatccgaccgtggtggctctgttggttctagtcccggtgggatacttcttgtccttatggctataaaagtaccaatcgttttgcggcgtcgttccaatcttacacatctctacatagaaaaaacaagagttgtgttaagttttgactgaattttgttactgcaaattttattatcacaaaaagtatatattactctgcaaaatttcctgaattcagagctttagttcttgactcaacacatgcattaaaaaactaatttaattaatatatacaagccctattaatacgtttcatcaagaataaaagataaatgatgaaccttgaatatcccaaggctcgagcttgttgagatcaatgtcaggaataacatcgagatcgatcttgatgttagagattttcttgcggaggtaatacttcaagagctcttcctcggttgggtgaaacctaaagccaggaggtacttgtgactgtccgtttactgatatgttcattgctaaagatagaaaaaggagaagaaaatagaacgagtttataactaaccaaagtatgtctatatatatgtgtatattttttacatcaactctgcaaaaaaataaataatagtacatgcatgagaaaatgcatgtgttcttttgctctcatatttttaattcctttgttaagttttctttttaacagtggagtattatttttccgaatatttgatgttttcattataagttcgcatgagccgccacttacaattaaacatatgagcctctaagagcttgttttaataatttgaaaatgtctgttttatactcatagtgaatgcacttctcgaaaaattactccctatgagtttttacttaattcttagttcataccaagtatatccagccaaaacaaaaaaaaaaaagtatatcgatcaagcttcttcggcctttggttttgccgacttttcgctctactaattgcctagattagcatgttagttttgttttgtttttgcttttatccagaaatctctcgtaatggttgattcgtcatgagttcacctagtatttaaaaatctatctatttttctgcatgattcagtatctctttaacaaagaaaaaaaatatgattcagtaaattagatccgttataaatacaatgttgcaatatttcatctaataaaagttatagtaatgtctctcttttttttttatttttttttgggtcaaatatactaatggtctctttattaaacatcgaaattatttgctctttttgtccggtgaaattgtttatggcaatttcggaatagtgcgtgagagagagcggtgggaccatgcacgtagctattgggtaaaaatatggtccacgcgggatccacatatcaactataatgtaggaagcaagcccacatcgctccgatgaccctcgaccttaaaaatctctatggacaagacattcctcattttatttttattttatatagaaacgaatagtgttaacaaaaaaagtgaatgaagggtgatggcaacaaaaaatgtatgtgatgtgatgaagaaagactttatacattattgtgttaaatacgactttaaagctcgtagcttgttcttgttgaaggtgatgcgaagataatgatatactacatgataatccacaacctccttagaagatggagagaaagaaagagattaagatctgattcaagaagcgtttatcaaatatatgtgaagttaacattgcaacgaatgtctaagattcgaatattgtgcatgtggttcactcgaactaatcataaagttaacctatctggtattcaggaaacgacggtggattcgattcatccaaattaaaattttaaattattgtattaatttaaacttgaatgacggcatgaatctagatgaacagttgtttacaactgtaagcgaggaggtatctacgtatgttgtagattttgtgggggcctatttacaaaaggttattttctgaatttcctttttcttacacatggttttgagattataatagattaatacgcaagggccgttcaaatttgccatgtgctataggataacattgttaataaaaaattaaatcatgagattaaaattttgagttaatgaatattctgaaatgtctttttcatttttctaacatggttctgagtttatagcagagtaatatataatctgattaaaacgaacgttgttgcggcacggagctatgataaattgatgataattagtgacaaaaaactaaaatgatataattgaagtattacaaatcgtaatttttctagaagatgaaggaagtttgcatgggaagcaatcttaatttgaggtgtttcaaaatttattaaacccttaatggtgagacgtcatataactatatatattagcactcgtgcttgtcggacttataactttagcctaatcttaaactgtttctggccagctttgtgtcattgggcctgaaataaaagagtttctcccttttgttttgctcttctagacttttggcattgaatagggaagattaaataatctctaactacgagtctacgacttcataaattaattgtttcatgagagataacaatgatatttcaaatatatctacgttgataaacttatataatcgttccaagtcttcaatgaatacggaaatcaacatactaatttaaatgcttaaatcgtgaaacagattaaaacataaacgtagtttattcataattcgaaattttaccacaatttccctttaaagctactcgtaacgcttagctggtctgaattcgctctcgaatgaactcctccgccgcagccgtaaccgccacacttcgccaccgtcctcacactttccaccaacgcttccgtttccacatcctccgcaagaatttccgccaactgctccggacttatcacaagcctcaccttccacactccacaaccaccgccactcaaagccgccattatcggcgtcttcccgaaagacattctgtacggcgttgatagttggtcggaggaatccagttgagcggtcgcggctgcggaagaagaaagaggaaggaggtagtagatgttaccgggaaagagttcttcgccgtggagaagcggtggagatgagtggcggaggcttaaagagtcgtggatgacatggccgggaaattcgttggtgatgaattcggcgaagatgggaggatgaagctccatcacgccaccgtttggagtcaccacttttatcaacgaatcatctttatcgtataattttcttgaaccaccattgcctttgaatacgcagttacccatttttgctacataagttagaaataataactgattattttgtgtatatgtaatgtatggaatccaaagaaaaccccaagacggagaagggtttaagacaaacgttttctttgagcagatgaagtatatatctttacgacgtaaagaaaaaatgaaaattgcgaatggtccaccacttttcttgtaaacaaaaggaccgaagatattgtgcttgcgatattatcatcattactattattttagtctttgaaagataaatgattattatttttggttatttgagaattgagagtaattggcaatggtctgtttgtagaacaattgacaacaagtagaaaacatttgaaggtaaaataaaaaatgaactaatttctgtagaataattggcagattaataaataaaataaaaccttatctaaacaaattacaaaaagtaagataaatggttttccttaacctattttccatttagaaaggtaagtgataggggtaataatgttcacgtgaggtcaaaaggtgaaaaggccgacagagacaaaaagactttaatctttgtaaaattattatggatgattaatgaatttaaccattttaccaaattgttagaaaacctccacgaaaactaattctataaatttataaatggaacgtgtgaaactatggaccaaacagagtacatcttatcagatcaacagagtatataattgcatgttgtttttactcgaattgattaatataatgtcacataacttgtgtggatccatgtcctacaacaatataacattttgtctttttatattatacggagttcaaaaaagaaagattctggaatacgaaggaaaaaaaacagtagtacctttcggtgcactcaattacgtacaccaacaatttcttggcgggtcattattaatttcaagggtcctaatgggcaatggcccatattacatactcttctttttttcttcctattatttaaattatattagagagctttgagcccaccatagtgcaaaatatattgtttttaaaaagaccactagctaattgtcacagtctctcacataccacatgctgaaattgcaaatactaacaaagaatcaagatttgtagaaatacaaatgatattttattcatttattgtttttgtcagtttgatttattatttttgtaaaaaaaaacaaaaaacaagtgagatagtgtatcggtgtttagttagggacttaaatgtgattttggttcatatgtactttttgctagcctaaattaaactgagtttagtataaattgttctgtacaatcttggtcttggtttctgtctgatacttttttaattatttattttaagtttcttaattataaagaaaagaagttcatttgagcctaacatcaacaaactatatggcccaaaccattgccaacactaataatgggctaaacttcactgaatggaactacataatgggcctcacgaaaaactacattatgaatttcttctttgtggtcctgattatgacattgccttcttttgtgaacagaaaaaactaatgacattgccttctttgatgagctttgctaaacggggatcttacatacaaaaatttaatctaatcgaaacccaatcagaaaaaacggggaggttctccgtttccgttcgatctaatattttattttgatataaaacgagaaataggtgatgattagtattaaattagaggtttaaggtgacaaaatcccggggataaagaccgtactttaagatagttgacgcgtgaaacacaccctgtgttatgttatgggttttaatttacttagattccacgtcagcagatacgtgaaccagaacaacacttaataattccgtctaataacctcgcatgccccatgcatcgtagttcacattcttactcaactccttcctcatttatcattccaataaactttacccaaatggtttcaaaccgagatctaaccgtacttgactttgaaaatcgaatgctaaccatttacataccgaaccaaaactaaatttactagattttatcaagaataacatttttaatcaaatggatttcaaaattatactcagttatatattgaattatacatagttaattatgtatagttactttcattagaaatagttatctaaaaccgaaataaatcaaaattttcaaaccgaatcgaaccaaactaaatcatttttttctgtggtttcgtttggacatactttgacagcaaaatcgaaatacccaaaccggaaaaccaaattgcacacgcctatataaaatgccttcgcttatagaaaatgcctaacaatctctcatagtcatatatagaaacaagtcatacacgtatcaattaaatgcaagcatttggaaaaacaagaaagatcaagaaatggggaattttcttaggagaagctgcgctgtgcacccggcttccggcgacggaggaagaggaagacacgtggacgagccgccgcaacaacgtccaagtagtgtgcggattaaagtgaggatgagaagagatcaactcgaagagcttttgtacttggcgcgtcgtggtgatcaatcggacgacggtggtaagattggtttcttgattcttaaagaatgtatggaaggtcgcttaccagcgagtgttcttggctccggtggcgatgttcgatctcaacggcgtggaagttacatggtgtatcggagattgggttccatcaccgaggaataattcattaatatatatatatgtgtctttcaatacatatagttttaaagtttagatagacgacactttaataacgttttctagatcaacaattatatgtaaggctaaagaaacaaaaaaaaggagtttcgttatcaaaaaattgaaaagaaaaatatataaaagtagtatgtttgtgtcacgcatttaattaaagatataagtgtaaatctcaatactttttattcgtcaacaaatataagagttttgatggcgttttagcatcgcataattgtggacatctcaaaaggtaaacttaaagacaaacttcaagtctaattgacaacttcaaattattctaagagccataaaactatctggttcatccaagtcgtttatcgacccatagaatctccggaacgtagataagtttttgcgcttggttgctctctttgggcctcttaagatctccttggcaccatcggaaggcttcaaaatgatcaaattctttattcttgtaccaaatgatgtaaaacagaattaggataattaataatctttatattttatttctctatttttaaaataactactatggttatcctaattgaattatgataatatttgactattgtgtgtttgtacataaattttttacagacctggattctccattcagagttcgaatcgagacgtttccatttatttatattttctcgtttggaattttccaaattcatcattacagaaaacaaacgttaacattccatcaatatgtaatgttgtacttttttttgtttttgtatttttcaaaatttcaattaattgagtcccgttgaaagtcagagacgtctaagataggccgaataattttcttcgtaaccatagcagccgaagtaattctgtatattattttatttagtcagcctagcatttatcattagcccattatataactttcaaaatgggcctgttattctgtacagcctaaagattcaattgtttcgttgaaaaacaaacaatttcgtggactatcgtcaataagattatgcaaaaaaaaacaaaaaaattatgaactttaatggaaattcagacgatatgaagagagagtttggcttttgtttcaagattctttccactctctgtgtgatatcagaattggcccaaatcggaatctgatgtcgcttagatttcgtcattgttacattgggtctttacttaaatatattttctaatgcttctacacatgttatacaatatgatttgaggtttgactctctgttatggtatgagtatgttgtcatatcatttaatgtgaatttttggtttgctcgcatccttgtgtagttgtgggatgcatgtctctgttttttccacctttaaaaatctccttcaagtctcaaactctaacaccttactcctgaattgagtttctactatcttgttgtaaggtatcaaatctatatactgtattcataggattgcgtatagaacccattgaatattgattcatgctctaaagttacaatcttttttgctgcagatggattcaagaagaagtaaagtttgtggagaaacagcttgtgggttttcaacatcttcaagtgatgctaagaaacgagctgcttcaatgcgaaagctctgtttcgttgtggtgttatgtcttttgttcatgagcatagaagttgtttgtggcattaaggctaacagtttggctatattagcagatgcagctcatttgctcactgatgttggtgcttttgctatctctatgctctccttgtgggcttcttcttgggaagcaaatccgcgacagagttatgggttcttcaggatagagattttaggcactcttgtctcaatccagctcatttggttactcactgggattttggtctacgaagccgtaactagactcgttcaagagaccaatgatgatgttgatggtttctttatggttcttgttgctgcttttggtttagttgtaaacatcataatgattgttgtgcttggacatgatcacggacatgggcatgatcatggtcacagtcatgatcatggtcatagttatggggaaagagctgagcagttgttggagaaatccaaggaaataaggaacattaatgtgcaaggggcttatcttcatgttcttggggatttaattcagagcattggggtaatgattggagggggtatgatttggtataaccctaaatggaaagtaattgacttgatatgcacgttattcttttcagttattgttttagggacaaccattaagatgcttcgaagcatacttgaagttctaatggagagcacaccgagagagatagacgcgaggcagctcgaaaagggattgatggaaattgaggaagttgtggatgttcatgagctgcacatatgggcaattacagttggaaaagctctgttttcttgtcatgtcaaggttagaccagaagctggtgatgaaatggtgctgaacaaagtgatcgattacatctggagagagtatcgtatcagtcacgttacgatacaaatcgagcgttaaaacaacaaaagggttcatttctctggttttctgtcattttcatgatcaaagttaaatcttttttcgctttctcgtatgctctcattaccttgttgtgacatatgccattgtctttcttgtttatgaataagttgtcttgtcttgaaaaaggtaattaaaaggacataactttatttgagattagggatttgtgttaagttactactaaagaaaaatcagaatctttagggtttatctttgataatagacctaccaaaaagagtggggcatgtttgtcctaagagcaagtaaccatagctcgtgtgtgacagttaacaaccatatccagtacacaattgataaacaaagattcaactttctttggagttttgatgtgttgataaggtttctaaggtcttcgttaaccaataaccatgcaaagcacgaatgttttgtttctttgctcaaattttgtgagaccggatatgaagttacccgtttggattgagcttgtggacatgttgggacatttttataggacaaacactgtttaatgccgtagcagccaaggcatttagagtcaacctttttcttttaattgtaatcaagatatgtttgattgcaaagtaataaacaaaatcccacactttagaaaccttacatctattaaaggttcgaatcattagaacatgatggatgcatgcaaatgcaacatggtatctgtataaagttttagctttttgagccttgaagaaaaggaatggtgtggtatgggaatagtgaagaaaggatgattgagacatcatgagaaagatgacacaaacccaaaggaagaagctctcttacccatgacatgtctcttttttaccttcttcttctgtgtaatttagaactgtccccacaaagtctgtctccacttcaagacaaaactgcttccaccaataatatctctctctcatctgctctgctcagcctcaccaactcttacagtacccaaatacatctatcttattacctctctgttttttacagctcctctgtttccactctactcaatagctttactaaagactcactgttctatataaagctaacagttacaagtccataaaagctcagaatcagaagagagtacatgagtttcctcttctgcctctttggtgattcttagcatttattattactcactcatcttcttttcattacattacataccaaacaagagctctcaaatggaaaggtttcaaggacacatcaacccctgtgtatgtatcttttgcttgatttagaaaacttttaactctctttcttcaatctttctctcttcccttgaatcatttttttccatactcagagacatggacttgcatttactcattcctaattagtccagatactgtgcatttaatgcttttgttgtttgttttagagaaaacagtaacaattcctaattagtccagatactgtgcatttaatgcttttgttgtttgttttagagaaaacagtaacaattctacaatcatttttgcttccctttctttgaaaacattccattttcctttctatttttttgcttatctctgtactaagaaccaaactaacccacagtagaactaaattacacttctctttcaatcatttgcgtctcaccggctaatctcattcctctgtcatttttacagttcttcgatcgaaaaccggatgtgagaagcctcgaggttcaaggatttgcagaggctcaaagctttgctttcaaagaaaaagaggaagaaagcttacaagatacagttccatttctacagatgctgcaaagtgaagacccctcatcgtttttttcaatcaaagagccaaactttctgacgctactgtctcttcaaaccctcaaggagccttgggaactcgaaagatatctttcacttgaggattcacaatttcattcaccggtccaatctgagaccaaccgcttcatggaaggagccaatcaagctgtgtcaagccaagaaattccctttagccaagcaaacatgacactcccttcttctacctcatcaccactcagtgcacattcaagacgaaagcgcaaaatcaaccacttgctgcctcaagaaatgactagagaaaagagaaagaggaggaaaacaaaaccaagtaaaaacaatgaagagattgagaatcaaagaataaaccacattgctgttgaacgaaacagaagacgtcaaatgaacgaacatatcaactctctccgggcccttctcccaccttcctacatccaacgagtaaataaccaaaagcatacatgaaagtttcaacctttaatcatcaaaaccttatcaaatgttgtcctgcagggagaccaagcttccatagtaggaggagcaataaactacgtgaaggtcctcgagcaaatcatacaatctctcgaatcgcaaaagagaacgcaacaacaaagtaacagtgaggtagtagaaaacgcacttaatcatctctcaggcatttcgtcgaacgacctgtggacaactcttgaagatcaaacttgtatccccaaaatcgaagctacagtgatacaaaaccatgtcagccttaaagttcaatgtgagaagaaacaaggacaacttctcaaaggaatcatatcacttgaaaagcttaaactcactgttcttcatctcaatatcactacttcgtctcattcctctgtttcttattccttcaacctcaaggtaaacactactttccattttttacttcaatcaacaaaaacccaacattgaaaattgaatctttaattaaaaaatcttgttttttttttcaattgtgtcggagcagatggaagatgagtgcgacttagagtcagccgacgagattacggcggctgttcatcggattttcgatattccgacaatttgattaaacacatataattccaaaaatattaacagctgacaaaatggtatcttttttttttttcctacttgtaccaattttttaagaattaagagaataaaaaaatttcgtttttcgttctttcattttcctactgacagaattaaattctgttttgttcgtatattattggattgttcgattattattgttcaggctttgggtgttttgtgagattgggtcccatcttattaaaagtttgatcttattcgtctttattatttcatcaatcatggtttgacttttgtccctattttaagtgttgactttacgatcattgtcaatgggatgtcgtgtaccagacttctcgtttccaaatgggacgtttagagctttcgcctttggagtgatcctcctcgagcttcacacgggagagtttgtgcaccaacaaagtttgcatctttggtattttaagctattattgatattggcactatacaatgagggaggcaaatactttttggtcacagcatcaacaatatagagtaaccatttcgaaatttcaagagaatataaggaaaagccacaaatgttatagacttgacccaagcagagccaggaaagtttcttatatacaatgcccgcggtctattttcgctaaagatgagaccgacgatgctgtaagttagagatgtagtagagaatccgcttcttgtcgtcaggggttaatgagaaagaggggtttagagatagagtcactgcttcctcgattataaaggagagtagaagaattgctttcttgtataatgttgctgcactttctttgttactcaaatattcttcagcctgaaaaacaaatacaaatggatcaacccactatgtttcagacttttaggacaaatcagtagatagaaaggtagaaagaagcttttcataaaactttcagactttagaaccaaatggtaaaaacataagcgaaaaagatggaaactttgtacttaccccaccactcttgccatatgctagtgccctctcgtatattgtttccatggcgtcaggcatatgagtggcagctgtaatgaaacgcaggagatgccttcagataatctcaaagaagcataacagagaattgctcggttaggtactaaccacttgtttcgtttagttgagttgataaattctcggcttggtttaacgcggtaacaaactcttgtgtcacccacgttttagctggtgcaggtgaattcaaatctggaatcgaagtctcaggagccgtggttggatctgggttcacttcattctctccaacggacatcatccaagaatcacatatctctaaggcttttctccagacagctaaaacgacgagcgtaacagcaaaagattcctttacctgccctgtattgccctgtatgcaaaggtgttagaagctctaatgttatcatttaagaacccagagttcaggagttcaagttaccatctcgctagctagttctgtaagtgcttgtgcatactgatgcaaaagttggagtttagttggaggatggacaatcgttaagcgttgtacttctgttagcagatatgaaacgcttgctggtcgtggacctgacacatcagataatggtttctgtgcttcaagtgaactcgatgaaactttttcattccttggtaagatattaggaaaaccggaatcttgcaatgatgtgtcgaaacaatctgatgaaccttccagcgaggcagaaggacggtttacaagaacatactctctctctatgagctcgagtgaatcaacaactgcacgaatgacatagcaagagtatgtgagtaatacgatcttatacagagcaacagagatcagacataaaattgcgaataacaaacctccagattggtttgatgagcattgtccctcagtatcttttctagtcttctcaaaagaggtatgtggcattgaaatttgagaatttgaggcactagaggaactcccatgtttgtgaacattctctgcacttgatttaaaacggtttgtactagtactcggttgtgcggagggcaacagtgatttccccgtacaggtactaaaaccagaatgctcaacatccggaatttgtctaacaacatttagtatgacataattaaggggagaaaaattatagcttttggatgatgaaggttgttttagtcaaaatctacagactttaccttggctctcgaaggaacatgtgattgaagaactctcggaatgtcaagcgttcaactgcagtaaaaaaaccagatgtttccatgaaaattctgagttgtgtgatttgattgatcataaagaaaagtaaacaaaaagagaatcatataacaatacttgggtttcggcggagaagacttctgcacagatcaacacaatctggatgaatctcattcctagtatcttcaggaaatttcagctcagtgtctctcacaatattatgaaaaagctgcagagatcagacaccaaagaataataaaggtcacagtaagttcactaaaagttcacatacgaggcaattctatcgatttaggctaacaacgaacctgtatgtgattatttccatcaaaaggtggtttcccagtaacaagttgaaacaaaatcgcaccggcactccataagtcagcctgaaacatccatcaacaagaaactactaagaagtaaaaaaaacagaatgagcaaaacttttcttaaaatgaggaagtttcttcaccttagcatcatacttttgattccggataatttctggagccatatacaatggagaaccgcaaaatgtttccgccatgctctccggtgttagagacctaccaaaatccaaaatagcacaccaaatagattagtctatatatcaccaaactaaccataaaaagaaaacactttcatgaaaaataagatctaaatcttaccttgcaaacccaaaatctcctatctttagcaatggagttacttccttggaagataaaagtaaattctgaaaatattgaagaagaacagaacagtgattacaaatacaatcatcaaactacaacataagagagaatcactgggagttttacctgaggctttaaatctcggtgaataaaatgcttctcttgaagtacttgtaaccctaaagctacacaacacaagaaacaaaaaaaaaacagagattcaaagatcaacaaaaaaactccaaattacaaatatgaaaaacaccaaaaaagcagataaatttagttacccaattgcctcataaaatgtttagcaacagcttcaggtactttgccatggcgattgatatagccagcaagatcacctccactacaatactccaacacaagaaatatcctatctccagtctacacaattccaaatcaaaaccctcaatttcaatttcaattaccagtagaatcatccaaaattcactctttagtaaacataacgaaaagatcaaacctcgattgcttcgtagaatcggatgatattaggatgatcgattgtgctaaggatcgaaatctctttaagaagattatctcttactttagggctaagaagtttcttatcaatctctttgacggcaacttctaaaccagaagatcgatgcttcgctaaccacaccaccgcaaacgaaccagacccaattctcgggccaagtgcgtagtcacccacaagtcgtgccgactccatccggaattttttggttttgacccgttagactttcggatccttgcttgaatcaacctccattgtttctattaattactactactcaaactcacagagaaaaatcaaaactttttttgtttttttttacggattaaaggaacaacgaactgtttttgttaacgaaaggagacgatttgagttttatatatgttatacagtaaagctatcgacttttttttttttttaataaaggtttttttgtgtgtggagattgagatttggttatagcttatgagcaaagagtttcttacttgtagtagtccagaagaaaccttctgaaattgacgttttgaatccaatttccacaaggaaaatacgcaggaaatatctctctttattaccttttaaaattcctacttcaattaattttgttatatcaaaattttacaatcatcaaatttagcaaaacattagctatttttcatttatttctatgaactgttagtttaaagttcaactatagctcttaaagtcgaagataaacattttcccattaatgaagtctttaatataataatgttggaaaaataacaattgaatttatgtactttataataatacggtattaagatttttttttttttttaaggtagaaaatcacacccttaaaaaagatataaaaaaaaatacacgttagaatataatttttatagtcgatatctatgttttaccatgaccattgattgtttgaacttgaagctttgatatagtcgacctgtttcttacatataacgttgctttaatgtcaatttaaaaacgtagatgtaactaataataacaagatttattcatgattttgggtgacgtatccaaatattataatgttaaggatatatgctgtaaaattatttaaatgaaatagttatcgctactgaatatttctagatgatttttggtgcggtgataatctgaaaaagttgattaattaaactaatcgtttgttaatgccacatcacctttgacctggcacaaatcaatgtcaatgggaccagctctaattatcatgaaactaaacattatcacgtgaaagtgccacgtaactcaactacaagtaaagcccattagagcctgtttaggcccaattctgtaagaatagaacaatattaccccgccgaagaagagagccaccaaaaggaagaattagtcaaaaaggcccataatttataaaaactttcaggccacagatgggctttatattgacccattatttggcccaacaatctcaatttttgaaaagttgaatgtaagagaaactgaaactccgtatgtaagatctaaaatgaggcttaagagaaataataataagggtgagtgaataagccatagggtatataaaataagatttacaaaatcttggcattgttgttggtggaagaagggaaagcgactaaacctaaaaaacaaagatatatgagatttgtgaatggacaatggagactctttgatctttatctatcgtctttatttggttggaccacctaattcaccttcttcttcattacatctttcatatgtaacttaattaatttcaggtcaaaacttatagttatatccaaaaaatcacattatgatcaattgaaattatctagtagttaattgtatgtcaagcgagtagttatcataaactctccttttttttttttatcatacaaagacatattgacgcagaaagcttaaactaatttttttttttttatagaagttagaacttatcacatagacatccacattttattataattccaactgttgatatgccttatgttatatgcacatgtgcatatatacacattatacataatgtatacagtggaagtgtagtcaatgaatgaatgtgtttatatatctagaggttgggatcatgagcagctgacttttgcagctattgcagaggccataattcgtataatgaaggagtgtatatgtattgccaaattcgcagagtatattgataatatagaacagtcaatgtgaaggttcttacacgtgttataatgggaagaatattttttgatataaacataagaaaataacatgatattgaatttaatagttaagacatatccaatttttcatacaattgaatcttccctttctgcagctaacttgggcttgataatgattcctctgcatccccctccccatacgaaacttgccccaccttcatacattttgcatctatatttttctaatcccatctatatattttttcttatgtttattctaaggtgatcaattaataacaccctaccaccaaatgtacttttcaaaataaatcaatgcatatgtgatcattgtatgtgtgtgtgtgaacccttaaggttaagagatgaagtcaagtcaatgctaaaactatcaatttacatgtcttaaattgttatatgataaggctctttcatttccaagtagttgcacttgttcatcttaaaaagaattgttttttaaaaactaaatatcagtttgagtctgtctaactagattcttttcaatatatatataagattccgttataaaagatcaagacgacaacacattagtcgatttgttcttagagacgcaatattcttgatggccatcactgagatgcaataatcaaattaaactaaagccgagaaaagaaccagtatacaaagcaatcctgagaataatgtggacaacaaaaatcaatgctcgaaaacgtataaattaaagccttcgctatcagaataaaagcaattcggaattagataccaaaggtaagattttataatctacatgaaacttttcaagacccatattgcttttaaatgaattactttaagttatctaataaaatttaataaatagacgaaagggttggctagggatagagaaagggtcctagaccctggggggcaaatgacagttggaaaatgttgtcgccattatcgcaccatccatccttcaattttgtcattattattattattgaataaaatggtccgccttttttatttcaccactaccctatttgattgcgacttatcgtatccatccatatacaatcaaatatattgttatttcgcttttgctttcctctcccatgatatggtcgcggtatataacatttgatactagatttgattaacacggatgtacatgcatgtcgcttctgtccaaaatatatcatatattacatttaattacttagaacaaaacaaaatgagaaaccctaaatcatttgccttcaaaatatcgttgtgttgatcccccacatgcacacctcaatcggtcacaaataaatataataatcaatatcgtagagagaagaatataaatctatcttcggaaaatatcattctctattcctatgctcattaatttatttcttatcttcctccgatttaaggaagtaaaataagggagagactacctagtggtgaaaaaaatagatagggttagttagcaatggtgtaggtggacgaaggaaacatataaaaagagcaagtagacattaaaaagagttaagtgcaatgcaaaagctaattgggtttagtctatttataagtagtggtccttaccctaaactcttcttttaatatccctacctcacatatctcaacacatactcctacctccaccatattactctccatctcttttctttttatgttttcaattaaaccgcacgaattcagatatttctgagttgtacaataatgttttaagttagggatcacatagaatttttacaactaagtgaaatatatctccttctaaagtgtaacatcgtacgtattggaaaacaaatagttgaggaagaaggaagaaagcggattctcttaatcttagtttgcattatcgtcttctccattaatgatatgtgtatatatggcaaagtttttgcatctgaaggtgcaaattcaaattcaaaacaagaatgaaaaggaagatttgtagaataataatacaagtatatagctaggtcccgtggctacaagggtatatgctttgaaaagggcgacgctacgacgtccccttcctaatttcctccatttctataaaattaaacatttcatttcttctctttttcaccatttttcagaatttagaaataatttgtttcactcgtcattattactttgcagagaaacactaaaagaaatcccactggccagcccggatggagtaatatttggaccgattaattgttgtgaataataactttaaatttttggggcgttatcatgaaataaagaaaagaaagtgggtgagaacatatattacactaccatatattataagttaatacaaacagtaaatatagttgatatatgtttttaatctctgataaagaaccatcaaaccaaaaaaagaacaggtaatcgcctgaaagttttgtgaccactcaattatgtaatgtgagatgagagtttggaccacattgatcaatgttctttcatgagtttcacctactctttaattttttaaaattcaaaagaaaacatgaactttaacctttgtattaaatccagccttagttaattgagagttatttagttgattattctcccttaattaagccgaaattagccatagagacatgaatgatgctttgtctctttcaggaccactcaccacgtacgtaaataacgataagatttaacatgaatttacgtgaattcttttaaaacaagcttatagttttcattggaagggtcatgtgattgccacgtgtcttgttctagaactacatgtgtattttgtagtaatgtttacgacgtgatgtcggtctaaattatgagctgtacccaaaactaaatatgtatcgatttccgtttgattttgaaaattttataatccttctaacaaaaactatatatatatataaatcttcatccctataactctagatactttggtcggtccacgagaactcctctacaattttttttttttttttcacgtgatatgatattaaagatgaaagaatggtttatgtgaacgtataaatcattctttgagctttcagcttcgtaataataaatttaatatgataatgaaaacatgtttgttctttctgtatccgtgttttagatgtactcatgttatgtacaaataatcgtgaatgtttagcttcataaaataaagctaagaatgacgagattcgttataataagaaaactatgagtagttgaaaaaaaagcacaaacaaatcagcccaccatttcacaatcgcagatggtgatgaatcgctttcatctaattttataagttcgaggaagcagaggacaattctccgtaatacatagaccttatctattaggcacaacaataaagaaaaagaagaaaaaaacggaatctagctaggtccgtaaattgcaatcatggtttccaaaagagatgggtatgagtttaagtcgtcaggtcctaacgtttcttttctagtaaacttgttaggttcaaacttgagagccaaaatgtacgtagtatatgtggacaatataatgctttgattgggataacaaaaattaaagtggttgtgagtgtgattaatatatatatcatagaccaagattatgagttatcccagatatacaataacctaaaatattctacaacaattatttgtagatatgaattcgatctctaactttgatccatatatggcaaatcctctattcactctactacatctacactattggtgtttaaatgaattttcacttatttgtttgcaattaattaaaacaagagtgaatctttaatgtaaaataagagtgaaggcaaacaaataaaagtcaacagtaaagacgaaaactataaaacgacatgtcatcttgtccttgtaaaaggagattgaggcaacccatcccaaaaagccttaccacagagctcaataattagcatttattattaactgttcataaaaatccaatagtcttcttctctttactatttccgtataattgcaaacaaaaaaacaaatctctatagatattcctaagcccacgacattttcatacatttctcctcatatcccaaccatttagcctttatattctcatcaatacaatttttgaagggttggcaaaaaaataaaatcgcatataactactgttgtaatattccatcaaaaggtagagatggtatattaagttaatattttgtttcctttctatatatattttcactgattatgactatatatactttagtcatcaaaaatttctcttccatcttgagagtggttcgtatacaagtagattttattttgtaaatcaaaatatattagggaaaagaagaaaagggccaaataaatgtaaatgaatatgtccatatagagaaaaatgaaacgaggatggtagaaaaaggacaagaagctcacatgaacagaaccagattgttcatgggcccccctctcacctctctcttctttcctctcgacccatatctctatcaatcttatattacatgagctctctctctctctccttctccttctctcttctccttccttgttcttagagattgatcctaacttgtttttcctttcttggaattgaagagcttcttgttccataaacagtagagagagaaagcttcaaagagagaatcgtgctaatcagtgaagttaggcaaaaacccacttgccatttttgtataattaggtcaatctcatccaccaccatactcaattctcttccttctgaaattagggttttttttatctcctcctctctctttcttgtctaccaaaaaaggttttatcgaattactctcaaatcgtatggtgaggaagtcaaaatcttgagagatctgagattgtaagaagatgaatcaagaagataaagagaagcctattgaagaagcttcttcatcaatggagagagaacacatgttcgacaaagtagtaacaccaagcgacgttggcaaactaaaccgactcgtgatccctaagcaacacgcagagagatacttcccattagataactccacaacaaacgacagcaacaaaggtttgcttctaaacttcgaagatcgaagtggaaactcatggaggttccgttactcttactggaacagtagtcaaagctatgtcatgactaaaggttggagccgttttgtcaaagacaagaagcttgatgctggagacatcgtttcttttcagagagattcttgtaataaagacaagctttacatcgattggaggagacgacctaagattcccgatcatcatcatcagcaattcgccggagctatgttccctaggttttacacttttcctcatcctcagatgccgacaaattacgaaactcacaacctttatcatcgatttcatcaacgagatctaggaattggatactatgtgaggtcaatggagaggagtcatccaacggctgtgattgaatctgtgccggtgatgatgcaaaggagagcacaagtggcttcaatggcttcgagaggagagaagcggttaaggctgtttggtgtagatatggagtgcggaggaggaggagggagtgtgaatagtacggaggaagagtcgtcgtcttccggtggtagtataccacgtggcagagtttctatggttggtgctggttctctcctccagttgaggttagtgagcagtgatgatgagtctttagtagcaatggaagctgcaagtcttgaggatcatcacttctttacaaagaaaggaaaaccttctttgtcttttgatttggataggtgatgattatcatgagattaatcactatttaaaaatgcatatatatgataatttataccatatattatatatgacacaaagatgtctttcaagatttaatgatattatcaagaaataacatgttttaaagattccatgttggttggttttaacaaagtcttttgttttggttcctgattttgttcttccaaaaagctttttccttaatgagtctcttatttagctttggtttggtcggtgttatacagaacagaactttggatagctagggatcagtgtaaaacttaaaaacccatgtccctctagtcagaaactaatcagaagatatgggctgtcttataaaagtgaaatgtgtatgtaacatgtgattgcagcattgtgtataaaatgacattaaatggttatcaaacttttttactttgtttagtttatttgatatggctgctgtcctgttactgctgcatttttctgaagctgtttctgctgcttaattagtcaagcagattttgcagcttgcaggagatgggcagagacaaaaatggatacactttttatttttcatttatatatatatatatatatatatattatatctgaatttttttttattttttttaaaaaatataaagaagagctttttcatctatgtaagattgaaaaggtatgatctgtttttacagatattgctgatgcattgattgtttacagaagtaaatgaaatttatataaatttattttctgttaacaaactgatttctgtctggaccattttacaactcacacacatatatatatacaggcagggattgttaatgttaggtcttgttcggtgtgactatgcgtgtgatcaattactgtaattgcattctcttggtaacattcaagagttttagacgaagtaataactcaactagctactaatacatatatatgtgatgaaattatagattatatatactaattttgatatcatatagtgtatatgtgtgttttcatgatttgtggatatatctagtcacaaacgtccattagtctatatatttcgtcattatatctagggcttatagttggttccagatgagttaaaaagatatctttctaggtctagatttgttgagccttactgtttttggtagaatgtcacaataaaattaaacattcaaacttttcacgaatgatattacacaatacaagaaactatagccttttggaaaggttgaaataaattttaggttttttaacagtatttgtttatcatatataagttttttttagcaaactcaaaagtaagcctatgtaagatgagtattgggcagttacaatatttacagaaaagtattgtctaaaatgtacattataaactataaagaagacattgttttcaccataattattctttggttttagtttaggagtatttgatgtatatctagttatctacatgtgtgcatgtgtatatatacgatttgctatttttgtgaggaatcttaacttgaaaaagggatagaaatctatagatttataacatttatagttcgttaaactaagcaaaagcaggagcatgtcagctaaagtatttgcctatacataccatagctgtgaaaaaggccatcgaaatcagcgagggctatatacctatagattacattatgtaatcatataattgcctatatatgtgatgagcatatgagatattagacctgagctacgaataataatgatgatttatatgagctacgtatccctccaaaaaaataaaataagagaaaaattaaatcgatctaaaagttaatttaaaattcttatgttatactttcttctgttttatgaagtctgatgttttgaattttatttttgttccatgaagattaatgttgtaggttaatattattattatttttattaataattaatagaaagaagaaagaagtagaacatatattattaaattaatagaaaactaataaaaataatataaaaactattgtttttaatttgtgcgaaaaactcaaaacatcattgttttaggaacagagggaacacttaatttggtgagcaaacatgggcattgcaattttccttaaaatccaatcttttgtatccatgactaaaatcatttaaaatgaaaaactatttggaccaacgaatgttaaaaaatcatttcaaaaacggtaacatacttgttttagccatgaagtctcgaagactcttaactattcattagacgtttgaaatctcaaacttatgttgatcaggccactttgatcataccgtttctcaaaaataactcctatttagctattgtaatgaccgtcaaataaaaacggtgctgtttttaataaactcatagttctcaattaaaaagacaaaactatcagtatagtcccagaagcgatttctctttcgtcgacaatttctcccatatgttcttcgcccgccatcacttccactgttccacagggtcatggtcatcgtcgtcctttagcaccatgtctgagctgagcatcacttccacattttagttaaagatttatacttctaatcaaactgacacagattagatttaaacagtttgtgtgaatagattaggcattttgcagtaaaaaaaaaaaaaaaaaaagattaggcatttgcgtgaattgtgatgaatacaataggcatttgtgcgaagaattgaattgttattattaaatttttggttaatttggtgcattaaattaattaaatggtggcaataaggccataagagtttaagcccatttaacataaaacacccattacagaatataatttgaacccataagttaagaagcctacgattggtagtagtagcccattgttccaagcgttattaacgagaaccaaaattttcagttatatccaagatcaaggctttgttttaaagtttcataccactatgtctaaaccctggattaatttctcgtaacactacgtccacaaggttttgtgtactcatcgtaaccgatatggctagattcactttcattgcttgtttatcttcttctcttgcattgacttttatcattgattcgtaaccgacatggctcgattgaaccaaaagccgattatgacaaatgagtttccagactagagaatctattgaaacatttagacctaaagcagaaatagagctgaccaagtattcaaaacaactgtatctaaagcagaaagatcatatttggagacatatggttgtagttagagaaggaaaggattcaaatttgtatagaatattcttgtagttgacggatcatgtctaaaagttgaaacctttatatgctcaatctccatggataagttctcaaaccactactaccaaatgacagatccatcaagtatcttttacttgagaacaaaccaaacgaagaagagatccaaagactcgcccttttaacaaaaccaaaatgaatttgatagtgttgaagtaataagcattttgtccgatcaaatcttcattattagaatgaactgcaacagaatctattacatatatatagcacacaaagcaaaacaatactcaactatacacatacaacaaactcaggacgtgtgatctatctaattccttgtctaattccaccactaactctctagagatcagaaaccaccaacgagaagagagagtccgagcaagaagagccaaacaatatgaatcaataacaaagcttgtccaggaacagaagcacttcctgcattacctgtgtcacaagctccttttttgactacgcgagcgccatggcaagctgcgtcgggacaaccgcaccagtacgtgactccatcggttccacaaaccggatccgcccggaaacagttgattgtgcatccaccccgatccttaacccgagggcatacgtcaccgcgggatttatctgggaaatcatccgcagcttgtaaaccgatcaagcagagaactaagaaaaggaaacgaatgctcagtgttaacgacggcatcacgtgaattgttgatgacgagagacagatttctaaaacccagaaatctaatccttcagaagaaccctagagattcgtggcggatggagaggaggtttctaattttgcgttcaaagaatgattgaaaccctaatttcatgagatttggggattttctcagagagagtttgcgtaaccgtgttgtttgaattggtggtacagctggttcacgcaccgagtaaagcaaaccacagaaactacgcgcagttatttgtttaaaccatcaaacgtcatgtcgttcatacttaaacaactaaacgtcatgtcgtgtatttctacggcgtattgatgcatgttcagcaaacctgggtttttggtttatcaattttttttttattgggtcgtaagacgattttataaaaggcctcaaacggacatagaaaacagtacatatcaaagcccaataggcccacacattggtttatcaattattcaacttatttttgactgaaaagggaaaagttgatgagtctttagtgtttgtgagactggatatcttggcttcatcaatccttttatgtttaaagacttcttctatcttgaaacaggttcactgcgagctgagtggtttttacggatgattacctcttgcggcatatggtcataccatcgccgattgataccttatgagcaaaagaaaggcggaaaaaaatcaattatgagcttggaagagctttttgtgtttaggaagagggagtgatagaatccaaaaaactcaccatactaatgcttacacgttgatcatccattaattttttgttgaaatttcttaggctgatggtcctctcatcattcacctgttgaatttatcgatatgaaattatggtcattcgataagctttttagagcatgattgttcgtaagatacataccgtagaatccgcaacccatccatgccaaagaacattatcaatcacaatgactccaccaaccctgacctgcaacagtagatataacagctaaagctaaacttgacccttatggcaagaagactagcataactatgatcttggtcttacgagtcgaagtagcgattcgaagtactcctgatacatcgccttatcagcatcaagaaatgcaaaatcatagctgcaaataagtaaagcttgaaatgggtcgaatcatttcagcaattatatgaaagaggcttactgtgtatttacctggactcttcaccgttctgaatcatagacatcaaagattctgctgcaagaccatgtttcacagtgacctaagtagagtaaacaaatcaaagaatcaaccagttgtttgtaatgagatcaacaatattgagaaactattttacaagcatggctaagacttcagtctcaccttgtgagacactccggcaagctcgtagtacctcttagcaacttcaagagcgttagcatctttatcacaggcaacaagacgccctgattctggtagaaccaacgccacagccagtgatgaatatccctgtcaaaaacacgagctcgttatcattgtcaaacgaaatcgaagccgacatatataacaatactcaggaaactcaaaaggaaaaaaagattaaacaccgtgtaaactccaacttcaatacatcgtttagctccaagaatctctacaagcattgcaagcaattgcgcttgatcaggtgacacctacaaccaaaatcaaatgtaatttcccataaagttatcttgacagtgacaagaactagcatcataaaccagagctcatcaacaagctgaaaacagtaaaagaacctgaatttgactaatggcagtttcttctcgaagttgcttcaaaatctaaaagataaatcaagtcacaagtaagatcactgtaaatctgattaagtggaagacgaaaaaaagcaaagcagaggaagagttaaacacctcatgctcacgaacgttgttgaggacatagtcataaaggcgaggagtgagactgataaccattttgttaccgtacttctcgtcgtcagccataactaaaggactcgcctccgtcgggcagtttccgacgacagagtctgtcggccggttaagacgaatatcgggggttctaagatcagaaccaccggagcagacgtcccgaccggatttatgttggagatcatcggcagctagtgaaccgatcaagcagaaaaccaacaaaaggaaaagaaagctcgttgaaaacgtcgtcatcgcgtggaatcaatagagttgatgattagagtgggaatacaaattcttataagcaattattgataacatgtgagtggtgattggtgaggacttcggctctatgctcagagaatatgatttaaataataggcggtggcttttgaaaagttgcaacgtcttattctacacaaattttatcttaaaagtaattaaaaaaatactatagtagaaacaacaatgagaaattaagctgtgagctttgttaggactttgggacccttttcagaaattaagatgatcacaaaagcttaatcaaaactctatttccactaatcagaaagagttaaacaatttgacaaaagtacatgcgttagtggttaccatcccaagtagatgagtcttcgaagtgtttgtgagaatggattcagaacaaaagaaatgattccctatcctgaaacatgtatatcttggcttcatggagatcctttcatgtttaaaagacttctctcttggatcaggttcactgtgacccaattggtttttcctgatgactatctcttgcggcatatcgtcatgccatcgccgatcggtacctgacgcgccaaaaaatgtgataaactcaagcgagagtttggaagagcttgttgtgttgtggacttaggagaacaaagtgatagaatcgagaaaataaacttaccatactaatgcttacacgtttatcatccattaactttttgttgaaattcctaatgctgatggtcttcgcatcattcacctgttgaatttatcgatatgagattatggtctttcctctcattcgagaagctttaagagcatggctgtgtttgtgtaagttgcataccataggatccgaaactcgtccatgccaaagaacattatccatcacaatgactccaccaactctgacctgcgtcaacagagataaccgctaaagctaacttggccaactatggaaagagactagcattattcatcttacaagttgaagaagcaattcgaagtagtcctgatacatcctcttatcagcatcgacaaatgcaaaatcatagctgcatgtaataaaaagctgaaattttaggcaatcatttcaaatagagccactctgaacactaaaataaaagaagcgtagtgtatttacctggctccttcaccgttctgaatcatggatttcaatgattcagctgcaagaccttgtttcacattaacctgactagagtaaacaaatcaaagaatcatacagttgttcatgatgaatctcttagaattgaatcgacaagagagcaaaacaaaatgttataagggtttccaagaggccatatatatgttgaggaaccattatacaagtatagtatcagtctttaaaaataagattcaagcagtctcgaaacagcaaatgaaaaagtataaaacagaactctttcgtgcctaagaaaagcattgattttcgcaacaattgaatgtgatgtttttcggtctcaccttgtgagagactccagcaagctcgtagtacctcttagcaacttcaagagagttagaatctctttcacaggcaactaaacaccctgattctggtagaactaacgccacagccaatgaagaatatccctgtcaaaaacacaagctcatcattattgtcgaaagtgacgatattgagctaagataacaatgctcaagaaactcataggaagaagattaaacaccgtgtaaactccaacttcaatacatctttctgctgcaagcatctgtacaagcattgcaagcaactgcgcttgatcaggcgacacctacagccaaaatcaaatgtattgtgcattcttcattttcacctcaaattccaaacaattagcataacccagagctcatcaacaagatgaatccagtgaaactgttacctgcatttggctacctcgcattttggaagtctcttcccgaagttgcctcaaaatctaaaacaaaatcaagtaagacaccgaaccacaagtaaaatctctataaatcaaagtagaggaagagttacacaccttaggctcgcggacgttggagaggacatagtcgtaaaggcgaggagtgagactgataacttgtttgttaccgtacttatcgtcgtccgccacaacataaggatccgccggcgctatcgagcagtttccgattagccggcgactgaatttcaaactcctggcaacggagacagttggccggttaagtaaagtaacggccgttctacataccgaaactgaacagcgattcagagctaaaccggtcgacatcttctgcttccccactaaaactgaccgggaaaaggagacgataactcgaaaatctatcttcgtatgctccaaccaaccgggtcgggtcaaattgatgttgaaacgggtcaaaataatttgctaagttattgagtttagaataaattgcatataaacctcttggtattaaaatctctcacagatagagcgtgaactatattgattgataaaataacctttgtattttgggaaaaaaaaaccttctatttcttatccaatttcaattaatgattttgagacattaaaagtattgatcaattagattacaaatctcgaccaaatggtatgtttaatacaagagattacgatatcaaaattcatatggtttgtagaacatatgcagtcaagatacatattgttaagaaattcatattgtaagataacacatttaggataattttatatgatttcaacattttaatttctgtagtacgtttatgatttttaaaatagggaagttcaagatagattattattataaaaaaaatgaacatagggctttggaacatagtaactttaatcaactttagaacgtaacagcttaatactttgcacatacatatatgatgcttgcaaaatggtagacgaaacgcaagtcagttgatcatttgcagtccattggattgattgataattcatgaggactaaaaacgtattaaattttctaagtattaaatttttaaatttgttgtaaacttattgcatacaatataaataaatctataatttaacaagtttataatacaaagatttaagtaaactgaatactcgatcgctcatttgattacaggtttggtaatgatctaacgtgactagattgacattaaagctaaatttttaaaaaaacatttgttaatgactacacatataaaagaagaataaaaagaagacaactacaaaaagcttgtgaaccacatattgaagtccacgagaatcgcatttgaaaatgaaacatcaatcagtttgatgtgacttgacaggttacaattatttaaacatggtatatgtcatacacttaagttgttgacatgttccctttaatctgattaaatgatacgactacgaataataatgtttattcaacgacatttgggtagaaagcgattacatctagtttataactatttttaatctaaagtaattaatttttaattacattctcattattataattctttcaaacacacattggtataataataataattgtgtttttttttttatatagaaaaactctgcaaaataataataaaggaagttacaaacacacattggtttaataataattgtgtttttttcttgggttgtcatttgacaactatggttgttgttaactttttttttgataaacgatgaccaaagaataagaaaaccattttctaaccttcgaccgcgtttaatgcgtgtgtctttgtttatagtatttgtaaattgtaaaaatgtcatataaaaagtgggaacccatattaaaaaaatagaagaaccaagcgaagaatctgagcatgtttaattcacgacgcgttaaatgagtcgtttactcgtttaccaataatttttagtttctcatacggtgactaataagattaagactagattaaagaatatttgtgacctgtcatttttttagacatctatgtgacctgcaactttatatagtcaatatcaatggatttagcgtaggtgatcaactatatttgagcatgtatattaattacgaattatatgcattcactaaatctataaagtattacttacatgtcatgacatctgtatatatatatttactccattatcaatacgttttgaatggaccacgcgattgtctagcatttccttgacgtcaatggtcttgtattggttagtcgtcttccatctacgaagggacactaatcagtattacttgaactcttgaagtttgtttctgttgttttgcacaaaaaaaagaagtttgtttctgttgttagatagacattgaaagaaatgtatttttttttgtaatgataaattactatatatggatttgatttataaaatgttagtggtaattttgtttccacaaactcaagtcatggatagctatgtttttgtcacgttcgaatacttgtttcatttgtatgcatgtgaatatggtaaaatcaccaaatgtatggtggatgaatgcccttgtcgcatccaaaaagaatatcccatcgtttacatttatcttattttttcttttcataaactattttgtgatctttaaaatcacataaaatttatcgacaatggataaaagaggtgcacaagagaaaacatacgttggttaaataaaacagtaatatgatcatgagtgacaatacttaaaactgtattcgaatatacttatttcgtttcaaggtgtttaaaaaacatttaaatgcaaaatctttctcaattttatatggtcagaatcgtcagctgactagactaatataaaaaaaatgttcaaagttcgattagagataacaaggattcagaattctcaaattacatgatgttttatttctatcataaaagtaaaaatatcaagtgttttcttgaaactattgttacttgaactgtatagaaaaataaatatctttgaaaaattagaaatgagcagacaaaatctttaataactactaaaaaaaaaaatcaaaagaaaaagacatgcctttcacgtttatgtgcgatgcaagacccacaactcatttatctgaccaatcgaaaatttgtttcctctcttattattccttcttcagaggaggctaatttattattattaattaatgttttttaaaaagtttactttatttatattattttagttacaacgtaaaagttaactttattaccaagacaagtaaacaaatttcttatctcttatggttggcttatattgaagcttttaaacgtgttgaataaattgaatctaagaagatcaaactaacaaaaacattataagttgaaagatgaaatcacaatatagatatataaagtaattatgatcctaaaagatggtaaaagttttttccgacatcttgagattagtaaatattttggttagaatccccaatcacaataaaaaaaaaagtttatattagaacaccaaacaaaattatataaacctcaattttattttgatttctatctccgtaaaccaaaaaagccacacaaacccctctaaccttctagataactttctcgttatgctatttttttaaataacctatccaaaaaattgttgttcgtgtttattttattaattctgttttgtttttcaactatttaatccgatcttatgtgcataaatatccgtcggagttaatttagagttaaagaaatagattagcgtgtgagctcatctctcttaaatctctccgctctaaataagtttgttggaattatcctccgcgtttttgttaaatcgattcgttccgcgaccttatccattttcttcatctctttctctctaacttcgattttcctttttctcgcgcgagaaaatttctggattttgtctgcgaatcacgaatattccagcgtttcttcgtcccgcattggcgtaggatttttgtcgtgtttccgggattcgaagaacagtttaaagagtgaagaagagtcgagaggtgtttcggagtcttggaagaacaagcgagatcgtgttttttttgcatagaatctgcgaggtttcgaagtttctctgtggagtttttgttggatgagagatgtcgataccgaaggagccagagcaggtgatgaagatgagagatggatcggtacttggtaagaagacgattcttaagagtgaccattttccaggttgtcagaataagcgtatgactcctcagatcgaaggcgctcctaattaccgtcaggtctctctcccattctccgattttgattttactttgttttgtgaaatttgactttcaagtgagctgaatctgtcaatgacatgggaatcggatcacagaaacgaatcctatgtgtaggagtttaaattatatttcagctagaatctagtttttatgtactacactcgttctatctctagaacttgatctttgtgtattccaaaatgcagattcccttataaacctcgagtactaattatctattgaagctggttttgagatactcagcggcttaatgtgttctcattttgttatctgctctttttttgtggtctttgttacaggctgattcactacgtgtacatggggtggcaattccaactgctgtggggatacgaaacgttcttagacacattggagctcacaaggacggtaaacaagtaaaagttctttggattagtctcagggaggaaccggtattttcactttcttgaacttctctgccaatatgcaaatcctaggcatgtgccatttattggtgcttccatattctttcttgttaacttgccatttactacacatttgtcaggtagtatacataaacgggcgaccttttgttctacgtgatgtggagaaacctttcaccaatcttgagtacacggtacaaaagccttgttctaatatgttgttgattccacactgttgttgtacattagtttgttggctacatgcaaagtacagttactaacaaagtaaatcagaaacttgattatccgtggaacctttcatttgtgaccttaagcttatgttctgatcagggaatcaacagggtaagggtagagcaaatggaagcacgattaaaagaagatattctcatggaggcgtcgaggtaaccattaggtcctttaaatgatctaactttgtttgcatcatttttttttgcgttgggtgtatttgaccatttgccttgcagatatgggaataagatacttgtcaccgatgaactgccagatggtcagatggtggaccagtgggagccagtctcaactgattctttgaagacactacttgaggtaggcaatgaaacatcatatgtacaccctttaatgggatttccaggttcatatcattgtttttgcttatacattctctggatctaggtttacgaagaactgcaagctgaaggctaccttgtcgattatgaacgtgttcctataacggatgaaaagtcaccaaaagaaacagattttgatctgttggtaagtcctatgccattcctcgtagtcgacaaccttgaatgatcttatctcttgccatttggtatttgctgggagcataacattatattgtgattaatatgttcctgtcaataaaaattttcaatacactatgatttcagattaggaagatatctcaggctgacattaatacggagatcattttcaattgtcaaatgggacgtggacgcacgacgactggaatggtgattgcaaccctggtctatttcaaacgtactggggcatcaggtacttcatcatctccaaccgctcaacttgcgaagaagcatgtgagaagagagtataacaaatgctctttcagtgaattatatgttattcggaaaaaaaagctgaattggggataccttattattgaatcgtttacttttattccacttttggagtatcaaatctacaagtactttatttgtcatagagaaatgaaacactatcgactagcccaataatcatctctcaaccctctttctcaagcctgttcttatgtatatatctagggagccacatattctcgaaaaatatatcccatagacaattagtctagacagattggtgttcaagtcaggtcattatggtatctattaacctgtcattttttttcctttgctatttgatgttgaataaagatcaaggattcccaagaaacaactcttttgggagaatctttaaagctggtgaaaatattactgttaatctgccgaattcggaggaggcaatccgtagaggggaatatgcggtcgttagaagtttaattagagtcttagaggtatttagtctctttccgtttgtctttatctgattattttggtggtcctgctgcttctaattatttattggtttcatgattctagggtggtgtagaaggaaaaaggcaagttgataaagtcatcgacaaatgtgcatccatgcaggtatctgtgttaagtttttatcttatggggtttcacttagggtaaaatgtctaaggtttattcatgaattaacttacagaatctacgagaggcaattgcaacctatcgcagtagtattttgcgtcaacccgatgaaaagaagagagaggcagcactctcattttttgttgagtacttggaaagatattacttccttatatgctttgcagtatatcttcattcggagggtgcttttctccaatctggttcgcttggccatgtcagttttgctgattggatgcgagctaggccagagctctatagcattcttcgcaggtactgatatttttgcctgtaacctggtatgcttctgtttgcttgtaaatctggctgtatctcagttttccataggagcagttgaagaacaactttgagaggcttttcctatatttaagtagctcccggcagctgatctatttacactattgtagcatatgatcttcagatgtctcatgtatgttcattgtctcttctaggttgctcaggagagatcctatgggtgcccttggatatgcagctatgaagccttctttgataaagattgcagaatctaccgacgggcgccctcacgagatgagtgtcgttgctgcgcttagaagtggggcagttctgggaagtcaaactgttctaaagagtgatcacagtcctggctgtcaaattttaaatctaccagagagggtggaaggagctccgaattttagggaggttccaggatttcctgtgtatggtgttgcaaatccaactatagatggtattcgatctgtcattgaaagggttgggagttccagaggtggtcggccagttttttggcacaatatgagagaagaacctgttatatatatcaacgggaaaccatttgttctacgagaagttgaaaggccatataagaacatgctagaatatacggtaataatctatgttttaaaacatatttcaaatactatttagatgcaatacctttgagtgattaccctcagtttctcttcaactcttatggattggtctgaaagcttacataaatacctctatgtagggaattgatcgagatagagttgaagggatggaggctcgtctaaaagaggatattctgagagaagctaagcgatatgacggtgcgataatggtcattcatgaaaccaaagatggacagatttttgacttatgggaaaatgtagatgctgattctgttcaaacacccctcgaggtttacaaatgtttagaggctgatggttttcctattaagtatgcacgtgtacctataactgatggtaaagcccccaaaagctcagactttgacacattgacatctaatattgcttctgcttccaaagacactgcttttgtcttcaattgccaggtttagtttccttctttgtcccaatctgcttgtgtatttcgatatatttggtaatcctcttaagcttatctgttaaacttacagcatttcatttttcatatcgacatttacagatggggagaggtagaacaaccactggaactgtcattgcctgtctagtgaagctccgcattaattatgggagacctatcaaggttctttatgacgttctgacccatgaaattgtggatgaagattcctcaagtggtggtgaagaaactggaagtaataatgctgaagcaagacctcgtaattcaggacgaagaactgaggaggaacaaggtcgtgcatttggaatggatgacatccttttgctgtggaaaatcactaggttattcgataatggagttgaatcacgtgaggcgttagatgctgtgattgatagatgttctgcattgcaaaatattcgtgaagctgttctgcagtacaggaaggttttcaaccaacaacatgttgagccacgagtaaggagtgctgccttgaaacgtggcgctgaatacttggagagatacttccgcttgattgcctttgcagcctatctaggaagcaaagcttttgatggattctttgtggaaggagaatctaaggtgacgttcaagaattggttgcatcagaggcctgaggtgcaagcaatgaagtggagcataaggctaagacctgggcgattttttaccattcctgtgagtcaaatgtctcattatccaggcttgggaaactgtataatcttctttattttgcgtgttacaactttgaatatattcatgtaggaggaattgcgggcacaacatgaatcacaacacggagatgcagtcatggagtcaattgtcaacgaacgtagtggttctgtcttgagcaaaggttctatacttaaaatgtactttttccctggccaaagaacttcaagtcgtttgcaaattaacggtgcacctcacgtatacaaggtaggcttcaaggaaatgtgattcttgtgtggtttcctgataactggtaaccttaaaatgatcatacttaaccatgacataacgttcattgcaggtcgatagatatcctgtgtatagcatggcaactcccacaatttcaggcgctaaaaaaatgctcgcctatttaggcaccaaacttaaggaagaaggtgggggttcaacagaaagaatagtggtaacagacttgagagaagaagcggttgtttacatcaatggaactccatttgtgttgagagaattgagtaaacctgttgatacgcttaagcatgttggaataaccggtgcagtggtatgtttcaatcacagctaatattatgcaaattgcaaaagcagttttttatatttgtatcctcaatgcaggtagaaagcttagaaacacggttaaaagaagatatattggctgaagttcgagagactggaggccgaatgctattgcatcgtgaagaatacagcccggcatcaaatcaatctcgggttattggatattgggagaatattcaaccagaaaatgtgaagacacctgcagaagtatatgctgctctgaaagatgaaaattacaatatatcttaccggagaatacctttaaccagagaaaaagacgcattagcttccgatgtagacgcgatccagtactgtaaagacgagtaagtatcaatcatctgttttaatttttcacatgttacatatttaccgaatctcttccgtaattaacttgtggcgatgttttaatcacagttccgctgggagttacttgtttgtatcgcacaccggttttggaggagtttcttatgcaatggctataacttgtctcctacttcaacctggtcagaacttcacagctacaccaaccacaaattcttctaccttagaagaagatgattcgccttcaggggcttgtgatgaagaagcgttgagtatgggagactaccgcgacatactgagtctcataagagtgctttctcatggtcctcagagcaaatcagacgtagatggaatagtcgaactgtatgtaatcaatcaatctcttttgagaattttatcactttaaactacacatcgctcatgatttcatcttcttgttttggcattttataggtgtgctggtgcaggacatttgcgagaagacatcgtttactacagtaaagagctgaacaaacttcctattacaaaagatgaaaaccgttcatacatcatggacatgggtgttaaagccttaaggttagttacttacaacttcaatccggttaaaacgatccaaccaaaccatgagtttcgtttcttcccatatccaaacaaataatatgattgttttgtatgagcaggcgctacttttacctgataacattcagatcatacctctatagcacgtcgccggaagaaatgaaattcttggattggatgaagtcacggccggaacttggacatctctgtcataacctcaggatagataaataaaagtgtgattttgggtttcagtgtccatacatatatgtataaatctaggcaaagttatgttgtttggtttatacagagcttttagtgtataaaaaattgtacagccttctcttctccttcgtctgctttgtagagagatctctgtttataggtttgtacctttatatgcattgcttaaaaccctccagctgattcagcaggttattctaatgaacaaggtttattttttcctttattaaaatttaaaaaccaattaataaaatttaaaatatatatatataacgacgcgatttttagactttcttgggagcaaacttagatttgattttttcgatttctttcgttccgatttgaaacgtcgtcgttaaaacgtgatccggaatcgccggagtggctgtgaatagcgtggcggcgatcgattgtgttcccggtaattgactgttgaacgcagagatcaccgacgccggtttcgctttgtcgttgtttttctggtaatgaatcaatcctctagggaagacgaacacttctcctttcttcaccgtcttagcgaagagcttgttcgccgtcgttatgaatccaacgtcaagctcgccttccaaaacgaagatcacttcggtggcgcgtggatgcgtgtgcggcgggtttaaacctccgggagcgtagtcgatacgcgcgagtgagactccgagcgtgttaagccctgcgatcttctctacgtttgctcccgtgacggctgacccgactgtgttgttaacgacggcgggttttccgattccggcgaagaaaaaatctgaagcggtgatgtttgattcgggtttacatgtgaaaccattcacttttatccctacataatccaaaaacgacgacatttcattactttaacaaatcattcaaagtagacagtaaatttaatttgaagatatatgtgtacctgaagtgcgatccgcaacgcagagatcttgaagtgtgtcaggatcgtaagcaagaacaatcacatttagagataacaaagtaaagaagaagccaaaacatctcgagtccatggttttgacttttgatgatgtactgtagaagaacaagtaactagatttgaagctctaatttgaaactgtgtgatatgtttttgtttcgatttggatcgttataaatatttgaatctgtttgaggagaaattatgcatagcttaactaacttaaacgcaaagcaaagcttgggagttggaggaaagatgtgatgtcgttttcttacacatgtacatatttaatctaacttttaagttttggttttcgttagctagaattcttggtttaaccgaaatatattccagatcagagatctatagatcaataataaaaagtttcagtttcaaattcttggtaaggagttggaaagttaattaaaaacttgagtgacaagcattttcttatcatgatgggctgggcctggtagataaacaaataggcccacttgtggtaatcatcgatagggtaaattaaatcgaggtgttaggttaaagcagatccgtgccttgtttgggccatggtgcggcccaagtgatgtttttcctggattgacaaagaaagttactcaattaccctacagttacatggttgtgaatgtgccttggcaaggggtagagtcgaaattagcacacgacaaccagtgaaagcaaaccagtaaatttcactcatccacaaccacagataaatctaactaaaaccctctcagctaccaaacaatctcttagcggatgagaaatatcaaagtactcttggcactcaaggaacccacccccatcagcaatacaatttccttatgtaagctttgaatggctttggcgaaaactcttagctgatgttccgtttacttcttctcccttacgcagtcggtgctcaacagaagctgttacaaactccaagagagacgaaagttgctgatgcatggtacagcaaattatgtgtgtttaaataatgtccaaagactgtagtagctttgtgtatgaaaacatgaacaattttgttggttcttggagtttgtggttttgatctattgagtgtgaaataatagacaaaactaatcttgctggtcttatgatgttgttcataaaaacatgattttgttctaggaatattaaatgccaaaatctgtaagcagttaaattttcagagaatgatatcaaaattttggaaaattaaaaattgtgtgctttagaaagaaaaaaaaaggctttctacagcaaataataaaaaaaggctttctacggcaattgtacttgatagtcatccgcaaccacaggtttaaccctaacccaattttttgttgtaacttaagagagaaagcatttggataaatgacttgggctgggcctaaaagaaattaaaaataggcctctagctgtcattatcattaggcgtaagttagcatgagatgctaaggataccaccaatccatagagttgctaacttaaaaaacaaggctcgaggcggttctcttatctgcaaaactaaagactgttgtctaaagcgaaccaacaaaaagtcttcatctttaatcattcaatggcttcttcgtcttctatgcagatggttcacacttcccgctccattgcccaggttctaaacttaatcctacatttgcggttttttcaattttcgtcgaagatttatgctttgaattctatccttttttcttcttcactttaagtagtgtgtctctgtgagttaaaacgaaatttcaatcggatactattcctgttcttgtgggttttttttggtcttaaatctcttttgtttggttttctgtgtagattgggttcggtgttaagtcgcaattagtttctgcaaatcgaacaactcaatcagtttgctttggagctcgttcctctggaattgcattatcttcgagattgcactatgcatcacccattaagcaattttctggggtttatgcgaccaccaagcatcagagaaccgcttgtgttaaatccatggctgctgtaagttacttttttcataaatcattcatgttctgttgccttatggattcgtgttgatttttgaacttggtttgtaggaggaagaagaagtaatcgaacctcaagctaaagtgacaaacaaggtttactttgatgtggaaattggaggtgaagttgctggcagaattgtgatgggtctctttggagaagttgtgcctaaaaccgttgaaaacttccgtgccttgtgtactggtaagctccttatcaaaatgatgtttaaagtttggaactttatagacacaatcaaaaccattgtctaaaggaaattgatttcttcaggtgagaagaaatacgggtacaagggttcctctttccatcgtattattaaggatttcatgatccaaggaggtgatttcaccgagggaaatgtaagttctttccaacaagttacatttcagactgtttgtttgttattttgatatttctttctaaatcgtctttttcgatatggtctcacagggtactggaggtattagtatttacggtgccaagttcgaagatgaaaacttcacccgtaagtactcacaaacaaagaaaaactctggttttctgcaaatatggcattacttctttgaggtattaatggttttgttttccgcatttgcagtgaagcatactggacctggaatcttgagcatggcaaacgctggtcctaatactaatggaagccagtttttcatttgtaccgtcaaggtaaagattctcaattcttcacatcatctatagagttatcgatctttcatatgtttgccttcccattttgattaatatttatttcacaaatttgtttttttgtgcagacttcatggttagataacaagcatgtcgtgtttggacaagtaattgaaggtatgaagcttgttaggactcttgagtctcaagagactcgcgctttcgatgttcccaagaaaggttgtagaatctatgcctgcggagagctcccgttagatgcttgataatcactattgaccgatgcattgtctttgccatctttgttctgttttttgctattatgactattgaggaatccaaaccatcaaaaagccaaagattttcaaattctggtcttttatttattatatatttcggatacatgagttataagttcttttaatcgatgtgggattcttattagaatgtctctctaagcattgaccatggttgcaaccgcggcttgctgaacaattggctcgagcttctcatctttgttgtcttcccataaatcaggtattgcttcctttatgttatgaatgctgcttagtgcatagtcagcacctggaactagcactgattcccccacaaacacggtttttagccctgttgctttagcactagcgatgttacgaatactgtcatcgaagaatatctgaaaagaaaaagatatagacttttaagtttggtatctgaaactgtgaaagatcatagtgacttttctattaccgttttgcgtggatcaacaatgtctgcaatgcgaattgcagcttcaaatgcttcaacagagggtttacagaggatttgagtgtttgaatcagaagaagggtttagtgtttcgaagcaaatgattccttcaaagcagtcctcaagacccaatctgttgagagctcgtgttgcgtgagctttgtctgcgttagtaaagatctgttcgaagggaaaatgaaaaaacagaggatgagaaaaaaagattcagtggagaattcgagtacaaagcttgaagaaggaagaaacttacgattttacggtgaggcatagagaggagaaggttacggaggagtggatcaggttttagtttctcgtagggaagtcttccatggacatattcatggaattcatcgttgtcgaattcgtaacccataacctataagtacgcctctgttttggttatttcagtttcctcagtgaatgtttaagatcaagaattttgaaataagttaccttgagaccagccatggtggttccatattctttgtaaagatccaaacacaactttggaacttcactctcttcgattccgagttggttaagcatgaactctgcaaataacgaaaacaaagggatacaaaattcagttatatggccgttaatgattaagtaaagacaagcatcttgaaatgttaagtctcttttccttggatgttgtttcgacaagctaagttgattccgatgctcaaagggtataaagtatcgtccatatctgcaacaacagataagagttttaattcctttacaaaaaaaaaattgcacaagggaaataagattgaagatgattggtttatagtttatatgtgtattatttaccaaagaacaaacactcgtagttagctccaaatccatccattttacgaatccaacgaagaagaagctgctaacgagaattaatgaattatagacgggaagattaataatgaaaagagagagagagcttatgaacaatgtgaaggagttggttgtatttatatacacaattcaaaaaaggtagtggattttgttaggacacatagaatatttggttactagtctttatctaatatcgttttgaaacatatgatatcattctagttttttttttgcatgcattagggtttgtatcataaataccctttaacttccggtttttggatccataattttctattgcggctagaactagctaataataatatcacgtttaatgcataaatcatttgtcccaagaaatgaaactagttaggttggtgtgttgctctaaaattcacaaaaagcaccatgcatccacttgattgtacaaaataaattcagaaagcatgattgttgaaggtgacttgacgatcatgataattatccaccatgttgcatctatgctgatgcgggcaataagatgaggtgtttagcatctactatcatttatttttatcattcttttaatttctttgtcatttcccacactttccgtcgtgacctgccattttcattttctataaataatgctaaaacaaagggtgaaaataaaggtgaactctcaaatattctgaaatgtcaaaagtgtagacagaacgaaaaaaatttgtcaaggatcaaaagcagcagaataaagtttaatcgtgaagaacatattattttttattttttttgaaaatctgtctaaaactattttgattataaatcacaaacaagttgcatgtttaccaaataattaatataaattatgatttttgtccaccatcaagacacagatgaaactgaatcaaatctgcatataatatataaacggattcgaatgaatggttagctgatgcatagagcactctctttattataatagcaaaaaggtgtaaagcctaaacctaaaagttaggttaatgacatagattatgtgttcattttctggttccgtaaaaaagaattcatcatttacaaagtttaataatttgtataggcatgtttgatttggaatttttgttgttttctgagtggatttaaaattacaatgaaacaggcctgttaagtgttaactccacctaaaatggcccaaagtatatctcccattttagataaccggccaatttctctgtgttacagagtgacgacaatgatcgagatgggaatgctcgacaaagcctacgatatctcacggctggctgtcttggacgaatatcgagtcgatagagacatcgtattcatctgcaattccgatatataatctcgtttaattataaaatctaaaccctaattctcttttgtaaatccaaaccaccatttaaactcgtttaatcgtaaaacatttacagtttacatgtgtattattaccaaagaaccaaacactcagaaattgcatcagagaaataaggcccagtgtgtggtccaagtcataatttttgtttgtacgtataatgagcctgagaatgagaattgggctatgatgtggcccaagtcgtgcttttcctaacttgacaagagaagttacaaaagtacccacagctacttggttgtgttatgtgctttagtaggggtagaatcgaaattaggaaaccacctgagaccgagaagaaacacacaattgctttgctctctcgtccgcagccacagaggttgaaccctagatttactcaccaatctctcattctctcaatcaatccggtaaaacaatgtctgatattttccccggcgacttcgcaggtaaaatctctctctgtctcgttttcttccccatttggtaattcatttaagtttttttttttttttttccttttgatggcagcggctgagacaggcatcttctgggacatagaagattgcaagatccctgatgatctcaatgctggtgatgctttgaagaacattaaatcggccctttcgagtgatggtcatcatggtacggtctcagtaagggcttatggtgatacgaccggtcttgactttccttctgagggcattaagctcaatcacttccccgcaggtaatgtgtaatgtgtaatcttactgattttgtgtatcatgatgatcagatatattctctatatttttgtgtgtttgttttcaggagagagatacgcgagacagaccaagatgcttgaagacatcgtttcctggtcagctgaacatcctgaaccgtcaactttgttcctaatcgttggagacacctcacgagacttcctcgacgttgttcaacttttgaaatccaagaaaaattacaactttatcatatacaactttattttatatgtgtattaccaaaaaaccgaacactcgtacttggctccaattccatccattttactaatctaagctaagctaagcgaagaagaagatgttaatgagaattacagaaagatattacttaatgagagagagagcttatgatcaatgtgcaggaagttggctggctatattcctttattatatactcaattcaaaaaacaaaacaaaaaaaaatgcggatgatatttggttattgtttatgccaattatcataatttttgtttgttcgattaaagttgcatatacaatatgaagtataatcataaagagaattcataaacaagtgctcacatttcaattgttttgtgaacttcattttcagacaaaaaaagataaatggatgaaaaataataaccaaaaaataggatcatttttttatttgaattagttatttcaaatttccaaagaattc

SEQ ID NO: 1378 - DNA, 85217 bp, Arabidopsis thaliana
aagcttgggagttggaggaaagatgtgatgtcgttttcttacacatgtacatatttaatctaacttttaagttttggttttcgttagctagaattcttggtttaaccgaaatatattccagatcagagatctatagatcaataataaaaagtttcagtttcaaattcttggtaaggagttggaaagttaattaaaaacttgagtgacaagcattttcttatcatgatgggctgggcctggtagataaacaaataggcccacttgtggtaatcatcgatagggtaaattaaatcgaggtgttaggttaaagcagatccgtgccttgtttgggccatggtgcggcccaagtgatgtttttcctggattgacaaagaaagttactcaattaccctacagttacatggttgtgaatgtgccttggcaaggggtagagtcgaaattagcacacgacaaccagtgaaagcaaaccagtaaatttcactcatccacaaccacagataaatctaactaaaaccctctcagctaccaaacaatctcttagcggatgagaaatatcaaagtactcttggcactcaaggaacccacccccatcagcaatacaatttccttatgtaagctttgaatggctttggcgaaaactcttagctgatgttccgtttacttcttctcccttacgcagtcggtgctcaacagaagctgttacaaactccaagagagacgaaagttgctgatgcatggtacagcaaattatgtgtgtttaaataatgtccaaagactgtagtagctttgtgtatgaaaacatgaacaattttgttggttcttggagtttgtggttttgatctattgagtgtgaaataatagacaaaactaatcttgctggtcttatgatgttgttcataaaaacatgattttgttctaggaatattaaatgccaaaatctgtaagcagttaaattttcagagaatgatatcaaaattttggaaaattaaaaattgtgtgctttagaaagaaaaaaaaaggctttctacagcaaataataaaaaaaggctttctacggcaattgtacttgatagtcatccgcaaccacaggtttaaccctaacccaattttttgttgtaacttaagagagaaagcatttggataaatgacttgggctgggcctaaaagaaattaaaaataggcctctagctgtcattatcattaggcgtaagttagcatgagatgctaaggataccaccaatccatagagttgctaacttaaaaaacaaggctcgaggcggttctcttatctgcaaaactaaagactgttgtctaaagcgaaccaacaaaaagtcttcatctttaatcattcaatggcttcttcgtcttctatgcagatggttcacacttcccgctccattgcccaggttctaaacttaatcctacatttgcggttttttcaattttcgtcgaagatttatgctttgaattctatccttttttcttcttcactttaagtagtgtgtctctgtgagttaaaacgaaatttcaatcggatactattcctgttcttgtgggttttttttggtcttaaatctcttttgtttggttttctgtgtagattgggttcggtgttaagtcgcaattagtttctgcaaatcgaacaactcaatcagtttgctttggagctcgttcctctggaattgcattatcttcgagattgcactatgcatcacccattaagcaattttctggggtttatgcgaccaccaagcatcagagaaccgcttgtgttaaatccatggctgctgtaagttacttttttcataaatcattcatgttctgttgccttatggattcgtgttgatttttgaacttggtttgtaggaggaagaagaagtaatcgaacctcaagctaaagtgacaaacaaggtttactttgatgtggaaattggaggtgaagttgctggcagaattgtgatgggtctctttggagaagttgtgcctaaaaccgttgaaaacttccgtgccttgtgtactggtaagctccttatcaaaatgatgtttaaagtttggaactttatagacacaatcaaaaccattgtctaaaggaaattgatttcttcaggtgagaagaaatacgggtacaagggttcctctttccatcgtattattaaggatttcatgatccaaggaggtgatttcaccgagggaaatgtaagttctttccaacaagttacatttcagactgtttgtttgttattttgatatttctttctaaatcgtctttttcgatatggtctcacagggtactggaggtattagtatttacggtgccaagttcgaagatgaaaacttcacccgtaagtactcacaaacaaagaaaaactctggttttctgcaaatatggcattacttctttgaggtattaatggttttgttttccgcatttgcagtgaagcatactggacctggaatcttgagcatggcaaacgctggtcctaatactaatggaagccagtttttcatttgtaccgtcaaggtaaagattctcaattcttcacatcatctatagagttatcgatctttcatatgtttgccttcccattttgattaatatttatttcacaaatttgtttttttgtgcagacttcatggttagataacaagcatgtcgtgtttggacaagtaattgaaggtatgaagcttgttaggactcttgagtctcaagagactcgcgctttcgatgttcccaagaaaggttgtagaatctatgcctgcggagagctcccgttagatgcttgataatcactattgaccgatgcattgtctttgccatctttgttctgttttttgctattatgactattgaggaatccaaaccatcaaaaagccaaagattttcaaattctggtcttttatttattatatatttcggatacatgagttataagttcttttaatcgatgtgggattcttattagaatgtctctctaagcattgaccatggttgcaaccgcggcttgctgaacaattggctcgagcttctcatctttgttgtcttcccataaatcaggtattgcttcctttatgttatgaatgctgcttagtgcatagtcagcacctggaactagcactgattcccccacaaacacggtttttagccctgttgctttagcactagcgatgttacgaatactgtcatcgaagaatatctgaaaagaaaaagatatagacttttaagtttggtatctgaaactgtgaaagatcatagtgacttttctattaccgttttgcgtggatcaacaatgtctgcaatgcgaattgcagcttcaaatgcttcaacagagggtttacagaggatttgagtgtttgaatcagaagaagggtttagtgtttcgaagcaaatgattccttcaaagcagtcctcaagacccaatctgttgagagctcgtgttgcgtgagctttgtctgcgttagtaaagatctgttcgaagggaaaatgaaaaaacagaggatgagaaaaaaagattcagtggagaattcgagtacaaagcttgaagaaggaagaaacttacgattttacggtgaggcatagagaggagaaggttacggaggagtggatcaggttttagtttctcgtagggaagtcttccatggacatattcatggaattcatcgttgtcgaattcgtaacccataacctataagtacgcctctgttttggttatttcagtttcctcagtgaatgtttaagatcaagaattttgaaataagttaccttgagaccagccatggtggttccatattctttgtaaagatccaaacacaactttggaacttcactctcttcgattccgagttggttaagcatgaactctgcaaataacgaaaacaaagggatacaaaattcagttatatggccgttaatgattaagtaaagacaagcatcttgaaatgttaagtctcttttccttggatgttgtttcgacaagctaagttgattccgatgctcaaagggtataaagtatcgtccatatctgcaacaacagataagagttttaattcctttacaaaaaaaaaattgcacaagggaaataagattgaagatgattggtttatagtttatatgtgtattatttaccaaagaacaaacactcgtagttagctccaaatccatccattttacgaatccaacgaagaagaagctgctaacgagaattaatgaattatagacgggaagattaataatgaaaagagagagagagcttatgaacaatgtgaaggagttggttgtatttatatacacaattcaaaaaaggtagtggattttgttaggacacatagaatatttggttactagtctttatctaatatcgttttgaaacatatgatatcattctagttttttttttgcatgcattagggtttgtatcataaataccctttaacttccggtttttggatccataattttctattgcggctagaactagctaataataatatcacgtttaatgcataaatcatttgtcccaagaaatgaaactagttaggttggtgtgttgctctaaaattcacaaaaagcaccatgcatccacttgattgtacaaaataaattcagaaagcatgattgttgaaggtgacttgacgatcatgataattatccaccatgttgcatctatgctgatgcgggcaataagatgaggtgtttagcatctactatcatttatttttatcattcttttaatttctttgtcatttcccacactttccgtcgtgacctgccattttcattttctataaataatgctaaaacaaagggtgaaaataaaggtgaactctcaaatattctgaaatgtcaaaagtgtagacagaacgaaaaaaatttgtcaaggatcaaaagcagcagaataaagtttaatcgtgaagaacatattattttttattttttttgaaaatctgtctaaaactattttgattataaatcacaaacaagttgcatgtttaccaaataattaatataaattatgatttttgtccaccatcaagacacagatgaaactgaatcaaatctgcatataatatataaacggattcgaatgaatggttagctgatgcatagagcactctctttattataatagcaaaaaggtgtaaagcctaaacctaaaagttaggttaatgacatagattatgtgttcattttctggttccgtaaaaaagaattcatcatttacaaagtttaataatttgtataggcatgtttgatttggaatttttgttgttttctgagtggatttaaaattacaatgaaacaggcctgttaagtgttaactccacctaaaatggcccaaagtatatctcccattttagataaccggccaatttctctgtgttacagagtgacgacaatgatcgagatgggaatgctcgacaaagcctacgatatctcacggctggctgtcttggacgaatatcgagtcgatagagacatcgtattcatctgcaattccgatatataatctcgtttaattataaaatctaaaccctaattctcttttgtaaatccaaaccaccatttaaactcgtttaatcgtaaaacatttacagtttacatgtgtattattaccaaagaaccaaacactcagaaattgcatcagagaaataaggcccagtgtgtggtccaagtcataatttttgtttgtacgtataatgagcctgagaatgagaattgggctatgatgtggcccaagtcgtgcttttcctaacttgacaagagaagttacaaaagtacccacagctacttggttgtgttatgtgctttagtaggggtagaatcgaaattaggaaaccacctgagaccgagaagaaacacacaattgctttgctctctcgtccgcagccacagaggttgaaccctagatttactcaccaatctctcattctctcaatcaatccggtaaaacaatgtctgatattttccccggcgacttcgcaggtaaaatctctctctgtctcgttttcttccccatttggtaattcatttaagtttttttttttttttttccttttgatggcagcggctgagacaggcatcttctgggacatagaagattgcaagatccctgatgatctcaatgctggtgatgctttgaagaacattaaatcggccctttcgagtgatggtcatcatggtacggtctcagtaagggcttatggtgatacgaccggtcttgactttccttctgagggcattaagctcaatcacttccccgcaggtaatgtgtaatgtgtaatcttactgattttgtgtatcatgatgatcagatatattctctatatttttgtgtgtttgttttcaggagagagatacgcgagacagaccaagatgcttgaagacatcgtttcctggtcagctgaacatcctgaaccgtcaactttgttcctaatcgttggagacacctcacgagacttcctcgacgttgttcaacttttgaaatccaagaaaaattacaactttatcatatacaactttattttatatgtgtattaccaaaaaaccgaacactcgtacttggctccaattccatccattttactaatctaagctaagctaagcgaagaagaagatgttaatgagaattacagaaagatattacttaatgagagagagagcttatgatcaatgtgcaggaagttggctggctatattcctttattatatactcaattcaaaaaacaaaacaaaaaaaaatgcggatgatatttggttattgtttatgccaattatcataatttttgtttgttcgattaaagttgcatatacaatatgaagtataatcataaagagaattcataaacaagtgctcacatttcaattgttttgtgaacttcattttcagacaaaaaaagataaatggatgaaaaataataaccaaaaaataggatcatttttttatttgaattagttatttcaaatttccaaagaattcaaaaagaactaaaagtaggtccagagtggggaccactgttaaagagacttccacgtcagaccgacagatgggcacgaataaaatctagcatacgtaattatttatgccttgagaatgatagaaatctctgctaaattgaggaggaacattcaatccataaacactgcacttgacttgacattatgttaaagagaaataaggattatatagtgtaccttctaatagataccaatgaaatgaagcacaaacatatgcccaatcagtaaataaaattataagaattgtatttttctaaataattccaaatcaaaatatggggaaaagaattttcagatattacacattttacaaattagcaaaaacagacaactgtatcatgtcattccatataataaccaaaagtatatgatgatttcgtttaagcctttaactctttaagataagatattttatcatcaaatctgacaatattaaatgcaaaatctgtaagcaaatttttcaaaaaaattggtacatgaatgtgtgtttcccaaatgaatgaatccatcgcaattaatataggaaacaaatacagaatagattttcagtaatatttataagttagtattagaaatcattctgctttactctttttctttttcaaaatcatttttattttcgacttcatgcaagtgataaaagactaaagtgtaagactaataagactatcgtcatcgatccttaatccaaattttcgcgctcgattcgtcttttctgtatctcccggagctccgggacttgggcggaagaggagatgaggagcttgttgttgtggattgcggtggtcgtgtgcttgctatgttcagtcgcggcggtggttcaaagcggatctagcgacggatttgggaaacccagagatactgagactgcgatatcttttctggagtataaattgatggcgccttcggttccaatgatacctctcaccttgattcacggagctgactctaaaggagctggtacacacactctctgtctctctctctccttctctttcgttcttcttctttgggatttgaggatatgcttgaaaggagatgttttcactatcacattgacctttgttatccactattcagtttagattttggctctcttagttggaatccgaaattttatggcgtttgattttgttctgttgctcgatttcgtagacttctttgaatctttggtggattactttttgaatgttgtgatgatgattagtgtttattcaactctaaattggtgcagtgtgcttagatgggacgctacctggttatcatctagatcgtggttttggatcaggtgctaacagttggcttatccagcttgaggtatgtgcattttacagcttatgtagtagtcttggacttttgctagtttaagtatataatggaagtttctgctgctactgaggactgacttagaagttagaagctagatattctttttttaactcaatgagtggtttagggtggaggatggtgtaacaaccataggagctgtgtgtatcgcaaaacaagtcgacgtggttcctctaaattcatggaaaaagctttggccttcactggaattttgagcaatagatctgaagagaatcctggtttgtcgctatgagtttttttaatgcagaaactgtgtagaaaatgcatgttcttgtatcgattcttttttctctttgtggattgcagacttctttaattggaacaggatcaagttgcgttactgcgatggtgcgtctttctctggtgatagtcaggacgaggtttgtcaaactcaagagtatattgttctatgaaacctaggattttaataaattcttcttagtgtaccctgaatatgtattataatttgttacaatggcttttatgtagagttcgcaacttttctatcgaggacaacgaatctggcaagtggctatggaagaattcctgtctttaggcatgaagcaagcaaaccaggtctttgcatttcattgagtctatcaggttattggattttgtgctcttgttcatgttccggttatcgtcttatctaaccatttgcaaataaatattcatcacaggctctgctctctggatgttcagctggaggattagcttctattttgcactgtgatgagttcagggaactattacctagttccacgaaagtaaaatgcttaagtgatgctggaatgtttctggactcgtaaatctcttgaacttggcttttctgtttgaaatagtatttttttccttacaaaagtatccaaacctgaaatgttctaatgaaaattgcagagtggatgtctctgggggccactcgcttaggaatatgttccaaggtgttgttacagtgcaggtaatctctcatattcaaaatttgatgaaatgagcatgactaaaagtgcagacaacgtaactttatcttaaacttactctaactcttaatactcttctctgttaatttatagaacctccaaaaggacttgtccagtacttgtacaaaccatttggatcctacttcggtatatctctttcactttattagtatcattgtttcagtagcaaagttttccaggtagacaaggtttgagagaatcttttgacattgtcctttgtgtcctttctcttttcctcagtgcttttttccccagaacttggtttcagacattaaaaccccaatgtttcttctcaacacagcatatgactcttggcaggtaataattatgtcattcatgattcatctagctcattaattacttcgtccttccacagtgtttgattcttgagaatacatatgtatgaactttttctgttagatccaagagagcttagctcctcctactgctgatccaggcggtatctggaaggcatgcaaatcagatcactcgcgatgtaattcatcacagatccaattcttccaaggtgaactttttaattcacgcttgttagctatcatcactctctccactttatgttgagtctgcacaatgttgatggtttccatgtcattttttctttgcttacaccaaatagaattcaggaatcaaatgctgtttgctgtaaactcattctcaaactctgaccagaacggtctttatataaactcttgcttcgcgcattgtcagactgaaagacaggacacttggtttgctcaagattctcctcaactaaacggaaaggtaacattactcgtccaaaactgttcatgcggtttctatctcattaaacattaatatagcaatcacaagtttgttaaaactctctgtccataattgtctattatcagagagtcgcagagtctgtaggtgactggtacttcgaccgagcaaaaaatgtcaaagctatcgattgtccttacccttgtgacacaacatgtcacaatctgattttcgagtgagtaaatcgttgaaccccatttctctgattctttcaaacttataagttataccattattgccttaaattccttccatatttatcctaacttccaaatgtgcaacatttgtgtatctcaaatgagaatcatttagtttgtcgattcagatcataatttatatttgcatgaccttgatttttcgattgaaataagctttctttcgatgtttatttttatcgatttttttcatatatattctttgtgcagttttgatcaatcagctatagagatctcagcttcttcaaggttttgttttcctgtcattagagcctctctggtctccctaatgttgataaaattcatcctccaattcttagtttagtaggtatagtgaaaaagccttattctttcatacctcatttttaaataaccatttgattcaaatgtcgaatctagttagtgacaaaatccatgtcattacatagaatagtatatcaaaaagagaacaaaaaaaggaaaaagaacatattcctttattcattggactctaacacaaaacgtccgaatatcaaaaaccgatcatgaactcttcttttgagatgtccctttttttgaaattccaattgttaatcgctttaattttcacctttttctaccaaattgaagcgcacgcgtggtaacatagtgtaggttcgatttagtgcataaagtgttagctataaggaaaaaaattatacttcgattaacaagttcgatagaatttcgcaaaaaaattaatccctctaagaacggctctcactactgactgaaacaatctcatcatccatgaaaacaactactgtttatcgtatttacaaacgcaagaaaaggaactaaatccaactctaaaaactcgtccccataaagcataacttaaaaaaaacatcaaaaacgctaagtctataacttcaacaaaaagaagaaggaaaaaactaaaacagagaagtagatatatgactaagaagcttgacgtgtcgcagaagctaaagctaccgcttgtgcccacactttcaacctcgccttgacctcctttggatcatcacctaatttaataacataaatttattcagagacaaattcaaacataaataaaacataagtaaacatatttgactattactttacttaccaggactggagatacgccaggtggcgatgggtgagtcgccgccgctactagtctgagtatcgaaattcgacccggttgttgacacagatatccgacccggaaccggaacctctaattcgaacccgagatctctacaagctttcacttcttgtaaccccatcctcaacgacctatctccacctcttgctctcgtcaacaccgttaagccttctcttccaccgacgtcacactctccgttaactccctttttcttcttttccctcctttgcctccgtaaactacacttactgccatttttgttactctcattcgcatctaactcgccggaaactgtaagttttcttctccggcgagatggagtcaccggaagagagtaaaacccacgtgtctctttgtcggaatctgactctcgaacgttctcttttccttctccatcatcggaaacttccccatccgcctctgctccgtcgaaattctccagagatgtggaaacacacgaatctggttgattcttcgtggctgcttcgtcgtaagcagagctcgtacatatagacaatctcgacaaagaagaaaccattactaagctctcttcgaacgccatgaaagagaagaagaagtaggaaagtgaagagactgacgtttggagtctccactatatcgttataatggtgaaacttaactgagtcaactcgtgctttaactccctttgatcactttcatttatacccgagtctcgggttttgtgctatttacgtttttagccctctttttgtttgaaaacagcaatttttatttctactttaatccttttttgggggtaaatatctaactcactttgtttgattctatcattactaaaatagcttcggattactactaatcactgcatttatttgaaaaaccttggtcgatttttttactattttcaatagaaacgttacttttttcccctgggtcctactttaacgcggagatagaacgactctggttttttttattacaaaaaaaatccaccggaaagtagatttaattctcattaaattcaatgttaaaacaaggtattcacgtagttagtgacctttttttcgccattgtcttaatacgagattgattattcctacaatttccaaatttgttgtcgctctcaagcattaaaaagtgacacatgttcacccttataacttgtttataaacgccatagcccataatccaatatgggaagctttaactaatcgaccgtttattacatcactaatcgctaacatattaaaccatattttatccattaacgcggaatcggctaagagttgagactgataaaccaattcaggaacttaaaagtattagcccacttaataaatgccacctataatcttgcttcaacgaccaaaaatggagctggtttgctataaataatcagtttatcctttgaaaatgtaactatgtaagtttggcattgattctggatatacaatgctaaacgcattctataacttatagtatagatagaccataaagctggactgaaacagatatggatatcaacatctaatatgcaaaatcacgtgatatgctataaatatcccagaccaggatgagttaaagccgttataacgtctctattttgtgtagataaacatctatatgtgtatggaattggcttgcctcaggtgtattgtgtggtgtttatatataaaacatatcattatcgtaattaatattacgcatttactataatcatggacggtccttcttgtctcctttgtgtcttttacacttttcttatctagtttctcactttttaaaaattaattttagcttttcatcacccaacaaacaaaaaacaattactattttactacttgactttcccattttcaattgtttttttctttctaattcatgaaaaaactatcaacgtgtaacttgcattgggtcatcttatggccggtcccgtgggacgttttacttatccttaagaactaagtttttaaaaataaatttggtcgctttctagtttaattgaatagtaagtacactgattttgtaaaataaaacattattataagaggttgtttaggtacattatttgatggtggatttgttgttaaaaccaccggagcgacgttgaccctgggatcttttgagttttgaccagtctcgttttgagagtcaaagcctagtacactctaattaatgggccgggcctaattttgaaagtcaaagcctagtactctctagttaatgggcctggccgaattcttaaaaacgtcatacagtgctaaatttcataggacaaacggcagagcatgtcgaatcgagaacatctccgagacttggcttatctctccgacgatcttcgtataaaacttagtccggcgggaaatcgactttcaaattcgcaggattctgtcgatattcttgtatagttgcgagtctacaagattcttcttcaccatctctgttaatttttccctaattctttcatctgagtgaaggaaatggatcctgaagctgtgaaggagtttatacgaagggaagttccagattgggacgatgaggtggtggcgatggctagattcaaggcgtttagtggtcagaggtccgattgggaacttaaatttcagttttggcgtgatttgatcatcaaggtttcgcgtcagtttgggttgttcatcattgatcctgtccaggtctggtcaattgcttttggttctagatgaaattagtaactagtaggaagaactgattatgtaacgttgatttgttcacttgtttctaaaaggtgaagaaggcgtggtttgatcgaggaggaatgacgcctttatgcattgatgatgttgtggtgagtttctgctgcatttagtggccaaagaggatttatcttctttaagatcgattatataagtggctcgtgtttccagttattgatgcatagtgaaggtgatgttgtgcggattagtgatctcgatgatcccggtagtggtcgtattgctcgtttattgaggacagtgaagaacttaatggttcaacagccagtgaagcaggaagagattctggaaaatacacttgttcttgttccactcttgaaggtgcttctgtttgttctcacttttaaccatctatatctaggagaagaattctcagtttattatataagtatgtggctgattgaaataagtctatgtgatgtctaggagaaggcggctgacgtggtgaagatattatctgagggacactggacttctacttgtgttgtcacgctgaagaagtttcggaatttgtgcaacggttcgaatgaggcttcagctgttttgagtcacttgtcagggtgtggaaaagcgcataaaatctctatcaatcggggagaactgattgaggtttggttatttatccatctttttttggtcttgtctcagctctctgatggagagatttgttagtctgttagtatatctggtcaataaatgcatgtaaaaatatcttgcttgaattttgataagcactcaaaattccagtgaaaaataaaaagaaagaggccaatttgacaaatttagaaagttagactcagttcaggccatgacctatgcatagtgtccgaatcctacatactttgctttacagggtgttaaggtgtccttttcacaaacagcacttcccggtatctcaactttagactgtgatattctgcacttgctaaggactacagaaaagctccaagatcaacttgaagtgatggaccaacgttgtgaaaagtaacaccttctgattcttgatctgtatccaaatggttcaattttctcgtacatggatcatagccttgaaaaatataacttggcttatcttttttgtaaatggttaaatagattgacttcaagtgtttttaaacgttcttttcccttttgtaggtcaaagaaatcagcgctggcatctctaaagtctggacacaggaaagttgctctaaggcatgcaagggaattgaaggtggtgactgagagcagagaaaaatgcacgtcacttctgaacagagtagaagaagtgttgaacactatagcggattccgaatctacgaaaatggtacttcaaacactgagaaaccccataggtcgaacgaccatgtttgggtctatgtaatagtatcaattatggattttagaagtatctatgtgtgtttggcaggtctcagaagcaattaaaactggagctagggttatgaaggacatcaagatcagtgcagatgatgttcatgactatctagaagaacttgaggaaactattgaatcacagaagcaagtcgaaaaagctctcggtaagtggtgttttgtcgtttaaacatacatacacgattacttcatcaacttttgtgtttagctagattttttctgttaatgcggcagaatcagctccatatccagatattgatgatgaagatatcgaagaagaattactggaactagagatggaccttgaaagtgaaagttctcaggtcctaccagcgacttcagatactgcagattcactgactgagatgttctcagagcttaaacttggcaagacgaaacaaacattggaagagcaagctactgagccagctcagatgaaagatagcggaaaaaagattcttgaagcagcatagctgaacaatgcatcttcattgcggtgcgatctcttctcttcctgttgttcttagtgaagaaatacactcagtatcatataaatagaatagaaccgggtaaagtgagttgagtatttgtatgctatgcctcttgtttggattctagaaacaatagcttcactccattgtataaagtcagcagcttgtttcataaacagagaggaacgtcgagttatgatttttatcactccgatagtgttcgataatttattaatgtttctaacatgcagtcttattcattcgaaggaaactagtactcgtgattattattgttattattatagctcctttcctatatctatatgttacatgaactagaaaagccggcactaaaaaagagaaccttgaggagatccttccatggtagttgttctgatgtcgttgtagtgcttttgtggatctgtatggttcaccttgagatggctctagtgttctcacgactaactcatgaagaagaagaccgtgaatccgcaggtaacaatcatcactgtttacttcatctgctcacgggtttccagatttttaccagggagaattccttcatctgttagttttccttgatttcttgtgtaaggttgcaccatctaaatttgacaaagagttgggatttggtatttggttagggaaagcagcgcacgatggagggacagattgtggggaacaattttccgttggaatgaaaggtgcagagttttgcattggcattagtccaggatggttaagaaaccttagcatatctgctgaatcattaatcccaggcaagccagctcctagaacatgtgcaggcagaaactgttgttcgcccatttgcattcccacacccattgctagacccatctgagagtagttcggccccaaaggcatcatcattgatggtgtaacaaatctgttacccatcgtcatcatctaccatccaacatttatacaggttaggacaaagaatctttagattgaatctgtttttgatgtgaaaaagtgtttgaagtatttgtttattatacctgaacttgaagttgaaggtttgtcatataattgattgcttcatccaacatcgattcgttgtcgtcctatggacaatattgagtatttagggaaatgtaagtatagactctttaaaaagcttttgatctctttcgaaataaatgaaaaagttggttcttatgataaaccttgtgagagttaggtagtagattttgcaaagtacgcattttcttgttgatatcatttctttgattctgtgttgcacaataccattataccgttgtatcagattcagtgttcactatgctttgtatcttaaagagattacttactctctcaggtgaattatacgcttctgcatttcgttttcttttgaccaaagcttttcttgttcttgcaggaacttgtggcctcgcatcatctgactcgtcatctagactctgcgttgagacaaaacctgtcttcagacaagaacctaacaagatagaccaaaccaaaaaaattgtgaatcaatccctcttacactgcttagatacatcgatccttcactgtcttcagtgaaacctacggaggaagtgtcaaagcccaatttgaacgacctatcagcaaccacggattgctcatcaggaggtataaacttgatcttctttcggttatgataatcaaccatcatcctctttgatgaagaagctttcaaagtctcagaatcgtcaacatgtttattgctttccaacatgtttgtttcatgggcagcagcaacatgactttgtggaacaacctgcgtgtccccgagatttgtgatggcaccaccaccaccatggatgatactcttcatgaaatcctcgttatactctgcctcatacaaatccatgatcgatttggtacgttgattatgcagagaaacgttggatctttggccctttgcaagaatctggccattctcaaacacaagctccatatactcttgatcgcttaacctgcaacaataatcggttggtaagaacatcatcgtctgcacacaaacacacacatatatatatatatatatatatatatatatatatgtgtgtgaaacagggaaacaagattgaagaacttaatttggtctgaaggtggatgatggggaagtcatattttgttgtcttgttgaatgttccaaaagttatttcttcagtggaagtaagtgaaagctaatctttcttttgttgatcaacttcagactcttttgctcttattttatatttcgcttttctttccttttcatttttttggtattattatctctttcacctgtttttaattattttttcaggtgcaatgaatttcctgttgtacagtaccactgtttatataagtcgaatcttagcatctttgagattttttttttgatactttattgtgcctttataaattataaaaagattatttaaatgcaagggatgtcgtttccaaaaacgaaatcacataaaatacaaatagaaaggacttaaaaatataataatagacatccgtcagaatatcagattgccacaacatagacaaatatcttttgtaaacatcagtgaaacaacaaatctctgtttcacaaaccgatagtacgacaaaaaaaaaagtgttggggaggagagagagagagaacgggccaaaaagcccacgtggttgtgggaagaacattcacagtacaagaacaataaggaatgggctgggcccacaaaaaatattgataggacctacaaggtgtttggcagcattctcttgaaaggaaaaagtagaccaaacaatggaagaagtaaaaaaagcagagcgtgaagttcacgtgaaagccacgtgattcaatgtacctttgtgtttttttttttgggggtacccgtatgcagtgtattagacacttgtcctcactactcttccataacaaatgactcactcatgcatccttttattttattttatttttctattctataatatttggtgtccgaccaataatataacttagccggttacaccaaatgattcagaaaaatagttttcaatgttttgatatttacaagtagggatctctagctattatactatttcagggtaacattgtcgtttgaaatattaaaccaagtaaaataacattgcacagtaaaacattttgatctaacatattacatatacaaatacaaatttattgggccaagaggttataaggctttaaccttgtcatcacgaaaaaaggaaagagatagagcctaaaactatgcatcggcacaagggcaaatcaaatgtcatttggaagggaaatgacgtcatatagaatcttaaaagagaacataatgtcacacacccacacgtatcattatcatgttttaagattcggtaattattattattaaagacaaaaaaaaaacaaatcaatcacggggttagcgcgtaatctaacccaaattattgaaataaaatatagtatcaataggtctattctaaaaggcacgaacgaaacctcaaatagtagtaacacgcacgtatcttgctttatcgagttttcatgcattcatattcattaatgtattaagcttcagcaaacttacatttatatattaaatacatgaaaagaacatcactaatacctcacaagattgccctcctagtcctagactactttagactttagagaccatatctaaatcttcctctattttgtaaactttggatttgattcaagaaaacatgttttcactccgttttaaggggcaatcgatactatacataaccttttttttgcagctagtcactgtagacacaacttttctaaatagagtcatagatgaaaatccaataagtattctttctaaaacttaattacacattattgggacttttaaagtttatggacctcaacattataatttttgattaaatgacttaaattaaagtagacataaaactaacaaatatcaactatatttcgaagttagtgatacttttcccataaatagtatacactgacttttttcgtaaaacatgttaaatatatacattcaatcatatatatatttatcatactaacagaagaaatctacattattgtaaaggactgggagaaataattttctaagaacaagagcaacacatatttctttatgatgaaatgaaatcactcgtaaagaaacgggagtagctttgaagtcatttatcacttgtacgtcaaacagaagattagaaggtgaatcactgcattttatggtttggtttatgataaagacggttttttaatttttaaaccgctatgttttttgttggttggtttcgaagccaaaaatatatcagagtggtggtcaaaaacctctaattttgaagatataataattggtttatgtcaaaaagagatataataattggtcttgcatgttggtatggtcaactttgtgactaaaaaaaagaaagagcctaaaacgagaaaatggaatgagttggccaacaagagaggctacaaaagagtcacgagacatgcaatcatccggatttgaagccagcccatgtttttactgacaagcaaacacattgcagtaaagtcgagttatcataatttatgataaacataaagtaaattatgagtagtattttttttctttcaaaaagaagcaaaactctcttacaacttaatgatttgtaaaaggacgagacattatcattaaatcttgaaactaaaaaactatgagtgccttgaaaatctgagaatcactgtttttcttttgaatttcatttctatgtacatatggtgaaatctcaattctccaattttcttttagtattgtttttatactttcacaaataggatttaatttacttagaattgactctatttttttcttgtttttactatctatgttcgctttccagaattttatacgttattcaaagaaaatacttgaccaaatacatgtaataacatattggttatctagaaacaaaagacgagtacaagatacaaaaaaaaaaaacaaaggggacaaagaatggtgtggagaaaaaagtttgaagaagaaagaaaaaaaagtgaggaaattgtgatgataatggtaggggtggtggggaacatatctcttctttatcagtttccctttttttttttctctctcaaaaatcatgtttggagtttcttttggttcaagctaaatctttttctcttcttctttctaatagtatctatttgtttcttcaaaccaaacgatatctacgcaatacatgtcggttattgtgataacgacattgtttggatgtttcgggttcaaaagatttgtatgaatgtgtatactatatatgtttttggctcaatgataaagacacttgataagagattcaggatcgtttcaaattattttaaaaaactatatataatatgaaaaacactttaatacttaagaatactatttgtaatccgtaaaactttaagttctaaaaccattaattaaaaataagaaacaagttacgttgtacatataaactaaaagacggaatggaatatgatttgattgtaaaaataactttggacaaaatcttccaattataaaagagagaacaaagagttctaatcatattgattggtaggtcatgaagaagcttaaggagtgattgtagaagagtggaagtggaggcgacaaagtgaggagacacgtggaaaaaggcacgtgacgtggggaacgtgaaatgttgtcgatagtgtttactgtctcgtgcttgcaaaactatatgtatgttttggagtgtgagaattgtgacgtatcctcagtccttagtccataggcgaagcatctctcattagctcctctctttaaggttacgcattcattactcatgcttcccttctctcattttctttctttttctatattcccctctatttgtttcttcgcttctaatttattacatgtaacgtacaaaaccaagaagcatgcacttttttctggtgaccaaagtttaatatatcaaccgaattgactataccacatacatgtttctatctaaatccaatgaatattacacaaatagaatcttggtgtgccaaccaaagagaagcatttattaaagtcactattttgaatactaacgacggataagactaagatcaccaatatgatgtgttttggtctctgccatgaaaagatacagaaattctgattaagatttgtgggagattagcaccacttgattcactttgattgctacacataaaaggttggtaaattggtttagtattggaaaaatatagtagtggttggacttgactatagatgcttcatgataagataaattaaaaggaacaatcaaattagtagaggagtgtaattactaacagcgacgtggattaaaatcatggaaagctcaaactcttgtcatgcttagatacaatggagtccacgtagactattttcaatattttttgtcataattaaagaacattattagagagttaatgacgtacatgagacgtgtttagcagttgatattcaatttaaaaaacattttgacatactttaatgctaaaacaaaaacattttttttgcttaaagtgtctcgcggttataaaaaaaaccttaattatggaagtgttgtttgtcgaacccacgaatgcatcaatgcgcgtcacgatagtctcatgcattgaacttgattttactaagacggataatgaagtaaactatgtattgtacattggtctacatttatttaagaaaacatgttcttatccggtttagaactatcttgtctacgttcatatgattccttaaatctaagcctaaactttttaaactaaatcagtcacagtttcttattcatttatagtgttttaacaaaataattcagttaattctaaaatccaaccctaattattttataagaaatcaaacaatcttttttctttttttttttgttaaacgaaaggtagtactaggagtcgagtatatttacattgaaacaaacaaaatttaattagaacacacccagcaaaaaaatccgagcacaaagtcaaaaccaacactttgaccaagtgtctgcatgacacgtgtatttgtctgctacatggacaacatctttaacaacactgtctcatcattccaccattttctttaattaaaaaaaaaacatatcagaaagaccattccaatattattacttcttccttttaagctctaacaattaaataaaaatttccattctctatatataatacacacacgttcaaatcattaatcacctgttttagataaaatcatagagagagagaaatagtaaaagaaataaaaaaaaatgggaagagggagaagctcatcgtcttcatcgatagagagcagctgcaaaagcaacccatttggtgtgtcttcgagtaatactcggaacctaagcacggacctgagactcgggctcagcttcggatcatcttccggacaatattacaacggtggagataaccatgaatatgatggagtcggtgcggcagaggaaatgatgatcatggaagaagaagagcaaaacgagtgtaatagtgtcggaagcttctacgtgaaagtgaacatggaaggagttcctattgggagaaagatcgatcttttatctcttaatggatatcatgatttgatcacaactctcgactacatgttcaatgcttcaatcctttgtaagtatctacacacacttaattacatctttgcatgtagacttagttaatatttatatttgttatacctctctttgcatgtatatagttaagaccaaaactaatggcaataaaaaaattgtgaaaataggggctgaagaagaagatatgtgtagtgagaagagtcacgtgctaacgtacgcagacaaagaaggtgactggatgatggttggagatgttccttgggagtaagttcttttttaattttagtgtattaaaaatctctagttaagtattttttttgacataattatgtaaaaattccctttaattaatggggacttaattgattatgtaggatgttcttgtctagcgtgagaagactaaagatctcaagagcttatcactactgattttctaaaagcaaacttggaagaatctaggattgaccaatacagtcagtggtggtgggggaaaaagttagttttgtctgaatgtaaatcacttgttcgagattttattcaaattttgtttctagttttattacatttataaaaaaatcggttgtaacttgtaatgaagctatttttttcaagaaaaaaagctgtagctaatgcagatcctttttggtttagtagttatttttatggttttagacatagattagataatactagaaatatgaattgttttggaacactgctgaattaggttcatattcgtattctagttttcacaaagtttcagttgagttactagtttaaccaaatcaagatctatttcatattttcatactatcatttacttctcaattcaactattttaccggaataaacagtgaaatatagttgttctagttatggaatctgaaattgaaaaataattgtcaaaaaatttcaacagactctgtcggagatattacaattgttccgctcaccaaaagcattaaagcccatacaaggaaaacaaaaacaaaaactcttaagccactctgattattttcctcactgcacacaaatttacacgaaaacaacaaaagatgaaagaaagcatcatttttcaaaatcgaagaggtttcttcagaatcaagcaaactgtgtttcccctttgatgttcaaaacttcacagtaacttaccaagaaagtaaccatggtgatctacttaaaccacttgatatctccatattattttccgataacccgaaacaatcagatccatgttccgggaatatactctctttcaaagaatcacaagtaatttccggcgaaacccactgtgaataacctctcacattcgagcattcccatggtgatttcttcgaattcttcttcactctaagagtaacattaaggaaacatatattcttaaacacatctccttctataccttcaagaagacccgcaacacctattccatcgccatttacattctcaaaggtgattttctctatagctgggagtgctttgggatcgtatttctcatcaggatgttcaccgtacttaccggtgaacctaatcgctttctttacattatcgagcttcacgttcaagatgtgaacgtttctaacatacccgcctcttccagcagaagtcttgattctgattccagtattcgaattgaacaaatgtaagtctttaatgtatatttcggatacacctcccgacatttcacttcctattgctattcctgagcttgaagtagtttgacctgttaaccgattaatcttgatcttggagctcggtcttgcgtaggatattccatactcatcccatccgctttttatcgataccaaatcatccccggtaactatgtaacaatcctctatgcaaacattagttgatgaatctgcaaacagaacaatttccaaagataataataaggtacatatcttgaatctacgagtaaaatttgcaaggaaactcacctggatcaactccatctgtatttggagattcaagaggagccaaaattgtgagattctttacaacaacatctctgttcagacaaaaactccatatcagaacattgaagagagaaatttggtggatatcaaaatcaaatcatgattaagttattatgacctgcaataaacaggatgaatgttccaaaacggtgaattcaagaatgtgaggttggagatgatcagaccagtagagttcatgagctcaacaagatgaggtcttgtatagttaagctctccatttctaaaccaatcccaccatacagttccttgaccatcaattgtcccgttctcgcctaaaatgttgatatcatcagacagcatatctaaaactagcatcatcagttcaaaactaatcattttttataaatgctgtactagtacctgttatgactacatctgtgagattctgaccatatataagacttctgtgtcttctaccgggcaattctcttcctcgtccatatgatggtaatggatcaaccacgggccaattctctgagctctgagtgttaacaagttgtataagtgatcacagttcatatagcaaagggtatgcttgtaaagattcaaaaaggcagagacttgccgttgacccgagaatcgttgcacctttatctagccataaggtgaggtgactgataaggtcgaaactcccggtaagccactgaccagcgggaacaaaaagcttggccccgcctttatcagagaaagaattgaggtagaacagagcattctgaaaggctttagtgtttagagtcacaccatctccaaccgctccaaactctgtaatcgatacgctgtgaggccggtgaagactcgctaaattggaatattcacaatgcaggctttctccaacactacaccaagccccatagaaggcctgtaccaggagcacatacaagagctgcaaaaaccaaaatttctcaagtctcaagctttaatgaaactctgatagcacactggagccacatttcactctaaaactaagcaatgcgcaaaagcaatcagaacacttgttgtataaaaattctccacctattgtagaacattgtgatcctatgatgttctcaagtctcaagctttatgaaactcacacattaaacagtggaagaagcacaatttaggtgagagccgcatttcacatctataagctaacaaacatcaaatcaggaagaaagatgaaatattgcacagtaaaaacagtgaattctcaacctttaaaccagatttcagatcttaaagacaaagatatatatacatattaccagatttgagagacaagagcattggaattgtctaagtaatgtccaaagaaagaagagataaattgataaagacttacaaggaaagatctcttcatatgaaaagaagatctgtgatctcctcctccaggaaacttaaattaaaaatcttgacaaaaaatctttagcagcttggaatccttctctgtttctcagtcactcactcatagattggtagctaaaaatcaaaactttgaatcacaaaaaatttctctctcatggatggatggatagtagtagcaagttgcaaagattgattagatgggtcagtggtgagaggaaactggggaacccacaatggacataaaaatcattgaaagagaccgtttctgcccgccaaaattcaagcagtaggtccatcttctaccttctccgtacccatgatcatcgccattaccaattttttaatatcttcctcctacgaaaaccaagatataattagagactttaaaccataattaaagaagaagaagaacattcgattcgatgatatctaagatgtctggagataccttatttgatgttctgttacaaagagacaaagagggtcactgagagaaacccagagagaaagagaaacccagtctgtattaatatgaacaacacttataaatcaattgtttcttttgttgggaaggaatcagcgtatttcatgtgatccgaactaaaagaatattattataaaaaggataaagagaaaattgtgaccttcaaattcttcttacatcgaagattgattgattctattgaagcaaaaaagggttttttgaaaagctctgtaattcttttttttttactaatgagacgaaacgctgtcgtttagttggaagaagataacggatcacgtgacacgtggcgtttggtctcgtaagtcgtaacgtagtgagagttgactgactctgctaattatacgttttcataatttcagttaaaaaaagataaatggacaccagaaaaagagctagaattggtgaagggattttttgaaattatattccgaaattagagagaagaattaataagacaggcatagtaatgagacagacttgttgttgtctataaataaaacaatacaacatccataattactatacttaattaccccccctttaattattcagcaaacataccaccatcatggaccggattatctggtcaaaataccctatataaacaattatttcaaatattcactattgactaagacaaatcaatttttttctgtaaaaacagagcttaatggtgagatccatagattaaatactattgaatatcatcagttaatctatcaatcaatagtcaatagatcaaatctacgcctgaaaacaaaaccaaaccgaaaacgagtctaaaccaaagtaaacaagagaaacacaagaagaagcaattttcatcaactttgtaactcctgcagtcctgcccccaataagtccactttctttgcaggcttccctgaatgcaacaaaacataatgtgattaattaatcttaacaacgacatttgggatatgattatggggttctcttccgttaacaaatagtaaaccaggccactttccggtttacgtaatattggtctgaaatttatgctaaaacgaattcggtaccgttttccatcaatatctttgaatcaaacaactctttataattcttagtgcaatcacagtcaaaataactcaaatagcttttggtcaaaatatcagatcaaagcacaatgcacttgagagagtctttacaagccaaaagtaaattttcatgaattgaatcaaaacatgatgaacacttagtaactcctgccccaataggtccatttctttgcaggttttcctgaagcaaagcagagagtgcctgcatcgaaaacattgaagcttcgtgtcaatggatggactaaatttatgagccaaatttctcaaacagattctaaatttagagggtctctgaccttcagggagttcaggctgatcaaatggagaacaaagggttttagctgctcctgtttcacctttcgtacgtgccttaacatctctttccacttcctacaaagaatttaagtttaaggaacttaaaattgttatcttcttgagttttaattctataagctggaataagaagtttttgctgtaacatacctcttcatcacaccagggagccaaaatgagtttcttttcgttaagagctttgataaactcatcccaagtctttacctcttgaacacatgcttccctcttttgcttagcaacttcatacatgttttgctggatcttttcaagcagttccttaacatgttcgactaagctacctcttgggatatcttccttaactccgttgtcacgtctcacagttctgacctatgggataaatgaaatccgtttagctacattacaagttacatatttaaaccaggcacttacttcaatattatatgtcgaaggaattgatgagatattaaacggactgacctgatcattttctaggtctctgggaccaatctcaatcctcaatggaacacccttcatttcccagtctgaatacttccatccaggagagtagttgtcccttaaatcttcttcagcacggataccggcttcacacaaggcagatgcagtagcagtacaagcatcataaattccttgggtattagcatctttgtagggaacaggaatcacaacaacttgcacagatgcgactttaggagggagtaccaggcctttgtcatctccatgagtcataatcatcactccaatctataaaaggtttgaaaatgataagttaacagttgtagagcacatgagaaaaataatctaagtacttccaagtatttaccgtcctggtactgtaggcccaagaattctgccacaccatttctgtctctgctttctcattctcaaagttgatctcaaacatcttcgcaaagttttgtcccaaacaatgagaggttgcaccttgtacaccacgaccagtgtttggaatgaaagcctataaaatcaaagttcaacttcacagagagtaaacccacaagaaaaaaggttaagtctcagaacaaaaagattacatacctctacacttgtagtgtaaagtccaccagcaaacttctcattttcactcttcatacctttcacaactggaactgcaagatattcttcatatatgcgacggtaaagctccaaaatttgaaggacctaagaacaacagaagccgtatgatgaaacaatttcacctaaatgatgttgaactgcttaatataacgcttagtttgcagcaaaaaaaaaaggagagattggatcacatgcaaaagttttaggttcacctacctcttcatctgcttctgcttttgtggcgaatgcagtgtgaccttcctgccaaaggaactcacggctcctgcaattaaataggttaggcagtgggctgtggcaagcaaatttctgtgtcgaaggtttcaatccaaacgttaagccgaatatttacagcagaaacaatgactagctcaagaaaaaaagtactaacatgataatgaacagaaaaagtagaaaggagtatatgataataaaataccggataaatggggtagggttgctgaactcccatctaacaacattgcaccactggttaagcttcaaaggcaagtcacggtgcccccttatccacttgctgtagtaagggtacatcactgtctcactggttggacgaatagcaattgggacttccaagtcagatttacctgactttgtaacccacgcaacctaaacaaaacaatgagatctgttataagaaggcctttttcttcacaaacaagatctacaagatatacaaacctcaggggcgaatccctcgatgtggtccttctccttttctaagacaccaggagatacaaacagagggaaatagcaattcttgaccttcattttcttgatttccgcatcaaagaaaatctatggaaaaaccaatgaaaacaaaatgatcatttcacacacttgattccactttcaatcaatgtgattaactcaaatcacaataaagaaacgatgatactcacttgcataatctcccaaatggccattgaccatggccgtagaatataacatccagagatatcgtagtactcaatcatatcttgtttacaaacctagacagacataaagaaaagcagatgtcatataaccagcttgggacaaaaaagaatgtggaaacactcatcgttgaacatataaacaaacctcagaataccattccccgaagttctcatctttcttaacactgagtccgagacccgtttccttcttgacgtccttcttcttctgtccactcgaagaagcctttgcaaccttttctttcacaaccttttctttcttaaccttttctttcttttctttcacaaccttttctttttgttcactgggatcagccattgcaaccttcttcttctgaaatgcattaccaataacgaaatccaattacaatcaaagttatgaaaatcaaggtttatcactaccaagctaatggattagtaaaatcaatggcaagctacttcgggatctgcgaatcgtttgagatttccgtcaatttctcaaccaaaatcgagttactgtccactcacacaaaaacaaaatccggcgaaaactaaaaagctaaggaacctaagaaacacgacaatggattacactaaagacatcctagcgaattaccaaaatcacaatagattcacggaacaataagaaacgtttgaggtaaagggaagaagaacttaccaatttcgccggagagctgaagcaggactgagctgaagacggcggagcaaaagaagcagcaaagataagagaagagagaaaggaatcgagagagcaaaatagcgttacaagttgcgaacgtttgactcgcttgacgagctttgttactgaacttccaattatatacggccacgtgttagggttggatctggtttttgcctaaatgcttagtttacatgggccaagcccaataagtcaacgatcgatgcattaattatttatactatagttgtggagaaaagatggatttatattctaatccagtttcgcagtcgatccatttgcaacttgaataatggttaggtcatggaataaaaaagctgtattttattactcatgagtaaaatcaatcctcacatgtcattataactcgacctagtaacagcccaccttaatggcccactaaagcccaaatttgaaataacggtcaaatcttaacatttaagttaacaaatgataaattagtagtatatgattaaactcaaatctaacaaggatgcaaatgatcatcgatcatcacatgtcaattaaaatttatttaacgttgtgtaacgcatataaaatgatataattattaatttcactaaaattttgaatttttttttatgaattgtcgggaagcggaaaagtgttaccgcaccacaaaaatcaacgatgacgtaccaacagtgaatgatttgacccccaaaaacccacacagtctctctctctctctctcaatttgggattcgagacgaaaccctagctctgatttttttcaattccgatggaggcgggagagcggcgcaatggcgattcgatgagtcacaatcaccgcgcaccgaagaagccacgtctcgctgggttattaaccgagtcagatatcgactctgagttcgctcaccaccagaccggtgttgccagaatcaacaacggtagcttcgggtgctgtcctggctccgttctcgaggcgcaacgcgagtggcagcttcgttatctccgtcagcctgatgagttctacttcaacggtctccgtcgtggacttctcgcttctcgaactgtgatcagtgacctaatcaacgccgatgatgttgatgaggtctctctcgttgataacgccaccactgctgctgctattgttcttcagaaagttggaaggtgtttctcggaagggaagtataagaaggaagatactgtagtgatgtttcactgtgcgtttcagagtgtgaagaagtcgattcaggcttatgtctctcgtgtgggaggttctactgttgaggttaggttacctttccctgtaaattcgaacgaagagattatctccaagtttagagaaggactagagaaaggtagagcgaatggtagaacggttaggttagctatcattgatcatataacgtcgatgccgtgtgttttgatgccggtacgagaattggttaagatctgcagagaggaaggtgtggagcaggtttttgttgatgcagctcatgccattggtagtgttaaagttgatgtgaaagaaatcggagctgattactatgtgagtaatctgcataaatggttcttttgtccaccgtctatcgcgtttttctattgtaagaaacgtggttctgagtctgatgttcatcaccctgtggtgtctcatgagtttggaaatggtttgcctatagaaagtgcctggattgggactagggattacagttcacagcttgtggttccatctgtgatggagtttgtaaacaggttcgagggagggatggaagggataatgatgaagaaccatgatgaagctgttagaatgggtttaatgctggctgatgcttggggaacgaatctagggtcacctccagaaatgtgtgttgggatggttatgatcggtttaccttcaaaactctgtgttggaagtgatgaagatgctattaagttgcggtcatatctgcgggttcattactcagttgaggttccagttttttatctcggattgagggatggagaggaaggagtgaaagacaaagacagtggactaattactgcgtatgttcggatctctcatcaggtctataacaaaactgaggattatgagagattgagagacgcaataacagagttagtcaaggatcagatgacttgtcaaaaccttcctgcattgtagtaaccaggtatgcttcagattcacaatcttgcttaccatctagagttgattgccatgcttaacatctgttggcttctctgccttcaaaatggtggactgtaaaaaagcagacaactttagatcttttttccatgctctaggtgatgattgcttgatcgtatatgaaccaaaccaattaaggtattgttcttctaaacatatgttttggttttggtggcagatatactttgataatccacaagagcctcattgagactctttcatagatcaactgccggtgtaacaataaggcgatggaagagccacgggcaaagattccggaggtaacatgtattgatgagcttgtggaggagcggcttgcaatggaagaagaagctaaccttgagaggccctctctttttattagtcttttataacgtttaacggctttgtatgattattgcaaataaaatcatgtgcgtctaatcttatcttcctcaaacattctgcttgcgaatctcctgtcgcagttccaataatttttccttattgaaaactttttccctcacattgaaagcatattcatagatatgtaatgacacctaatttatcattgttttgtatgattctggttcgttttcacatctatgtctattatgtctatttaccaacttcaaagttcaattaaaaaagggtcaaaagtactaaattgattccgatgaaacctgtcaggtcaaatcctactaaataataaccaatgggtattcctggagaatttgaaactcttgagatttgagttaacttgataccacgtgtcatccatcaggcggtttatcggagaagaagagtcttaaatccggcgagtaagaaactccgactgttttttgattcagagctaagcaaaaaaagcgtgattgtgttgtggagtagaggaagaagatggttgatgagacagaaaaacctattaggttactcaatttcgtctccgaggaacaggttctctctctctctctctctatcgaaaccctagttttgtgaaattcaatttaaaattgcttgttttttctgagaaattgatttggtgatccagttagatgaatcgaagaaagaaagaggagaaagagttgaagatggaacattccagagggacagggctctctacgaggtatttctccatccttcactgtcgttttcagtcccatgagtaaatcattcgttttcttcttcctcacttgtaatgtgtttcaattgcagattttgaaagagaacaaagacaagaaggacgctgagtttaatgaacgattcaagcatagtgagtcactatctctgtatagcagtattgattccattgtttcaagctgtgatcaattcttatgtcaagatctttgctttggtttaccttttctgaaattcaaatttttggtatgttaccttctgttgaatggtttgactaaagaagagactatattgaattgggattttacagggccacccaaagctctggatgaagatgagaccgagtttcttgataaactggaaatggtgagctatcttcttttattgccaatggactgcatatcagtgtagatattactgagttagtgcttataagctctgaaggatcatgactttatggcgtgatctttgggcttatatcttctctgtcatcttaacaccctcatttgcacttgttgtttatagtcaaagagggaatatgaacgtcaattggcaaatgaagaagatgaacagcttcgtaatttccaggtaactttcttttgaatcttgaataacagttaacaaaagcttacaaaattgttagattaagattgtatcatggttctattttcaggcagcggttgcagcacgatctgcaatccttcacgaaccaaaggaagcagcactgccaccaccagcgccagtcaccaaggtgagtatctcatgattcaatttggaatgttagataaaatttgcagatcttcatctgagcatttgaatcacaaggggttatatatatcttgaactcttttacaggaacaaaaaccaatcgggaagagaaatcctgcgactcgtccatttaaagcgatcataaaagtcaagccacaacccaagaaggctaaagcaacagagaaagaagagaaagagatcccagggaatggaaaaccggccagccatatcgaccaggcttctttagattctgtaaaaggcaatgtcacaggtaaaactactgaaggtctgcaaactggtttagccttagtctcatatagtgatgaaagtgaagacgatgattaatattttgtgttactgactcaataatctatataaacattcacaatgaatcaaaatattgaatcttttggtgtcagttccattgtatagtattaactcagaaatgctaaaaaatcattagaaaggaaattttatgtagaagcactcagatgaagttgtactaaagaagcataaacaccatctttgatattaatcaaagtctcatgctttcccttctccacgatgactccattcttaaccactgcaattacatcggcgttcttgattgttgataaccgatgtgccaccaccacggtggttcggttaaccataacccggtccaatgcatcctgaaccacacgctctgactcagcgtctagagcacttgtggcttcatcaagtagcaacactttagggtctttaacgattgctctggctatggctactctctgcttttgcccacctgataattgaactcctctttcacccaccattgtatcatagccctgcaacggtaagcaaaagtttcagtttaatctgtatccatatggacctggaaattatggctggacactcttttttttggttcgattattcgggttattttaagctgttcaatgttagaacttagaattttggttgggtgcggttaaagttacctgttgtagtccactgatgaagccatgagcgttagatagctcagctgcggatactatttcggtttcagtagcatctcctcctttaccataagcaatgtttgccctaatcgtttcattgaacaaaaccggttcctggctcacaagcccggtttgctgccttaaccatttcagctgcaatgtctttatctcaactccatcaagagtgatctgaccagaatcagggtcgtaaaacctctgtagcaacgcaatcactgtcgatttcccgctcccgctctctccaaccaaagctattgtctgaaacagagggaaaaacaaaacaaaataagagactttatttgacccgaactgaaccaaactgattcattttttctatatcttaccttgccagcgcgaatagacagacagagatcttggaagatctgaacatctggtcttgaaggatatttgaaactaatatgacgaagttcgatatctcctttaacattatcaagaactctcccagactcatcacttggatcaatcttcgattctctgtctataaccgcgaagatcgatgcagccgcattgctagctttgctggaatcaggagacaatgaacttgactgagaaatagctacagccgccattgtcaaagcaaagaaaacctgtttcgaaacaacacaaaacactctttagaaggggacaaaaaacaggaatcatgagtttctgaaatgtttttgttgcctttaccctgaaaacagaatcaaaggttgttttcccgtcatcgacaagccttgcacccgcgtagaaactggcggcgtaagaagagaagaggacgaagaaagaaacaccgaaaccgataccactaactatgccttgacgtattcctgttctcataggaccttcacatttcttcttatacattttcatcactttctcctctgcacagaatgaagcaaccgttcttatgctccccaccgcatcattcgctacttggctcgcttcctcatacattctctgccaacaattttccgtttcatcagacaaaaaatagagatatgtaacttgtatagaaaatcaaagagagtttagtcgtacctttgcatctgcactgaagccaaccatgaacttcatgtatatataaccattaagcccgattagcggaagcatcgcgagaacaatgaaagctaactgccaactcgccacaaacgctatgaccaaacccgcggttacagacgcaagattctgaaccgtttgagccaatgcgtctccaactagaccacggaccgtagctgcatcagcagagagcctagctccaatagcaccacttgagttctcagtctcatcaaaccatccaacttccatacgaacaactttctcaaaacacattgatcttatccgctgcactagtttacatccggctatggaaaaaaagatcgtttgtgctgggaagaccaccattgaagctacaccaagaagcatgaagatgattgcccaaaaccttgtatcggattttaactgctcaggtggtttgaaaaatgctttgatcacgcttgagattagaatcccgaatatcggaagaataactccgtttaagaccgcggctatagatccgagtataagcataggaatctctggtttgtttagagcagcgactctaaagaaagagactttcttttctttgatcggagtagaaaccttgatgtctttctctggtatagcttcgttgttggtgtctattcctgctggaaaaccaaacatagagaaagaagaagatcttttgcttaaagaccggcttagtgacgacttccttaaactagaccgtttcatggactccattgatagtttctgctcatccgttgaatcttctgtctgtttagtatcttcttgtagacgtatgagctgagaatacgctccttccgggtctcttaggagctcagagtgagaacctgatcatacattttatgatcagcacttactatcagataggattggatatatatatatatacatgtatatgtgttagatactttgagttttacctttctctacgatcttgccttgatgaatcacagcaatcatgtctgcatttctcaccgtactcaatctgtgagcgacaacgacggttgttcggttaaccatgatcctgtcaagagcttcttgaacaatcctctcagactctgcatcaagtgcgcttgttgcttcatctaaaagcaagattcttggatctttcagaatcgctctagctactgcaatcctctgtttttgcccacctgaaagctgagttccgtgttctccaaccatcgtgtctaaaccctgcaatgtacagttagttaattcagttacatttacaagcttcatcaaaatgaaaacagagacaaaaaaataacagaggagaggtgaatttaatctcaacctgaggaagcttgtcaatgaatttagacgcgtttgcgagctctgtggccttacgaatctcttcgactgttgcattttctttcccgtaggcgatgttttcctttatgcttgaagtgaacagaaccggttcttgactcacaagtcctatcttgcttctgatccactttagctgaaactctttaaggttaatcccatctattcggacttcaccgctttgtggatcataaaacctctctatcagactcacaacagtagacttcccacttccgctctgcccaactagagccacggttgaaccactcgagatagagagtgaaaacccgcgaaagatctgctcttctggtcttgccgggtaactaaagttcacattattaagctcaatgtctcctctaatatcgtcaagaacttttccagttgtatcggaagcatcaatctccggctttcttttgattgcttcaaacattttgtatgccgcagcttgaccagctgcaaacgcgcttaaacaaggagatgcttgtcctaatgacctgatattagcatgaaaagcaaattagcttacagaaaataagaagttgaaggaccaacaaagttgattcggaagctcacatggaaccggttaaaaccgcgaagatgatgatgagaacttgtcctccagtgtatcctttctccaatatcatcttcccaccataccaaaccgctaaagcataagtgcaaaagatgactatgttgagtgtaccaagtccaagtcctgtggaagctccttcaaacacccctgctctataagcagagacaagatgcttattgtaattgcttatcgcttgtttctctccagtaaacgatgcaaccgttcttattgacccaactgtttgctcaactacaaccgcagctttcgcataagaagtttgtccacgggaagccattttggaaatgacgatagctagagctgcaccagacattactagaagtggaattgaagataccatgactaatgtaagaagccatccttcagtgaaagctatcacaaatccaccaataaacgttgataccaattgaatagcctttccaacctacaaaaaaggtttgaaacttagtaatctaattcaacccccaaaatttgtaactgtgtcatgttctgttaccttctctcccatggcgtcttgtataagcacagtgtcacctgacattcttccaacaacttctcctgtgttggtttcgacgtcgaagaaggcaatgtcttgtctcaatatagtttgcagatacagactccttattcttccagcttgtctctccccagagatcatccaaccagaaacctctgattatatacaaaaacatccactaaaagattaaaatctttcacattcaaacccactaaagatttcggacagaatcaacgagtgtgtgcttacggagaagagctgccactagagttccaagcccaaggtatacaaatttcagagccacctgtgagtaaagttgtattaaagatcaatcattgtggtctttttttgtgggtctaaactagaaaggtaaaagagtagaatatatttattaccttagcgatcttatcagaaacatctgaactgttttggttttgtccaaacacatctatgacatctccgaagaggatcgtcatgatagggaagccaagaccgttacccaccgcgcctattgttccgaggatcatcaaaatgatgtcaaatgaatctgcaaaggcaaacagcttgtgaaacggtacagttttggtcttctcatcttcttcttgtttgttcttctctgtttttttcttctcttctttcagatcagactctgtcttaagttctttttcgtcttcttcatgaattttagagtttgaagtctctgcgtctgctctgtttggtgaatccaccttcaagccctcctctgattctattacactatccattgttctttgatcctatcaagaaaaccaaagctaaaaatccaaactttaaaatctagaaaactgaaaccttaaactttattggacaacaaaaaacagagaagcatgtacctgaaaaacacagatacacttccttttcttagtagccgaggaaacaaggatcgtggagggttgaatatataatatactctaattcattacttgaagaagaagcagtggattttcgatttcaagaacttctcttaagacgtttacgtctattgaattgattcaagtggaagttcaggacctacttccagaaacaaggactagagtcgtcaaaaacgaccttgttatgacgtgacaggtcagacgccaagtggtctggtctctgttctgcggatagtcttattagcacctaactttttctttcacaaagaaaagagtaccaaaaaacgagttttctttcaaactttagtgtgactaatcaacatttactttgctttgttcatacagtataaaacaattgccattaaccgcatttctattgtatgcagacaaaatatcaaattcagattgattttcttatatgcaacttgcatttgttttagctggcaaatgaatgactcataactttttctttacaatttttattattattattatgtgcacattacacttcagtacgtaacgaatcaactttcaagcagccaatgaattttcttactcgttttcccaaattccactatacaatattttaataaactggattagtgattattcggttttgttagatgtcaatttatttgtcatcaaatcatcgaacaattggcaatgagtctcctcgacgcaccacgtcatcaaacgtacacctttcttcggcaacggcacagatcctacgatgccagcagggacaatactcaacccttggattggtgccacgtgtaatggtggaccccatccataatccacctgattgaatcctaattttccccactccgataaaaacagcgtattatatcccaccgccggcgcaaacggatcgtctccgtcgccgctgacgaacttttcaaattcctccggtagcttcgttttcgcttgtttgatcaatttcaccacatcgaacactgatttctccttcgagatttcgtggctttcggcggagattttcaccgggaagaagcagttgccgtagaaaccaatcgggagcggcggattaacaagatgacgacagttagcgaagaatacgagcttcacttctgtatcctctctcagatttatcgcttccgtacgaagtttccagaaacaagcggcgatgacctcgaaggctgaacaaatctctccggtcgacgcacgaaactcacgtttgaaccgttcgatcaaatctgatgggatatcaaagcttaagtgctctagcttgtattctggaaacgccggtggaaacggcggagggattgccggagatatgacatcattcgcacggtgctgctgtggaatgaaatctctatgccagacgggagagacgccgagattcgtttggccgcaggcgatttctccgaccgcggtaaggaattgggccgctccaaggccgtcacaaattgcgtggcaaaatctaaggcccattacgaaaccgccgcaagagaattgggtcacctgcagtaacattataaaatccggttcagtttaacttcagtcgaatacagtcgtcaagctaatcggtttaatttataactgctttttattaaccgttgaaccggattttgaaaactaccgttcataattcaagatcggtactaattgtcaaacaaaccggttctagcggattgtagattaaatacttacctgcatttggacaagcggttctgcatcatcatctttagggatttgatcaggaaggagatcatcgtaaggtatttccattagattgtcgaaataaccaacactctctagcttaacatcagtaaccgcatcaacgaaccaaattccagttttcccggtacaatcgatctgaagtttaccttggtttaactctttcaatctaccggacaagggatagtaagagacaagtgctttagccaatgcctcttgtatggctctagctgcatcaggtccatgagtaaacacatgtattgttctagcgaaacatcgtagaaccggaatattatcgattaaggacagatccaacactactgatggggtcgtttcacatgcttgaataagaactcggtttactctggttaatgaaaaagccattgaagaaaagattgacttgattaaagaaaagattggcttaggagttgtgtgacatttctggtggtagaagactgctatacttatatattgtgtgagatattggtgaagtcttatctatgggacagcttcgctttgaagtggactataattaggtgatgtagggctcgcttttgctaacattttacacttctcataaaaaatatatctatctagacttaaacaatagcaatgcaaaataattaaaatctgtgaatatttgtcaaaagtcaaaactagtacatgtctgttaacacgtatgtgaaataaatatctttggtttgtttatttttactagatttttttatttttatttttgtagttgtaagaataatcatgaaagtggaatatggtaaactttagcaaatgatggtatttaaaatattttgtgtatcaattttcttaaggatacaacatgtgataaaaaaaaattaattatttgtactacaaaaaaaataacaaaacaattttttttcctcttttgcacgtgaaacgaaagcaatcttatacaaacatcatctcaacacgtctagaaccctatctttgtatatagtatccaaaaaagagttctgatccccagagacgacgtcgtatcgttaccttaacattatcacatactgttttattcttaacttttttgtgttgtcctcttacaatcctagttggacgggcacgttggcttcttggatccagttagctggaccaacccagttagccacggtgtaagtttcaacctcagccgcagacttagccaccttaacccaaggaggcctctgagtagtggcagctcccggtccacggttattgaactcaatgtatttagcagtcttgtggttttgttctccttgccattcggtccatccttctggtttaatcaaatcaccaatctcagttccaataatcacagtcgtggcaaacttcttccacggccttcctaggtacgatttgatggttagcttgtcagcttcgagctccttgtccggtatgatacggcagttatggaggacgataccgatcttcatcgctgcacccttttcattaccgtcagccgtaacgtagttggattgtccggggcttccctttcggacgaggatgagagagttttggatcacagttgcggattttccgaagatgaaatccactgtaccggatacaacaatgttcctgtagaattgacgtccgttgttgacgtagagtgtgtcttggtaaccgtcgaatctacagttgaatatgaccgcacggtctccgttcacacggagtgcgaccgcttggtgtcccaatggaccagcagtgttcttaaacccaatccatttcgccatgaatccctcagattcgacctctgcatgtacatattaaatgttagtaccttggccgattatgtagcaatgtaaaacataatgttttgtgggacttacgaacggtgccactgagtgaagtagtggttcctgggctaagtttaacacttctgtcaaaggtaatgatggtttgtgtagcaccatcaccgaacatgaaaatgttgttcttcttcttagggattctgacttgttcattgtagataccagccttgatatggataatgcaccttccagggtttttatccgggcaagccataaccgcctcagaaatggtcttaaactgtccacttccatccttagccactacatgagtcgccttgatcttaccgccaccaccaccgccttcaccgataccatcatcaccgccagctggagcgccacgtccggccttagccataagcttcctgtctttaccagaaaaccatttggggagtcccttagagtcgttgtcttcaagaaggcgacgtgcagctccaccggctccggctcccatggttatgttcttcatatcgtcgactttgacacccatttgggccatcgcggtaacaacggaatggaagatatcgatagcgttactggtcaaaaccttggagttagagattccttcacccatgatcttctttagctcaacttcctcgatgtcgtcaagacaatcggtttggtagttgaaaactccagttaaccattgtttgagctggtcaagcttagttccactctgctgaagatcctcacccatctcttcaacaatggtctcaagatcctcaagagcgtacatcaatactctcttgcagtaatcaagaacggctttgctggtcgcgttcatgttagtacccatacctccttcggtcgaagccgtgaagtttgaggattttgtgatcgcgtctttagtagccatcaggaaggctttgacaagcttgcttggatcatcacttttgactgggtcgagtgttttcgcgcacgaaccttggtctgtggttgactggcaaattgtctgaaccgctttctgatgagagtttatgggaccattactgtcgccattggcgccgcctcctttattaacgaacgtgataactcctatggcaacacccaccactaggaggagtgatgccacagataccacaacctttcctactgccattttttctaactttttttttttgttgttatatatttttcccctttttgattttacctttttttttgctttttatgttttttctctccctccggttttattcgggaggtaaatatgagagggaggggattttttttattgaaacagagcccggtggtttattaatggggctggtagagattgtggtgcattgtggagacattcttataggatttgtagtttctaaaattagggtttgcatggagctagggagagatttaaggtcgttgaatggctaaaaattctctaatcaaatattggctatgagactaaaaattggtcaccacaagatgatttgattatgtcctgatcaagagttcgattactaaaaatataaaacgtagatccaaccaaaaaaaatgtatgtggcagtaactctagtttacttatacatataacatatcctctaattctaatcttgtgaatatattttggattattcattcctaagtttagttatttatccgaaagtaaagtattcgaaaacttcttattgagagtttgctctcatccttttaaggttaaaactagttggtacactacaataaaacttggtagctagtaagaaattatgtcttctctatgacggtatcattgcatgaatggtatactaatttatgtcttataacgaaaggattatgagcttaaagattcaaaattagttttgattaaagtgtttgaatagaaaaaccgaattcgtaagcttttattcaatagaaaaacagaaaaaaccgaaatcatatgatactcaataaatcaaacaaatatgattcaacctcttcctagactttggtcaaccaaatgagctattgtatacggtaaactgtcgttacgctcgaattatattattgatgacgcaaaacggtaaaaaatactaaaatagcaataacgattacggaatgatgataataaaaaagagagagaaaatttgcatcatagatatcacgatattagagagatttaattgtgtagttagccttgttaattcgcagtggttaacagttaacaaccggttaattgtcaattgtcaacaaccgtaactgcataattaaaccactctcatttatatagagagaaaaaaaacttgtaactcgaatacacgatggactgtggatatgttcaaatgagattagcagataatataacttttttgcagatttcaaaatttcctgaggctaaatgtctaaatcatcattctaatacttttgttatcattaacgatatgtatttaaaagaaaaatgttgaaatagagacaaaaaataataacatttcattaattaatatatcctttccaatcatcacgaaatccgtccgtacatgtataaaacctacaacattacatcacaaacgacgcataatcatacatgacagaaccaaccatctatgattccattcgcgattgctctaggccttacacgatataattaattattacatccaatcccttaatacgatcatcagtaataataatcagacaagggtggcggtcggggcgaagtgtcttcctcgttaagcttcaccttaataccaaaagtcttgaaaatagtattcaagttattaaacacatcaaaagaatcacttgttagattcttcccaactccaatcccaatccccacttccttcaacaaaatcttgtcttcaatatcgtccaaacaagtcgaatgataccccatgattgacattaactcttttttacacgtaaaataattatgagccaacgtcgttacatctttccccgtagctttccaaaaatcggcgaaatcttccaacgcgtaattcaagtttttctcgcagctgttgaccactgcggttgcggttgcgtctgacatgtgttttggtttgattccagagaggaaagtcacactttgtttgacggatgtttcagcggcagccactaatgctcggattagttcgatggggtcattggtaggaacgtgtttaagggttttgcaacatagacttgtgtccgttgggataacggtgcagattcccgcgactgctttggcgtgcggtgtgaaaaggtagttcgttcgtttgactggtttagccgttgcggttgcggcaacgaatatgaagagaaagaagagtttgattggagtgttcatgattgtgttttcgtatgaacggagaaagggatcggaaaggaacggatctcggaggaagaagagaggttttttgatatagctagaaagataatgcatgttttgtatatatttatagttcgtctatatttggcagctagcttttagtttttttttttgttaataattacatatggtagggagtgaattgcgcgttaattttcgggttaaacggttgtgtaatattttagttgatgatgacaaaatgatattacattttttagattaaaaagaaaatgatatttagagtttagaagaaagttctcaaatcatttacgacattttatgaactttttatttctaaaataagattttgtggtatatttgaaattcgaacattttgataagaatttttgtagatatatattttgaaactctctgtttactaaattttaattttcttgtgataattgaacatttttttaatcattttccaacaatttctacaaaattttatttttaaaaagtatatattggtccagttcaaaactatatatttacgaaagaaaatgaaatgtagggcagtggttgtgagaggtacacgtatgattctgaagctaaaaatgagattaatatatgaaggaccgactctctgaagcgaaaccgtagacgcgggaagctttttggaaaatggaggtggaggaagccaagatcttgctcggctttcctcctaattctcgtcccgatccttctcaggtttcttcttctcttctttttcgattacggtcgtttgtgagtttctccgcgagattttcgatcactgaattcgatcaattagggtttttgaatctatctgtcttttgaatttgagagctgaaatggttcgattatagactcgaatttggtgatgtcaattttagttgaatcgatggtatatccacaagttttgtttgttaggtatgggaattgcgagggagattggtggatttattttaatacatgtgttgatatgaatcgatgataggttaaagctgcttacaggaagaaagtatgggaatcacatcctgacttatttcctgatgatcagaagcttgttgccgagtctaagttcaaatcggtttgtgctcttttctctgcaaattcttttcttctatttcttctcacaagacaagtttaaagttagtattgaaatttttgctgcagatatctgaagcttattcttgcctagagtctggtaattctctctcagattgaacccttttccttgtttgtcagagaatctttggtctgcacaaacccaaatgagctagtaggtgctacttgtgggtgaactttcctgatgaatgcatacggtgaaatttttaaccactgcatgaggaactaaatcctgatagctttgacgaacgttaaagtgtttatttttcctatcttttgcctgtcttcatttttgcacgagatgttctgaaactgaatgtaggccagtgcaacaatgagttgctcattaggtagagtgcttcgatgtctggatgtttctctagttcccaatgagtgaaatttctagttttggtattgatatcgcagatttgactcctttggagctattgttgttggaattggaagaatgagaataaaatctagctcatttgggtttacaagtctgcagaatcaggacacgtttactctgtttttatatacttcgatacattccataaccattatctctagtacaatatcaagctttgtaatttccaacattggtctctgtttgcaggtgatgttaaaggtcaatggtattacagagcaggtaaaaagactactcaacactcagatgtgttcttaatgggttatacacactgatgggactctcaattttgataaggtgtgtattcgagggtcgtcaagactggggttcctcggccatattcatctgccaaaagaggtaaccgttggttgatcggtgcacctttccttttgattgtcttaggaaccatcggacttggtggaatcaaagctaacaggtgagtttcacttgtgtttttctattactgtattaactggaactattattagtactagtgtttattgggaattttggcacttgcagggcatataatctgcaaaaacagacgttcccatctcacaatcctttccttccttgattcaaagtctctttcaacacaacactttgaatcattggatatgtaacctttgtattgtacgaatgaatctacttggacctttgttaagaaacttgtatctcaggatcgatagctttatttaaaatttagaaattatagaatgaatgcgcaagatttcgctacaactttcagatcatcatttctaacacctgttatgttaaacaatatgataaacgaaagtaccagtagaaattactttcatacataaacataaacgtcttttaaaagaaaaggaaaagcttgaaggttcagaataagacatacgtaggtaaaaagaaaaaagaggtaagattacagatatttttcccaacgacattaggaatatcacgaatataactgtaacctctatagtaagaccaaaagaaacagattgccgtaactaatgcagaaactttggtgatgcagagattcccaatcacatcctcatgaatttgtgcgatcttcttgatgatggcaagttggcaacactaaggtttttacgaacctaatcatgatctagtacatgacatttaggtccaaactttaactaccccaaacttttagccttaactccttcatactgaaccgactgaaagtaaaattaaaaaaaaaaagtgctgcttctactaaggaactagtacttagacttcagaatcatctcattctgaagttttagatatggaaaaccctatttttccatgtcttagtgttctctatatttgatattcaaggtagtacccatatatgctctgtttatggctgctactacatcttcttcggtatttcattgaacaaagattagattcaggcaacggtttggatacctggatccgcttcagtagctgtctcgtttgtggtctctgcagcaaggctaatagtaattggtttccatcctgtttgatgatgggtaatccatttctttgtggttgctgttatattcaagatctgtagtatgtcacctaaagtaaactcttttagacattcctttttcagaacttgtgcagcttcatacctatatattagatcaaaagaggacgaaaaggatgttataacattttcatgggtaaggaaggaactatagatccttaagtaaacaaacattctaacctgcacgtagttgccgtaaactccacacgcccagaagatgaggttagaaactgttgtattctatcccaagtttcttttgggtattgcttagcgtttgcccctaaagggtttacacagttccatagagcttcatttttgccaatgtagagctttagtttacctacatttgtcatcatgatcatatgatgctccaaagcactttccaaagccttctttacgtcagtaccgtgatgcttaggatctccatactgaatgcaatccgagatatttggctcggtaggcataactttttcagttttcaagatgtgtagagcatgtaagataacgcctataaggccttgaacatactcagatggtggtggacactcttgtgttccccacctatcattgctagaaccagatccagtaaccattggaggctgagaaggtggaactccaggactggaagggtaggtgtgggcagtggttgtcgtagattgagttaccggggcactactacaccgtggaatataactcttatttggaccattatgagtatatgaggattccatctttggtctgaattcttgtctaacttgaggattgaaattaggacggttttgagtttgactaggatattgagacacacttagattgctgatatcaagtggagtcaagagaggtggagacggaaatctaggcccgtcatttcgcgggtgctgcattggacggaaaccattaccaactggaggattcagattctctgggcggtaaggacggaaaacattaccataaggtggccgcatagtggcagcacctggcctagcagcattgggataatagttctgagcatggtttgggatgctgtttccattattccaagaaggatcagtgttagggtaaggttgtctaggagggaatggaccagggcgaggaggataagtgtactgattctgattctgaggattagtcatgacattaccagggaaagtgttaacattgctagagggtaaattgggaggaggaggtctgctagtggaaacagatggctcgctagtgccaaagaactcatgtggggctttcttaaactgtttcccttgagtattctgttgttgctgacggtaattattgttaggctgatgattagatggttttggaacatatttgactttggatttgttgtcaaagactctcctggagtcagaatttgaatccagaggttggcttgatggaatctctgaaccaggctttggggtcgtttggttggcaacaagttgtaagctttcggctcgtgtaagagggattccaccagcagataggctagtccaaagccacacagtctttgcagcatgaacaagtggcacagatgctttgagaggctgtgccaaaagaacattgtaacgtctcattctcaatccgtgaagagcattggagaagtctctgtctcctgatattaacataaaattcgcaggtgcaggattgtctaacgcccaaaacaacatgtccactagtatcttcttatcactcgcatctttcacccctgaaacagtaaccatacacatgaaaagaaaaacaatcaattcacaattgaaatctaaccaagcagataaagatacagaaactaagtaatagagatagttttaaaagggggaagttaccggcggggacgtggttgagcgcaattccggtggaattaagagcatgttgaatggtcaaagggatgcgattggtatcaccataagcagagatagaaacaggaccacaatagttcatcttctgaagcgccgaagtgatattctgagcaattccatgagcatcaagaccgttagggacttggcaattctctatgtcccaccacactgaagtcttcgctctcacgtactgagcctcagccatctctgccggcaccgaattagttccgaaatccccatcactcgccgagttcgtcgacatcgatcttccgccgccgtaagctactactacgaatcgccaaaggaatcttcgaataagggatttttcaattattagccgaaaaggtttttctgttcttccctttatatttccctgatgatgaagcgagtgttctttgacaattttgtccctacagtatcggcgaggggaagggtagtttaggaaagaaaaagtgaagcgttttgattggtggagagtcgtggtttatgccttgttggcatcggttgagtagtggtgtgatactgtggttggtttagtggacgctctcgtgcaccgtttcgtttacgtccgttctcttgtagttgacgttgaccatgatgacttctacttcaacttcaacgaaaaagactcaccgtttttgtttttcacgaagaaaacttctctctgttttccatctgtcacgacgtttacgtcctaacttcccttgaaatcttttttttttttatctaatacagtagtcaatgttttttctatatactttttgtttgattcaaattttacatataaatatttgaaaatggtgaattttgtttttcaaatttcctaagctaagcctatttattaacgtggtagtatgaaaacaagaaacaagttgataaaacaaatgattattgtcgacatcttaatagttggttaaaattaatatttcggaaagccgtcctttttaataaatgagataattctagcaaaattttctactttaatcattgattgtggcattatgttgtttaaaagtattatataatacgcataacactaatgtacccacttcttgttctttgagtgacaatgtacattacttctggcattatcgaatatgaatgtttgtagctaaaacttaaaagaagttcccttgtgctaaacttgtcgatgatgaattaggatttacaagaaaaatatatggatggttataaatattaaacaaattatataaaaatatataacaataaaatcattcgtcggaattcaaaatcgtgatttctcccatggagataaaacaatgcgtaattgcgtataatcacatcagggtaaatactcacacaactaagctcgaaaacacaagctgagaaagaaaagaatcaataaagagaaagacatagtggctgcagcatttaacttctgagttgattaagttctccgtagtctgcagctccaagcaaatcatcttcacggcaacagccaaaaacagctcattattatgaaaatggtgcatgcagcatttaatttgagttcacagttgcaagtatcataaacataaagaccaataaaatcagtagagggagagcgcgttccagcttctcttggcgatgacgacggatagcattaggacaaagtggccgcatattagaaggtcctggtctggcagcattgggatctctgttattcacaaaaggatcagggtttaggtaaggctgacgagcatgcaaaggacctgatctaggaggatcaggaaactgattgtgaggaggactactcatgacattactagaagttgacgcattggcaacaagttgtgaggttttaactttgcctcgtatgagagggtttcctccggctaatagacttgtccaaagccatactgttgttgcagcttgacttagcggcgctgatgctttaggagggtgtgctaagagaatattgtaccgtctcagactcaatttgtgaagagcattggaaaagtctctatctcctgaaattaacataatatttgaaggcgcaggattgtcaaatgcccaaaacaacatgtccactagaatcttcttgtcactcgcatctttcacccctgaaataacacatcgacacacacacaaaaaaaaaaggaaaacgaaacactttggttattaacactctttgatcaataacaacgatcgaggtagtcaaaatcaacagcaaaccaaacagtataaaaccctaaaacgatttcgattgagaagtgaaataatacaaccaatgattataaatgcctacaacgttagttgttaacaaaaaacaagaatgaaaagaaacataaggcatacatcaacgatcaacaacattcaagctcactagcagatctttattatcagaaaaaaaaaaacaaataaaaagaaaggaaaaagagagtagatctagatttagaaaaccataaaagggtttaaggaattcaccggccgggacatggtggagctcgattccggtggaattaagagcatgttggatgacatgagggataccactcgtatcaccataagcggagattgagacccgaccacaatagttcattttcttaagcgccgaactaatattctgagcaatcccatgtgcatcaagacccttagggacttgacaattctctatatcccaccatactgaggtcttcgccatcacgtactgagcctcagccgtatccgccgttcccaaatcttctttccccgccgtattcatcgccgatcgcgaaaaggaatttttgttttgaaggactttctgttatcaacgaaaaccacttctttctcttcaatcttcttcaaaggaatctcaatctcctagttgacgaccaagactcctcactcgtcagtgtttccactttccacgatgaaactttattttattttacgtaaaaggttaaatatattacatcaactagtacttctttacagagaaatgtttgtttactaggcacagacaaaaaaaaaaaagggaatttgaaactcatcattagctcaacaagagctttctaagtgagcacgaagcaatgcttgttagcccgacgaaacttccttccgttttcttatcgagtaatttgtattatacttatgtcacacgaccttttcaaactcatttcttcattgcacattcaattttccacaaatttttacgagatattcatgttttttttggtatgtttgataaaatagtcaataaacgtaacagttgatcaatagggaatataaatattatactatttatctaataataaagaaaaaacaaatttctaagaaaatcatctataacaaatgtaataaattactcccacttgtttcaaatttaaatttattttagaaagatttcaattaccaccacttgttttagtttaaacaggatagtttagtggtcaaatcattactatcaacatcagaattctatgaacgatgtgttctttgttgtataaaaacaagttgaattattagatacgcttaacgatcaaatgtctatatcaaatgataagatccaaaattcggttagttttcgtatcattttgtaattttaattattttctttttccatttcttttataaaacaaatcaaattattaccgttacaacatcttcgtatttggctgaataatagtctgtaaaacagcatatttttcttaagatttgatatatttcgcacaaatttctaatccatagcttacttcaaaaaatattcagttactcccacttgtatttaatttaaatttaaaacaaaacaggagactttagtggtcaaatcataataagttccaatgtcagaattctatgaacactatgtttgttgttgtatgagaaaattatgtttccagtataaataaaagaacttcttaaacggtaacggctacgggttaacactaaggtgctccttctcctgcaggtccggtccgagcattcaacaatggttgcagagccttcacgacaatactcatgtttggtctgaaatcagcttcgtattgtacacacaatgcagcaacagcagctaactgcattatcaacaacaacgatgatcaaacacaaaacaattatatcaagactgtggttctatcttcaaggctggttacagtttataccttagcaacagcttttggagggtaatctcctcccagtcttgaatcaacacactgcttaaccttgtcttcgcttagctttggtgtagcctacagagttttgattgttataataagaattttgaaaaaagtacatgatgcaagattgttcatctttgaaagagatcagaaaaatttacccatgtgactagactttgctggcctcgaggcaatgtatgatcaacaggctttcgacctgtaagaagctcgagcagtacaactccgaaactgtatacgtcactcttggcactcaattgcccagtcattgcatatctagtaaagagaatacgagcatatgagagatcgaggattgaacaatggagaataagaagaaaagaaaaccaacttactcaggggcatggtaaccaaaggttccaagaacacgagttgaatgaaggcgtgctgccatatcaggagcttgatttgagagatcaaagtcagctatcttggctacatcgttatcaaagattagaacattgctggattttatgtcacggtggatgacatgtggatttgccttttcatgtaaatactcaagccctcttgctgctccaacagcaatcttcactcgttgatgccacgacaagagtggaccaggctttgctcccttcacaccttttctccctgagaaagcatagcatatgttaacatcaacaaaaccactctctaaacaaaaataaaacacaaagtcatttctaattgtaccgtgaagaatatcatgaagagatccattttgggcaaactcaaagacaagtatcctcgaattcccatcaacagagtaaccaagcagctcaacaaagttaacatgcttcaacctcgaaaccatggaaacctgaagattcattcccaaattcaacatgtaaagtgggaccataagtccataatccatcaacaaataacctatctatattaaccaaacctgtgctagaaactcttcattaggctgtttgttagaatctaactttttaatggctgcacgctgaccattctttaacaccccgtgatacactctcgcatacgagccttcaccgataagagaattagttccaaaatcattcgttgcttcaatcagttcatcagcgagaatagcagctacttctataggctgcactttcacactctgagcacctttttgtgcagtttcagagccgttgcgccttccatcatttccttcactcccaccatcaaagaaaacaaattagcagagattaataatttaagaacatgatgagagacagtaactgaaaattacctccagattgtttggtcatattgtgacctccataatcattagctccaggcaaatcatcttcacggcaacagccaaaacagctcattgaatctctgtatctgtagcattcaatttcgaaataacattgaggaataagaaaacacagagagaaacccctagtcacacccaaaactcgtaaagcgcgttatcatttgagaatctacggaaactaagctacgattacaaatcagagcaaacgaacaaactacgaaggaagcgaatccgaaaataatggagaagcttacactgatccaaaaaccaaacgaacgagagagagagagagagagagagagagagagagagagagagagagagagagagagagagagaggtttcgaagatctaagaaatcggtgaagagaggaagaaatccaagggacccactttagtccctggactgtgctctctctaatttgacttaaagtcaacgttccttaaccgcaataattagtgggcctaattaattgggtcgtaaaaataaagcctattataagtaaatttattatcggcccagtcgggttcgattattaattaaatatggcttttgtgaattaattagaaaatgcgtatcgttgcaattcttcaatgagtaacggacaaaccctaacctctgtaaaaagagcggttagagaaacgagaaccgccaaacgaacaaaaagtcgcaacctttcaaaaatatatataaagacaaggaagagcactgttttccctcacgccacacacattattctcttcctgaatccattacttttactccaaaatcattaacaatggactcaggaagtgcagtggacatcatttcgacgctttcagacttcctgctcgtcctgatcatttcgaacctttccttcaaggaggctttgagcaccagtcgcctttccacccgctggagacacatatgtcgcgaaacgagaaacatctctttcagagaggacgagatcgtgacattcgctgatgattccgttgctcgctattaccaaagggctgcattagttgcctatatggttggttgggttaacaattttaccggtggagttgttgaaagcttcgagcttcgtctctctaattcgtatgcttttgaagaaggggtcaccacactgatcgaattcgctgtctccaagaatgtcaagcatctttttcttgacctctcagaacctcgttgggttaccaataacgacgctgcacaattagaaccgggtttgatcaaattaccggagagtttttacaagattaccagtctcgtgacgttgaagttattcggttgccggtttgaaccatcgaggctcgcgaaaccgggtatggtgaaaaccatgttcttccgctggatccgtctcgagatgttatcggctttgatagcaaagacacctcttctcgagatcttgaacatcaaaaactgttgggagattggtcttgatgcgataaccggatataacgaccggttaatgaagttggttttcaagtattgttccttctccgcgcagcaaaccacactggacgtgcccaatattcagatcttcaagtactttgggaaagtctatcgctttgagttcgcgagtgcgaacaagttaatggaggaggcatatctggactaccgtgaagagagccgttacaacgtgagtgcaggagcaataatcagtggatttctctacagtatgttgtctgctaagacattcacaatctgtccgtatgtccttcaattgatccaagagtgtgaagacccggtgcgactgaaagcaccgatggagacaagacagttggttctgaagacaaattttgaacctaatgagtttgttggaatcagattcatgcttaacagttctccgtatctggagacactctcattccagatggtgggtcctcggcccatcgaagagatggtgcctcagatcgatccagaggcttattgggggcagaataccagtcatgaatgtttgaagaaaacacttaagaaagtggaggtgtggagcttttatggtggtacgcacgagttacgtgttctcgagtatctgattcgttatggtcgtatgttggagagggtggatctgtatcagccaattggattggatgatattcaactgcttccgatacgtgctgcagctgatagggtgggagagttcgaggctcgttcggagaatttggtcgttactttttactaagaaacctttaagggatctaaggatggataaatttgggtgtattacctatcttatgttgtttttcagttataaacttcaattgtggttcctggatttgtaatcacacatttgtatttcccttttaaaacttaataataaaaagtattaaaactttaattgtaattttattttttttccattactttattatgctaatatgtattaaaacttttatatttaacactgtgaaaaaaaaacaaaataaaaaaatatagtagaaatttttctgatgataaacacaatatttacacaacttactataccaataaaatttgctcaatcaaccctcttttgtaacattaaagaaataaattacttcaaacaaaatatttttaaaaattgcgtttagattatttcttacgattctaattccttttttaatgccaaataaagactaatttaattaagtcagaaatagatgaaatatagaaaaagcaaaaacaccatattatatcaaattaaattttgctcaaaaagctctctatcactctgacaaaaaaatgagagagtaaacatctaatcgcacactttactcataagccaaaataacatagagagagagagagagaattagttctttacgagaaaaggttagcacctcctttacgccaaaccccacgaaccggtaaaccaccggtctgattttggttactgttggaattactatccttagattcttgttcagactcgcgagtagaattgttaagatccagcaaggcagccattgatccatctccaagccgtactctgtgaaacttagaagttttcttacgttgctgtttgcttcctgtggaagaagaatccgttcctactacttgtgatttgcctttgtctgatctataggtattcttatcctttgatatcgcctcctcttcttcttcctgtggattctgagaagattgtaatctccttactgtgtccataaagttatctgctagtgtttctttagggtcaacaactttcacagcttttcctttgtttttctttgaactttgactctctttaggctgagaagagctctgcgcagcactccgaccattatcctttgaatcctcttctctcaaactggcattatgggtatcaatgagttccttctgcctcttagggtcaggacacagtctagcaagatcaataaccaagtgagacaatccataaccttgcacatactccaaataagtctttgcatcaatggaaccttgacgatactgtcctgatatattcctgaaggccacgaatacatcttcatcatgaccaagtgcagatcgcattttctcaatcaatgacttgttggcagattgtacatctggagggggttgagtgtttgacgatccctgtgtagtggttgatgatgttttacgattttgcacaacagcagaagaaactggaggaaaatctgaatgagaaggctgaagtgatcttgtatcagatagattaggggctgaggaagagtgaggaatcctatttgcattacgagcagcctgtggaactgcagaagccagaggtcgaggttgtgaaactctgttatgggacctagattggactgaagaactagaggcttgtacaggcgttcgacctatagctggccatcctgaagaagaatgattacctccacttgtaatagatgcttgtcctgggcctcgattaatcactggccatccttgagaaggactagcaatagcggaagcagtagaagttcgatttgtttggcgtcttagacgagcagccatggtgttagttggtaaactctctacgttctgtccagaactctgttgcccagaaagaggaggaaaagcagattctccaagacgtgaaccaccaccaccaaagcttcctacagcttgaagataccgtgaagagggttccatatctgtagttgatagagattccattggctgaataaggggatcagtatcatccacgtgtatgttgttgttttcagagaatccgggtggtgcacttgagggtggaggagcaggctcttgccgagaatactcagactcagataaacgaagagcggcatgaactgcaagattatattcttcatcaccaggctcgcgacgaaatgatcggggtcttcctcgacgattctcttgatcatttccacgactgtatcggaaacttgtcggtatctggagttgaatccaattgttaaacacaggcaatcaaactggaccataaattaacaatgacaacatgcaagaggtgttacatacctgtaatgcagcacttcgctgagaccgagacattttacctccatgctcaatagcgttatgcctctgaaaaaagaatagaaatcctcaacaaaagtctatggagtcaaactaaaaaaaaagatacaggagaaattctttaaaagtgtttactttcaactctgattcattctggaaaactgtgaacttcttagcaaggcaggagtcgtcttcacagaggaaatggtctctacggaaatgaatctgttgcatgaacatgtagaatcagaacagatgcagccacaatttaacctgtgctgtaatgaaagttgttgatgttacctctaagtcatcatagtttttgtaatattcatattgccctggctgtgacctatattggatattaaaatcaatgaagtcattcaggttacatactctcaacagtaagaattcataatataaattggcattacctttggcatagatgacaggtgtaatgctctgtagacatgtgagtatacaattcattatcaccatagaaaggattcctacagaattcacacataggatgtcctgcgaagcctcccctttcactctcacttccatcaacttcagagtcaccagtctgtatgtgttggttcagttgtgccctagtatacaacttttgttcacatatgaatatctgtccacagagagagagagacacacacacacacagatgtaaacaaatgtgcaaattttccgagaagataataacaaataagctgcagatatgaagctccaacctttcgcccttctagacataaaccacacatatgcaatttgtgcttatgatataaatgacccttcaactgttcgacgctcttaatccgctgacgatgatgtcttggtcctccttctctaggtttatcttccgtcttatcacaaacaccgcaagaaagtctacacatagctttgatcatcctgtactgatccaagtcatcaaagaaagcctgagtgtcttcatgataccagaaagctcctactcgaccttcccttggtgctgatgggaaggtggagaaatcattgatcgtccttgtataatcacccaatgcctgacaaaaaatttacacgaaatcccttatatatgcattcattgggggacataaaggagctaagatagataaagttcaaaacttcatcactattatgtaattgtaatagaagggcaattacaaaattctagctgaattatctatttgatgcaattgaagagcaaacagtgattaagaaaacgtgatcaccttggtgacaaaaacgataggagactcggtcttgcagatacagcagcgaggatcgtcgaggacgaatcggagacgaacgacgcatgtggagcaaacctctcggtgaccacaagatccataggcaacccattcgagattgtcagcgcagacggcacagctatcatccatgtctcttcctgaatttgagatcgagataaggaaattgtttcgaaacgacaacaatagagattgatgagcaagagagatctagggttctcgaaagagggctcgctaaataaaagggctagatgaagaagaatatcaaaggtctcctaatcatcaaggccagtcaaacaaatacataaataaattaatcgttgatactatttagttaaaaaagtgttgagaatcattcggggatgtagctcatatggtagagcgctcgctttgcatgcgagaggcacagggttcgattccctgcatctccatttttattttcttttttttataacttttggtgagcttaatggcccaatagactgctctgtgaaagcccaaaactaagcccaaataaaataagggtagtaacgtaattgagctaagaaaccctagaggtctccttcgcctacaaaatccccattttgataatcttcagcagccgttgcctcaaaagatgcagatcttcgtgaaaaccctaacggggaagaccataacccttgaggttgaatcatccgacaccatcgacaatgtgaaggcgaagatccaagacaaggaaggaatcccaccggaccagcagcgattgattttcgccgggaaacagcttgaagacggccgtaccctcgccgactacaacatccagaaggaatcgacgcttcatctcgtcctccgtctccgtggtggtgctaagaagaggaagaagaagacttacaccaagccgaagaagatcaagcacaagcataagaaggttaagctcgctgttcttcagttttacaaaatcgatggatctggaaaggttcagcgtttgaggaaggagtgccctaacgcaacctgtggagctgggactttcatggcgagtcattttgatcgccattactgtggtaagtgtggactcacctacgtttaccagaaagaaggagttgaagcttgatctgttgtagcggtagatcgatccttctctttctctcttatcttttaaaaactgcatttctatttgggaattttgtaagctctttaatttgagttatcatggattctatgttgaacatctttcgttctggattataaattatggaaggttttaggattttatggatattcattatgttgttcgttctatactttgatattcattggttgctacttcttgaatcatcctataacgtagttgtgagagcatttcaaatcatttgtttgcagatttatagatgatttgcaatggcaacgtagcggaatttatgatttgtcttgtattctttttagtcaagtgattaattctcgaataatattcgatctaggattttagttttgtgatgagtgattagtttctacgctttgattcttaaggctgctctcatgcgtagtagtagccttgtctttttggtttctaaacgtgttgctaatgatttttgaataagtttgatttatctttaaactgaagttgttcaaaaatagtttctgctgcatgaatttgtaaatcttattaagcgaagaacgaaagttagtctcgaaatgatgatacattcctagttttaaatggtcgtgttgaatggagttttatcttgatcaaaaaaataaagatgcaattttatcttgacaaagtggcgatcacttaatcttttctttttcgttattcatagacaactaacagtatgtatgtacacaaaactgtaatcgcatactgtgcacacaacaaacacacttaatacacaagtatatctcaaaagagttctctcagctgcgtaaaatctctaaatacaaaagcagccgtgggagagattattcgtcatcatcaattatataatcatcggttttcaccagaaaacacactagtttcagccatccaacagattcctcaagctacagaaagcttcaggcgaaagactaaaacaccttctcttctccaatggcaccaccggcttgtcccctctgtccattgtcatgaaacataccaccaccgcagttaaattatcaaatgagttccgccccagagcctccatcactagctctcgcgcacatcttgttggatcgttgtgccggtttaagccacgcctaacaatgctaaccgcttcttggctcgtcaagacatcccaaatcccatcgcacccaatcacaagaaactcatcgtcttcagttagagttatctgcttgatttctggttccgagatcagtggagattgagagccgtgtggcagttttaaatcccagtcgcccagagctcgggttacagctaggacttcatttaggtaaccgtcattagtgatgaaaccgccggattcctccactcttcttctctcaagtagattaatcggtttatggtcttcagacatgtctatcgctctgcctttcctgcatagaaccgctctgcagtctccggcatttgcaaccattaagagtctgcaaaagacaagaacataagtatcccatgagaaaatcacagttaaaccccaaagacaacaacagaaagagtaaccaaaagtataaaaccatagccaatattgctcatgtcacaggttatatacttacaatctagtatatgtaagagctctcttaagatcctaacaatagatttatttacctttgtgcacatcttcgtatatgcgcaagagatctcttaagattctaaagatagattgagaactaaacaaaactgaatgaaacacgtaccttccacaaataagagcagtcagagcggtggtaccacaagaatcgctgatactgcaatcctctgccaaagctagatcagcttgaagaaacgcatttctcaatgaagtctcaacttcttccacataaacactactcacttccgatgtctgtggaaactgctcatcttcaaagaaaaacctaatggcattttcccgtacgtatgctgctgcttctggtcctccatgcccgtcaaaaacctaagcagaggaaagtcaagtcagaatgtatacttaaaagagcatcagattataaggaagcaacgatacataccgcatagaaagcactaggcttcggcaactcaaaaagggaaccaacttgagaagataaatcgtctatgcgaatgtgttcatcttccatgtttctctttggcccaatatcagcaaagcttccagaccggatggtcggaatataatccaagacactaggatcgcaatcaccctctggaaagatatcagcctgctaaataaaaggtatacacggatgctcaattgagtatagcaacaaataaaacacaagcagtgaagacaagacagttaacaacacacaataactacaaagggcttctccaacagctttaaagttgcttcattaaggcaaagttatagacaacaagcatctatatttgctacgacacgcaaacacacatgaactagaggtcctctaagcctaagagatccaaggatatgtttgcaaaatatttacaataaagtcatcttatttgatgattcctaatagactaaaaccaataattcagtcgaatttctaattacgtttcagaacccagcttcttaaattctcacccagaaaataaaaatgtaaactttaaacaagacttaccacaggagaagtcgttaaacttccggaaaccgacgccgttgactgagtaaaacccaatttcggagaagaaacgggagatttaacggcggaggaaactccgtcaaacaactcaatctccagaaccgccggtaaactctgttgaaacacaacctctgcttctgctaccatcagtctctttctcttttcacaatcaatttcaatttcacttcaacaaaatcgatcctttaattccaagaaactcaaattctttatctctgattttctttttttttctctctcaaattcgtcacttgtgttcaacgaaaattaacaactatcgaagttcgcgtgtgaatttattcctctcgtggacgaaatttctgagccgcgtgggctttttctctctgattatatataagaagaaaaagactcgattatgggtgactgggtaaccggtaaaattcagttgacacgtggccatcatctgtggcgagtcggttgcttatgtagattatgatctctgtttagtttgtggattacacacggctaagactaagccctaattatgacacgtgtcattcgagctttgacgcgcgtaccctcgaacgacgtcggattctgaaccactcctttttaaacttttaccaacttccgaggactttctttggaaataacggggatatttctgtaataggattaaatgtttaggggtactttaggaagtacagaactttctcgaccagaatctctaaaggtttgtccgtgtacacacctgcaagtgacgatctttaatcacacaatggcgttgcatctagatgaatctggaccgttaaaatcaccaggatgaacttgcctcccaaggtttaactatctgtcatgccaggtcagcagtcttttctttctttttaatttttgtcacgaataatagtttagtggtatcaagctttacacattgcgtagatcaacaagttaagtgctctctatgatccaaagccattacctaatttattattttatgtggttgttttttccttctcaatttgactattggaaaaattaattaaaatatctaaactgacatagtaatccaaatttaagaattaccacacgttttatttattacttaaaaattttgtcctaagcaatatgagtaagtttaacatttcgaaaatataataagacatgttatttgtatagagtaggtgcaaaaccattctttataaaaaaactgtctattaaggcggtaatacactttgttatcatattaagaatgtatgatctaatttaacctaaatactaatttaaaagttaaaaattatcacattttttatatattacccaaaaatatttgtcttactatgtaagacattcaactaaataatgtttctttagacgaaaccaagatgctcaagatctaatgcgttgctaaaattttgaaacttgttcgtgtaaagtctaatataaaactagtgttatggtatcttaccaataaaaattaacaactactagtacttattagcatatatatgtatgactcagcataatgttgctggtgttatagtattaatatattatgattagggttaatataatatgacacacgatttgctgatgatcatcaatgaggagacacgcatttaatggatcataatttcgaggaaagccataaatctttaaactgtctgaaagtattaagcccattggattcagtaaggttttcttccttgttggattttaagggaatagttggccttaagatttcgactataatattaataagaaaaaggtgcaacttttagcccttttttgtatttaaattctgcgaaggatctttaaaacattatattagtcaaactagaatggttttaatcaggttaagttactgtacctacgcgtggaaaaatggtcaatgagaatgtcttaatctaatctctgatccgacaataaaaatcgagacgcaacaaacacagtttaagacaaccacataaccaaaaggcaaaagccactaacttttcttgttgttctttattttcatgtttccgttagattttttctctcgaactttcttttatcgtgaacgtctatattataagctgatgtttcatggctttattattacatagtataatgttttaccgacatttgacatggtatttagagagattttacaatgattctaaatcaagaacagaaatgcaaacataattttaaacataggtaaaaagaaaaaaaaaactcaagaatgcataagatacaacatcaattaattaactaattttaaacataatctcctccggttttatcaagcctccatcatcggtaaactcatttcgacgatgatgatgggtttaaaggactcggctttggactattttggcctttcccggagagccttggactcatctcacctcttaaatcaatcactctaggactaaacacttgagagagattccgattataaaccggtgttgaagtcgaactagtaactttaggactacatgtgtgtctaaactctcctctgcttcttgtaataaactcatcaagaatctcagaatcacatggatacgaagcagttgatcccatctcagcttcctgcaaaatccaaaatcggttaataagatttttcaagaagctaaaaaagtggattttgattcgaattagtaatggagtcgtttaccggtactgcgagatggaacggtaaagcgggtgcttcttcgtactctgctgcgtctaagtcctgaagatgagcacttttgaagaatcttgggaggatatattgccttacgggtatcagaaacatgatcagtagagggaacataactccagcgattggtatccacgtgagaccaaagcaagttaagagataagttgtttggaaaattgtgaacattgcgatcgttttgaatggaacggtttccacgaatgtcgcgtggttatcttcaaggaccctgcaaatttgttgagtaattgagtaatgattcttgaaagagtaaaagaagatgaaaatgattgagactttacttgaatcgacgactaggagctgtgaagagaagtaagattctttcccagaattggtttccgggtaagctttcgattgccatgaaggcaaagtagccccaaaggactgatgtagggatcattttaaggagaggcatagctgcaacacaccctccaaccattactgcttgaagcaagttgcttactctctgttctttgacttcaattggcaataaatcatcaatctctttctcgatatcaaacagagtctcatcaactggagcatcgagatttcctgtgaatgttgttgcttggattgttgattctcttagctctttcagaccctacagaagagatagtttatccaccacttagccccaaaccaaattactttccattgaaaagttacacaggatattctttacctgaggctgttggtagactaatggagtctgcatttgattataaacatcttgcatgtttccatacaactgtcctagactcgcattctgcttgatgcttttgcgagcagttgcaactagtctgttccgaagcagctgtggaaagagcaaacaagaagcttaaatccaaggcctgaaggagaaaaagatcccaaaacaaaaaacgatgctggtaaggtacctgatattttagtgttgctaagctcttagtatgcattggtgattgagggatgactccatttgatggaggaattccaagtagaccacacattaaggtctgaaaatggcggagtaagtagtagatcaaggtcaagcaaaagaagaaattactagttcctgtagattcttaccagaaatccaagaagaagcagatcatagtggtaagaagatggttttctcaaattgaattctttctgctgcgcaagctgtgatgctacactatgatcgaagtagtaaagaactgcaatcattgttgctggaatgaatgctccaattatgtagacaattggaacttgaagcatctcctgagaaatcaaagtcactgttcattagtcatatgttcttgttggggtgtgtttgaatttcaagataaagacacacctttacaacagtccaattctcataagcaccaggggaccaaggatttgggctaaaaagtcgccgaggaattccttttggaacatctcctgttgggatgtaggagacaccggtccacaccagaaccatgagtggcacaccatagtcagctactaaacttctaagccagcctggtccaagaataatgttttttttaaaaggaattaagttcttccataacaaggaatatttgactgagatctccccacttgtaagcaatgactgcttaattgattattgatttctctcaagatccatagaataaggagattccagatcatgagaattaaagaaaagttgactaagtgcctcgttacctgttccatatctccatgatcttgcttttctgcttctaagtgcagttatcagaagaccaaaggaaagaaccaaagcaaacatcccatttgcaaatctccaggaaggtaaaaactccacaagtttcagatcctctctcgcaggagcgcgaaattcatcgactaatccctggatatataatcaaagcattagaggcaatcaaaatacaatttattggtaccttaaaaaattgcaaattcttttactttgatggcttgttgcatgaagagcatagctataagaaggccaaacaattctccagctactctggtgaatctgttgataaatgaacaagctccacatatagccaacacaaacagtatcaacgaagtccagacacaaaccctacacatatttaacaagattttaacaccttattcctcacattttaacaagattaacaatcaagttaggagaaaacattaccatccagaccaagccaagaataaattgcgtcccagttcaggtctccctttagcaaagttaaacatgaatgtgtacataataacagttggctctgcaactccgagtataagcagaggctggcctccgatgatcgagtgaatgattccacaaatggctgtagaggccagtgtctgaacagcggtaagaactccatctacaaaattacagaatcttattcaagttgcgatcttttgctactaacattcacaaagctgataactttttttcttttcagaggagaagattaaataccagtgcttcgttccaactgttcgccgaatgaaataacaggaatcgcagacgcgaagaatatgtatgtggtaggagccagaatcctacagaaatgagaagtcatataggtgaaaaattcattaaaacatataaattttgaaaaaaagtaaacaaattgagtacctaaacccagctttgattcctccggtccaatcttgtttgtagcacattaaccttcctttaagatcattcttgataccttcaaacggaacaaaagtctcttccatggtggcttctctctgtaaattactctgtttttaagttactctgtttttcgttttctatcagacaaatcgtcgaacacttggagagcttctttggttagacactcgcgaagaagagttagaagatgagtttaaacccgatatgagggagacacgaaaaggagactacttgaaacccatattagagaacattctcaatactacaagtttaggggatagaagaaaaatgcacaaaaatccagacaataagagctaaaagcaaaaaaccaaatattaaggagctcgtaataacaatgaatctcgttgaagaagattgggaatgattcatggaacaaatttacatgattttttttgagaagtaataatggagaaaaaggggactgtgtattgtttggatgacaagaaagtgacgaagagtggtttcagctgtgcaaattgcaaagtatatgtctttggtggcaagaaagatgaagccgaagcatccctatatataatactaataatgacggacattattaacaaatcattaggaaggattaacgaagcgcgtcaagtttttcgacggtaagcttataaaaaaattactataatcatttataatgtagccagccaccaccgttacctttgacctttttattgtaaaaatcattattcatcacatagttacatgatttataatgagagaaaaactaaaaaattagagttatagattgtgtattcaaatctctatctttgaaaagtttagttcagtttacgttattaaaaatgtttctaagtaatgtccacattgttcccaagaaaagaaaaagaaaaaaccttcgatcgaagacgtccaatttttttttcaaaatttatactaaaagttatagtattattgagtaaaaatcaaatcttctacgtgaggaaacgacttaaacattcattacctgctttcttaaaaaggcaactgtacgatgttttgtgtaaaggcaaaaaaagaagaagaaaaaagggtcacttttggaaggggtggtggcgagataatatacatctaatccatacactgacgttgtaatagtaagaactcaacctaacaaatacgaacatcttttaataaacttgaataaagcagagtttgacctaattaaatgatccaatcaccattcgtttcattaccttctttttttgtcacttactttaggaattggattttaacacgttaagttgtccttccaacattctgctgcagattgtacttacaccgtgtattaactgcttcattataaaaatgtaaccaccatcaccatatatcttctacttacacaataaatataaactacatgttctttgttttaacatacgtaaatgtatgtatgaagagaggttgaaggccatgtgctctggacaactcatttcttagcattcgacgcaaccacaacatacaatattggaattcacagccatatatttcccaactacctttttctaataaacaatatcatgatgacatctaatttatttctagttcatgccacttgaagtttatgatgaaacctcttgaagtttctatggaaacatatcagaaatcatcattacatgcgttggtttgttttttttggttgtatgataagatacataacaagaattcttgaaaacactgcagccacttgaggctcttcatcacgagaaaccagcctattcgatttcatttagaattcgagttataactcatagctacgtaattattagaaagttattgactgacttgcgaatgaagatcatgtaaatacacgtacgcatttggtctgcacatgtgagtatgccttttgtagtccttgtttctttgtatatatagtggctttactttcttaaaaataaaaatgagtagacaatcacaatgaaagttattaggaaaaaaatgagtttgaatttgaatccaccgtctaattttgtttcattactattaagttactattttacgttaaaaaaaaaaacttaatttgaacttgtttttcctcgttagagaggtttattcaatcataagtctggattgatggttggacctaaataaaagcatgcttaaaaaagatatttctatcatttactcctaacgattgttactttaaaaccttttctatataaacaatgaatgtcactttctggtttatatgcttctcatcttaaataagtttttgtttaattttgtctctatacttaattcgagaaaaggtcaactactatgtgtatactccatagatatttcccggattaaattattgagatcgaggacgggacatgacgtaacatttagttatatatattacacgaattttgtttaaattatcatgtaaccgattaaccacaaatcacacgcctacgagtctatgacattgagttcgattttgtctctatacgacacgatgaaaaaggcagtcaacgactcatttatatgaagtattatatcgcctgcctatgacgttgagttctttatacatcttaacggggcgtaattgtttcagtggattggttacttgtaaaaattttaaaatatcaattaatcaagtgaatacttatttgggacaggtttaactgtttaagagttgttatatgtttgacaataatcgaagactgtgactaaccaagtaatcggtgctctattaatttgtattttagccatgcatctaatttgacatcgagactcttttcaccggtctggtacagtttgtcgagccaagtgagggtaacacactctatacactgctctaacagcaaaactgcttatttgtttttaatagtttgatcaactttcatattaattattcatctagattttgtaaaagttgtccaccaaactcacacatatcaattcttttttgagtattgtctagttttttttttttttttgaatgaatagtatcgtctaatttattcaacactacagtgtacatattatttgctacattattaaagattcaatcatgcatttcactcatttcatgtcttttgttttttttcacaaagctaaaattttcatatttaaaatatatatgcttttatgatgatgtgcttaattattttcatctacccaatatattttatatagaagctgtgaggaatctttgctttcactttaaaattccattaatacgaggttcttgcatgttggaccatcatatataatactaccaagttaacttcaaatatgccaactttcgttttacacatacacaccatttacttttaggtacatatccgtattcaaattcaaaggaaattagtaccaaatttacaaatccaataatgatatatgttgtcgtcccatacgagattagtaaaccagatacaacgaacacaataataaatatacacttgatgtgtgttatgacatcacaatagtcgaacacaatttaactgtgcttggtgaatgtatgcaatgcagtcaaatattattccaacaataatgatgtctagctagggacgacttttttctattatgaacgagcgataataattgagagagaaacatgaaataaaatatgtgagaggtgaaagacaaaatagaaaaagtggttggtcattttctctcatcatttcgcatgtaaacactcgaatttcaatctgtaagaagatggagccaaaaacatggtgataatggctcaatatatagtttgacttgacacattcacttgatagcgtaaccattagtcattttagtaccatcaatagttggactgattagtgagattaatgaacggctaagatccttacatgtatataacacacattggtcgtttttttattttatttttctgattatatcgaaaacaaacactttattaaccaaaccagtcaaatagattgatttgttctagatctaccaaaaccggtcaagggaattttttgggtaagagtaccgattcgtcaaaacagcatcaacgacaaaccggttagcagcttcagtatagtgaaccccatcccatacaattgctttggttacatcacgacaaatagttgaaccgggttgaccacacgttgcttttcgatcatagttgttaggtcttcctccataaccgcaacaagccatcaacgggtccacaaatcctgaaacctcataaaccaaataaaccaatcaaaaccggttaactaattaaaataggacttttatagatgcggtcgatacgcaccgtatagtttgaaatcggcggagagtttatatttgatggagtaaatatcaacgtagacgagagtggcgtctttgaattgggatctcagttcgttgcagagactaaggagtcctttgttgaaggctttggcgacttcattgtgaacccggaaacaaccaatcgggtcaagatccgaatcgttatgcaggtgaatcgccaattcttttggtgcacagcccaatgggcctgtgttgtgtacccaaaactttctccctccgtataaatatacagtcttcagtacaacataccaaatcacaaatcagccgtattaggtatggtttaatagtcaactagaaagttttaaacaattgcccatttgccccaagaaagttggaaaatcaaatatgggtagagttttttagttttacttaaataatgtccctgaagtttttagttaccgatttaccaccctaataagtttatgaaaaaataagttttggggctaacagtttacgtatatgtaaaaataaaaaaaaattgtggaagaaatgaagtacctgtatggctttctttatctcaagaagcatggaaggaattttttcgacaacgggtgcataggttaaattcgaatcatatagagcaagtaaaagatcgttttgtccaatatcgatcatgtacaacgcgtttctaaatccattatcatcaataaggtctcttctacctatcaacaaggaaacatattttgtaagtaattaagacgagatatgtataaattgtttgggacaaaagtaattaccggaagagataagttcttgagaacggtttttgaaatggacgaattgacgaatttgaatggcaagagggaaggaaaagatcggaagagcggtggcgcccgagactgcgaaattgactcctcttttgaaatttggtgaaagtgaatccaaatatggactcaaatatgtcatctttaaatgttcacctgatcatatatcaaaaggtttaatcaaatatataacattacatgtacataaaacatatatttaaagaattgaaactcttgttgaaaaaaaagagaaagaattgggactcacagtagaagtcaacgatgagtcgaccgtcaccgagacgaccagtgcctctatggaagaaggtaatgccatgagggagtccgataggaagtccaactccagcaagaactcctccggtgtcggagttagagtcgccgaagtttatcaatataggtttcttgtttgacttgtaactagtttcagagttagagcaaaccaaaagagagagacataaaactaagaagaagcattgtagagaggaaacagtgtaatccatttcttttgaattcttgctactcagataattttaatcaagattcacgatctgaagcttttacatatagtaatgtctttggcttagaaagtcaaattttttgaatgtaagtcaataagtactattgcaagtcgcattatataaatctctaaataatctcaaagtaaaagcaatcaatcaacctatagatccgatcggccatgttctataaggattgtcagaacttgttgagctattaaaatactccgtacaacttatttgattaatatgggccaaatccgaaaataaatggaccttatcgaatattttgttcgaagtccaggcccactaatcgagtgcgaaaaaacaaaaacaaatgcggtgagcgtggatcgaacacgcgaccttcagatcttcagtctgacgctctcccaactgagctatccccgctacttgttatcgaagctaaaataataaaataaatacaaatatttgtaaaagcgagaatttgtgattttttttggcaataagtagagaatagttgtgttccacgattcctcctctcacgttcgaagaccatttcttgttctttggacgaccatcggcgacagtgttaagtctagagtcttcttcttcttcggcgtagttttttccccggtaagtctccgttcatcgccgaatctgtatccctctttctctttttgtttacttgatcgtctctttcgattatgtatatcgcgatcggagtccgtcatctccagatctgtgtgtatgcgcttaatttcgttatggatgtgacatgatttcttgtgattcgtttccttagggttgatagatctgtatcctgcatgatcgttatagatagtgatctagatttgtcttttttcagatcgaaatttagatctcttattgttaatcatgttgattttattgaaacttgctcatacgaatgagatccgagagcatttggaaacataggattgctttgcgttgtaattgttttctcaagtgatggatattgaatctatgtgattgatgcaaaatgagttccagagaatttataatcctaggattgcatgataacttctttgctttgtgattgttttctaaagtatttattccatatgaatgctgcaattgagtatgcgtttagactgaaggtgttatttgaaaactctgaaacaggcttgaaaaatgggtctatccttcggaaagttgttcagcaagctctttgcaaagaaagagatgcgtatcctcatggtgggtctcgatgcagctggtaagactacgatcttgtacaagctcaagcttggagagatcgtgactacgattccaaccattggtgagtttctaactttgcatactctttctttcatctaattattattcatctctaaacttagtatgtgaaattgacacattgttatgcaatcatctcaagggcttaggttgaatttttcgtatcatggttggattcctagattagattggaacttgaatatatagttgcaagttttttcatttggtttgcatgcggtgtacttctacttgctcaagggcattcatctttgattcatggtttgtgtatgattcatagaatgagtgcttgaattttttagatctgtcgtattgacaatacctgttcttgctaggtttcaatgtggagactgtggaatacaagaacattagctttaccgtgtgggatgtcgggggtcaagacaaggtattgtgattacagtcctttaccagcattcgacaattactatagctaaatccttgattctccatgagctgtcctattttactgaatggcactttcactattccaatataaccttttttgtttgcttgctcatccagattcgtccattgtggaggcactacttccagaacactcagggacttatctttgtggtggacagcaatgatcgtgaccgtgttgtggaagccagagatgagcttcacagaatgttgaacgaagtaaaactcaaacaaaaatctccttctctaatgttacattatgaagcagttggcatcattttgtttcctttttgactgttgcaggatgagttgagagatgctgtgcttctcgtttttgctaacaagcaagatcttccaaatgcgatgaacgccgctgagataaccgataagcttggacttcactctctccgtcaacgacactggtgagccaaagaaaaccaaaccaaatctctttatttaccagatacctatatcgtaacatgaaaagctgatgtaaatcgttggtggggtttgttgaacaggtacatacagagcacatgtgctacctccggagaagggctttatgagggacttgactggctctctaacaacatcgcaaacaaggtatacaactttacaatttttgaaatcgtattagtaagaaattgattgttaaagacttactcaaatgtgtgattaacttgcaggcttaggagaacaacgtgtggtttggtttttaatcgaggagagtcttgtcttcttccttctatcttttgttctttcgtctcaaactcttatcatttcatactctttgttcttcgctctaataatttacaagtttttttttttgttgcttttatcctataattcagactcttataaaatggggcccaatttcggcggatattccaattttttttttttttttgccggcatccaatttctttaggcttctgcatttaccgaatatatttctttgagatggcccaaattcgtgagatgaacttgaaaaatgttggaacagaatccaaacagtattcaaacggtataactaagagaaatcaaaatcaacgtattttgattcctatatgtcatcaagtatactaataaaaaaaaaaactgaatttagaactaatccgcaaatctgattggatgggggcagcaccagtacaaagagctacagttcccgatttaatcataattaaatacgttgtaagaaaaatgaagaagaagttaattaatagtagatctccactacacttttaacaattacatacactcaaaatcttagcggcattttttctaaaggtttcccaaagaaggagagctcactttatctttcgtctctcttcttaggtctagggttctggtggagaagattgtggttgtttcttagggttttctgagagaaagcatgttgttaactacgggaagaaaggagaaactctctgtttctaaaggttctgaaattgaaatctcgtctcaagagtatgagtatggtagtggaaatgtctggtattgtgtcattctcgaagaaaatctagctaaatcgaagcggaagaagctctctgtccgtcacttggatcctctgctcaagtatgattattctcctccgttaatcaaaaccaccgtgcatcgtttcatgcgtccagttccgccgccggatccatttccagaggtcgattttgaggaaggtgacgtggttgacgctgcttataaaggtggttggtgttctggctcggtggttaaagttttgggaaatcggcgtttcttagtgtatcttagattccaacctgatgtcattgagcttctacgaaaggatctgcgtccccatttcgtttggaaagatgaagagtggtttcgatgcgagaaacaagtaagtgtctgagagttttctctttctcttcattgagtttgattcaacactaaatcatgttattttttgttgttgttgaagcaattgattgagtcagattttagtgctggaaagtctgttgaagtcagaaccaaggtagacaaattgggcgatgtttgggctccggctatggtcattaaggaggatgaggatgggacaatgttggtgaagttgaagactttgaaggaggaagaggttaattgcacaaagataagcgtttcttattccgaaatccgaccttcgccattgcctattggtttaagagattacaaattgatggaaaacgtggatgcgctagtagagtctggttggtgtcctggtgttgttagtaaagttcttgctgggaagagatacgcagtggatttggggccaaacagggagagtaaggagtttagccgcttgcagttaagaccttctatagagtggaaagatggaatttggcatagaaaagaaaaggtacttacttcgtgcttcttaaatgaaacaacaccattgtgtgtatttgttgtgttggatcctttgtgcatctttttggaaaacatacattgtaatctgatttttggttccaatttttaggtttcaggtagcgaggaaagttcgcatgcagttgaagaaacagctgcttcaacccgcataaggatcactgttcgaactgccttgaaagagaaaaaagctttgggtactggaatcaatgtgaggacgacacgctcttctagtggagctatgcataaccctcttcctgcctctttcaatggaggagatgttgcagaggctggtagagtatctgtcactgtgaatgaaacaccgctcttcgaaactgcagctgtgagttagatatttcctcccgtccctctctatctctagttgcacgctattttaacagtcttaagttttgaatcaacgagttaaggttataactttttcagtgaatgtaacttgcttgaagcaatcttgctccaatgacataaattattgggtaattagggttaactttgtgtgtttcctgcagcagttatctggagaactagggaatagtttggctgatgttgtgatgaatgagagcgctccagtcacaagccaaccggagatagcagcacgtaagtgttatatcattctttaccttcacaagtatgatggttatttttattggtagttgtttgtgtcccgaaatgaatctacatatttactgattctagcaaaagagtttcacccatcggtagtcctgggcgtagctgcagcagtcaaaacacaaggaaaaacaactccgaagaagaaacttcaagcgatgaagaatcaaaagagctctacaaatgattctgttggagagaaggtgagtgttaacaagaggaaaagaggacagccacgcaagttcatagtcgcagagcctaagcagaagattggtatggtgtcttaactttagtggataagtaaaccagcatttgtttctttgcaatcttgaaacattcttggcataataacatgtaggtgtgtctggtaataattcaaaggctgccactattgaacatgccgatatgactgatgatgataggcctctcgcttcatgggtccacactggaaattcatcatcgggtactgctggattaaatgctgacacatcttttacacagttggtgctcttttagctttcggttctcattgttttgcttttcaccttgttccacagggcaatctgtttctcggactcctgatatagggcttaatacagttgtggaaaagcatgtcgatattgtggaaactcccccagggagagagtcgacaatggttctgccatttgtaaagaagtcacagctttggaaagtccttgaatcaatggaggtcttcaaagtcgtgccacagagtccacatttcagccctctgctagagagcgaagaagagtgccgtgaaggagacgccattggtagaatggtgatgtttagttcgctgttagagaaagtcaacaatctacaagtcgacgatccaataagctcgattaacaggatcgacgagtgtttcctcaagcttgagaaacacgggttcaatgttacaacacctcgatctaggatagccaagatactgtccattaaagaaaggcagacatgcgcattggaggaattaaaagctgttgaggaaaagatcacagagaatgacaataaaagaaggaagtatgaagaagatattgttgaattgcagaggcaagaagtgttgatgaaggaagcaaaagtcacactagacaatgagatagctcggatgcagtctcaagcagctgttcttgaccaagaggttcagaatgtagatcacgaatttcaggcaattctcgctgccccatggaaataagcaagtcgttgatcaaacctttgtgtttaagaataattgagatctctgtacgttgttggtagaaaacataactttgactaatatatcaagtaatgtctctgttcgccttgcgtctcgtatctcttttctctttcagatttgtcaatcatgaatcatatatgaaaattataatcttccaaaattattattgctaattgtcataactcatagagaaagcctgaaagggaactcagtaataagaatcttcaaagctcttaaaagaaacaaccatttgggtcaaatgcaaatatttgtttcaacacaacagctccgaaaacgataattgctagaatcttatgatcaaataggtaactataattatgaaacaggcttcacggattggtcctcttgtccaagtagaatcagatgccgacatgagaggataagattctccttcatttccggttcttcttgctctcttccttctccctttctctcttcttataaagctt

SEQ ID NO: 1379 - DNA, 77720 bp, Arabidopsis thaliana
aagcttgagaaacacgggttcaatgttacaacacctcgatctaggatagccaagatactgtccattaaagaaaggcagacatgcgcattggaggaattaaaagctgttgaggaaaagatcacagagaatgacaataaaagaaggaagtatgaagaagatattgttgaattgcagaggcaagaagtgttgatgaaggaagcaaaagtcacactagacaatgagatagctcggatgcagtctcaagcagctgttcttgaccaagaggttcagaatgtagatcacgaatttcaggcaattctcgctgccccatggaaataagcaagtcgttgatcaaacctttgtgtttaagaataattgagatctctgtacgttgttggtagaaaacataactttgactaatatatcaagtaatgtctctgttcgccttgcgtctcgtatctcttttctctttcagatttgtcaatcatgaatcatatatgaaaattataatcttccaaaattattattgctaattgtcataactcatagagaaagcctgaaagggaactcagtaataagaatcttcaaagctcttaaaagaaacaaccatttgggtcaaatgcaaatatttgtttcaacacaacagctccgaaaacgataattgctagaatcttatgatcaaataggtaactataattatgaaacaggcttcacggattggtcctcttgtccaagtagaatcagatgccgacatgagaggataagattctccttcatttccggttcttcttgctctcttccttctccctttctctcttcttataaagcttctcgattacacgtttggcttcacagttgggaaagttcgaaagatcgtaataatgagaagcaacatcaactagcctatgaatccacatggcaaaagagagatttttttagaaaagaaaacctccgagagataataaccaaagaaaacaagaacacgaaatgcaagaacttaccattcaccacgaatgtctgtcacagttctgatgaaattccggctagtcaaaacatattcgttgtagattacccactccggtttgtgatccaagcaattggatggatgcaaatgaaccacctgccaatataaccatcagattagaacaaagagaaacattttaaatggaaacaacctaaactgaatttgttttgacatacttggttgtctttgacggtcaagtaatggccagtacgttctaagtgagccacttgcatgaaataaccggcaagcatggccttccttatgttgatgtagtagtcgcggctgttaaaatcagtgctgcacatcttcaggttgaatcttgacattatccggactagctgctgtctaacattgtctgcagatttcatcgctctattgttgatgaagttttcatagcaccaatttggatcctcatctgcgagaattcacattgatcaagttagttacagtcattacatttgtctaaagcaactataaaccaatgaggaagataaagggataatcacttactgttttgcttgaaagcgtggtagacattcaacaatgtgaggtgatctccctcaatgtgtccaaacctagctttagcttcatctgctgctttttgagcctctctaggccgaataaagcaattcggtactagagaaagaattggtaattataacagaagaggtccagggaagaggtcagcagatgcatagaggcgatgagactgataccatttgcttcatgagagagaataactgagaaactgcaactatttgcatcaacaattgcttaggacaccccctaaccatggatatgcagaatccacactagagacagctgatgacaacctaactctattacttaattctaaatgacaattatacacatgaacgataaaagatgagatctaatgcacattagaatatatgcagaatggaaactgccagcaagtttacgcctacccttaactacatacctaacccaaggtagcaaaaacaaaaagataaaggtaaagggcgtacctgatagcatagctgaaactgagagaatctcgtttgagcagttgaattcaggactgactatgagcatctttgccatctgtggatccaaggggaactcactcatgatctcacctgtctttgtcaagttaccatcatcatccagtgctcccaagtaattcaaaacttctaaggctcgcatcagtgtttcgggagcagggggatccataaaatcaaagtgcaccaagtcatcaatacccagttttttcaaggtcagaactgtatttgcaaggtttgatctcaatatttcaggatacgtctgcggctgcaagtcattattaaaactcttctctgtgtaaagcctgaagcattttccaggccgtgttctaccggcacgaccagatctctggtgagcacttgcctttgaaattggggacaccaacaaagactcaacacggattcgagggttatagactttttgcttagcaaaaccagggtcaatgacgtagacaatcccatctatggtgagagaagtctcagcaatgttagtggagacaacaatctttctcccaggaggaccaccttctgttacaggctctggagcaggatcaaatatcttctgctgcatcgcaggtggaagagtagaatacagtggcactactttaataggccccacttgatccccaagattaccaacctctttattgattttgcggcatgcatcttcaatctcctcctccccagttaagaaaacaagaatatcgccaggtggctcacacatgtgaatctggacaacagttctaatagcagcctcaagatagtccctctcaggctcctgagtgtaaaagatctcaactggatgaagcctaccaggaactttcatcagaggagcaccgctaaaataatcctgaaacttttcagcttctagagttgcactcatcacaactaacttaagatcaggtctatttttcaacacttctttcagaagaccaaacagcacatctgtggctagagtcctttcgtgggcctcatcaagaataatgactttgtatctctctagaagagggtccgccattgcttctctcaggagcataccatcagtcaagtacctggtcatagtgagtaacacatgattagatacaagtccacaaatacatcaattataaagatgagaagctaaaagaagagacaatgcttacttaagaaccgttctggggctactgcagtcctcgaaacggatgctgtaaccaacttcttccccaatagttacatccatctcttcagcaacacgacgggacacagacatggcagcaactctacgaggctgtgtgcatccaaccaaccacttcctacgcttatccgatgtttcagcatccacagcatctatcacaaactgtggaatctgtacaaataaacaaaattcagcattagcctttcattctctagacaaaagaaactctcctccatatacaatcattcccaagcctacatatcaaattccaaatatctgaatggaaaagatgaaaactttacctgagtagttttaccactaccggtttcaccaaccagaattagggtttgattgttgttcaacgttttgagaaactcctctttctgcagccagacaggtagagtcctccgtttctccagaatgtcataatatctctgtgaataaggcttcccgttccatttattgatcagactgttgattccgccgtcgggaagaccactggttttggcgttcttcgccggagcagacggatcgtccataacatcgaacagactaattttcctctttctctcagtacccatcacgatacttctcttacgaacaaattacggaggtaagagagataggacgaggaagcacaaggcaaggcctttagcaagaagcaagaacgatgatgaatgaaaattttatgaaagctagggttcggctgcgtgagttagaagaagagagaggcggcttaagtttaattataattttcaatttgaccccaaatctaaacaatatatactttagccccctcaaaatatttggaaaaggagccaagtgttagttatgttggctaatataggcttttgtaataagtataaagttgtcaggccggcccaatatctgaatatactgaaattatcgtcttaacacttcgaattcatattttactggaataatgagggtacatgatgaatccaagtgctcaagatatacttgcatctttataggtaaaagggaatttcaaaagccacatcatttggagaggaaaccgaagagtcgaaagttaaatgcatgtagtacagctgtcttgacctttaagattcatgaggcaaatattagtaatgtcataacgttagatttcaaaagccacatcatttggagaggaaaccgaagagtcgaaagttaaatgcatgtagtacagctgtcttgacctttaagattcatgaggcaaatattagtaatgtcataacgttagattttatcttcctgaataagttcttcatggcaacacataaaccattccatcaagtcttcaaaatgcaataatgcctaaactgaaacaaatcttctgtacacaatcagacagactaaaaaggtctaataacgattgtaggcttatccattgtctctgccgttggattccagtacccataattttaaatttttaaaagagcccaactgttccaggtttgtgggctaataatagatttgtaataggttttaaaatttcaggcccagcccaataattaacgagatgacaagccgaatatttgtaccttttatggactaaattattttggtgagaagattcaaccctttggtagccgggtaaagtaatgggggttgcgatttacgaatgtcgcgtgttgcaaagtgatgaagtttctaacaagtaacaatcccatacgggcataccttaccaaatattagaccttggggccaaaatgatttaagatggtgacaaaatcgtccattgaactgcaggcaattgacgagcaaaacaagacaaaacataggagagaccgaaacaaacaaaaaaacaaacagaggcatgactcaatacatagcttctctaatcaaattcccaactttgaaagccaagtaagcattcgctgctgcaagattgatctgatcctcggtaagactgtcattgtcccaatcttcatagatagggcttgttggtttccaaaacgagacccaatgactgaaatgaagtttgatctcgccacgaatctagctgagagaggcccacgacgaaggtccgatatcaacggcattcttgcaggtcaaaccacactcgctcttgagcattttcaaagccttgtttataccaacacctgtaaaggtgaaatctggaagattgaggaaattggtgagagaaacgggcagcttattaccttgtacataaggaagcgggattattaggcaattctggccatcactgagctcgagaatcacgagcttgctctccggtgggtattcgctatcgcctcctacaaccgatcgttctgtatccagaccgatgattttgttcgcgttttctttattacacagaaatgttctcacttcactggtaatgtctctgtcatttctagccactgtcactctgatgcgaccaccatatccagtttctacagtggatgtcgacatctctcaaaggtaaggagagaatgggatatatgtttaaaacttgggagatgcgtccgccattatataggcgtaaagggaataacaaaagtcgcacctttggagaagaaaacgaagagacaatacgacccttttaatgtcaccacaaagttctttcaagttccaaccaagctctgcattattaatgtcaccacaaagttctttcaagttccaaccaagctctgcatctttattgggaagcgcggaagtcgcaacttttggagaggaaaacgaagagtcaaaacataactaatgcacgtcagaacgagatttggggaaactttgaaattagtattaaacaaagttcttccgatcaagttttgagacgttagctcctggaaagcagagaactcttgcaaaccatggccagacagaatccattttgacagaagcaaaagagattcatatgcacaaatgaaacatatctcaaagaaaacaatatctttaaaggctaaactacgagtacaatcataatggttttatcactactcttaaacaagaaatctttagatatttaaaaacaaaagccaaaggatagtggtattcaacattactacatatgagagtgacgtaacagcaaggaaacaacccttagtttgctcattgtctccaagccacattgtgtacaacctaataagaattcagattacctacaacccttggtttgctcgttcgtcgtaacacatattcagcagagtcgcagaccctgaaattttcaaacaacttttttaggccacaaagtagggagagacaaagatgaactcttcaaaaatccacaatgtacacttcgatctgctactcaatcaaaaccataaactccaagaacagcacattactaactttcatcttcatagaggagaaacaacttaccaaacaagttctgactacagtcatctaataacgattgtaggcttttccatattcttcacgtctctggcgttggaacccaccataattgttgtcttgatgccttgaagaatagttatctccatgatttggatatcttcccttggaatccattggcatattgtttccaccatagggaggaggatttgaagagtagccatcatcaaactcagcataaggaggaaactgtctatagttaccataactcagaccagagttttgctgccgtgcttgctgttgacgtctctgagcatcgagttgaaggaagtcatcccattgtttagcattcataccccttagtccagccagtttcttcatgtaactctctctcagttcccggattgtctataaactcgcacaaattgatgtcagaagctgaaattcctcaacaggaattgcatttcactaggagattggggactatattacatatggagagatccactgccatccaatactatgagcaactaaaatgtaaaaaaacatgaaaccttcatagttggaactcctaggaattgcgatttctgaggtgatagaattcaatccagcctatactcggttttgaatctaagaaaaacacattcagtcactggatctcttacctcacgatgcttgttgttctcctcatcttcttccttatcgcgtttcttttcaagctccaatgcatccctcgtatattccaattctagttcttctaacgtttgtgggaaaggagggcgttcaaactgatgactcacctgaatatcgctggagccacccattctctcttgatcccatctttcagacctataaccactcacctcaggcttttgcctatcatacggtttatcccatccactataacgaggtctccctggagatttcgaatgtgtagaacgactccgagctctgtcactaccataagcttcataaaatgaataataatgttaactgcctgaccacgagactgaatgaaaggttacagctagagtaagatacgtgatctcaacttcattcagagaagatcgagcaaaagttcagtaaacatttatttacttcagaactgtacaaaatgcttgaacaaaaggacttacctttggctgcaaaataaagacaaggaatggacactttcggccaaaaaaagccggaaaacgaccaatcaacttccttaaagacaagactaaaatagaaaataaccaggtctctaaggtatcctatcctgtccctaccttgtggtgatcctcgaggaacgtttctctgattctcacgaacacgagtctcttcgcggaaacgattatccacaaacttatcttgccttccagagcgctctgggaaacttgacgaaccatgtgatggcagctgctgcctttgaggttcagagtttcgagcacgtgatggtccaacagaagttcgcctaggtgacctggatctgctcctgtgagaaacagaagaacttttcatctcaccatcctccttaaccttgtgaacagcatcaacacctttcctcaagatcaatctgtccttgccactaacaattatgaacttctcatccaatttaatcttgcagctggtctccctttcaatactttccataactttctcagtaaacaaaactctcacattattgtccctagctggtaccctttcaaagaattcttgagacttcctattggcaccaagtgtagatggacatccctaacataaagaacaaagagtaatgatgcaacaatcagatagacaaccaaatgatgcatatactacaaaaggagttagtttgaggattacctgagtaaaatgaccagactcgccacaaattttacagatcatctcttcctctttcctcttcttccaattcctctcagtagctttggatttagcctcccaaaccttagcttcacggctagtgaaatcagttggtacagagttgggatcaggaagttgctcttcttcttcatcacatctttcttcagaacgttgtttgacaggtttgtctttgtcttggatattgttgttggtcacagcacttgcaggaccagtatactccttgtagatttcactaaagtcatcatcaagctctggatctgatctagtgctttccatctgataaaaaaaaaaacacaaactttcaatttcaattttccacaaagacaatgattcaatccagagttcattcatccgtagaagactctatcactaagaattagaaaaattgtgaatttagaagaaagacaccagatttttccacaaaagacaaataacataattatgagaaaattcttcattagtcaatacgattaaatcaaaaaagttgccatctttcatagagataaacgaaatttaaaattagggtttatcctaccttgcgaggtgcgaatcaatggcgacccaaattctgggaaacgagaagaagaagattgctgaacgagacaaattagctattagggttcggtacctgtgtgtgtgaactgaaattttacagctcccaaaattcaatttttaatttcttcttttgaaccttcgtattctgtaaataacacatataccctcaactaaaaaccgtcgtcgttttgtaagttgtcacgttctttattaataaccggcgtcgttttacttatggtaatcagaatgagttgatctacaaaaaaaaaacatattattagaaatcttttatgcatgctctgaaatctcaaacgagttcttattattatacattgaagaagaggagtgaaaacaaaactttaaaattgtaagtaaaagccatttatcattaatctagagtagttaagaaaaaaaacaacaacattatatcgtattaaatctgccattagaaatgatgtttgctcactagattaaatctagatttgcaaagactgatgtttgctcactagaaatgtttctgttgaaaatcgggaaaacaccaatgtatctttgttcgctgccattgttgagggtcaaaagtcaaaaccgaggtcttgagatgcacagcatagtcatgaagacgttcgggaaattttatatttatcgttttgtatgttcctgtaactatatatgtctttcccaaatccaatgcaaatagcaatagaggcataaaatctacagagaaacaacaaacatatgttaatattcaaattatattatcaatttttttattttttttttaagtatatataaatttgctttcataaaatttgcaagtttgagacgaattaaacgtacgacatataacctggaccatgttgcatgcaactgcgttggataaactttccggtcctctcttgatttacacttgattcaattttttcccgacagctaaagtttaggttataatattagtgatgattaacgaaaacattgtcattacaatactttcaaacaaaaattgaggaaattagatttgttgaaatgattatatcacaggtacaaaaaaaaaaaggaagacaaaactaaaattcactgacgatatcgaaaacgtaaccaatttttgtaatccttgcatatgcaaagactcatgatagctagtcaaccaaattatgtacatgataattagtaccttaactcttggatgcagaccaaaccacaaggccctataactcgacataaggttaaagttgggcacactgttcttggatcatgaaaaatgtaagagcaaggagaacaactgatttgtgtgtcgatttcacctggatggtctcttgaaaaagtctctagaagaatagttagcgagttctcgtcatcatgagtccttgatccaacaacaatttttgggtttgatgggaaaggacaaaccagatgttttctaacgaaataggtggatttgatcatcgatctccattgtttcgataccgacttgaattgaattagagatctcactggaaggtgttggatgatctctcttttactaaatcctcgggtaggacggcaatcgttttagggtttcttcccctttttgccacctccagatttgcaataagggcttaggtttccttttagctttattcaattgttattacaaatttttcaatatttctttctcttactaatcaacagcatgtgaaattacattaataacccaaatgaataatatgtaaactttatcgatttaccccatgatgcgtaaataaagtattaatcgcttatgtgaccataaagaaaatgaaatcgaataatatcgcaaaggttcaaaattcaatataagataaacaattttaaaataacacattggcgtcgtccctagtatggacttacaaaaacacattcatatattgcctgcctcctatgctggaccatcgttcttcgcggtcccgaaaaagattgctttctatgtataaatatatatagtcacgaaaatttaagaatctaaaccgctttttatatatatttcagtaacaaaaaagttagatgattgagttgagggtgctttaccaactgatacaacgcttggtcacacatatctctttgttcttgcaatttcttagaaagcaagctaacctaattttcaccacttgcttttacacataactggttaagctctatatcttgatggcatatagatttcatgcatctcctgatttctccgctataaaaagtaatagtcgcacgtcccaaagtttcatgtttaggcagcaactacaacgacgctattaacctaacagtttctgctcgttcttgtctgagttttcctgaagaaatatcatgaagaaagattttttgtttatcgattagtttggttagggcgatagctatttgagttcggagtttcgcatctccatcgatgagtagccttcgacgacactcttcataccaatggcatgtgtgaatatggtgatcatcattagaagcattagggaaaggcagttctccaatgcttcgtttgataacagataatccattttcgatctctgaaatcgataatgaaatattcaccaatcatccatatcgtgaaaccgattttctccttaatgatctcatgatggaattgacaattgaaagatgcgatgatgtttttcatcggtggagcgaggcaaggacggaaatagtatgacattttatttatttatttatttattgagtatgacaacaaattttcaaattttgccaattgcaacttccaaacaatctttcttgatataattaataatttaaaaaggtagcctaaacctgcaatttatcagcttacataaaatccatgtaagtttatatttttttttttggggtcaaattatttgagatttttttattattgcattttattagttacaatcttagaagatatgtagcgatttaataactatttttaccttaggtttaattttaaccctttgtctcttctaaccattaattacgacaaaaataattttattaaccactaattattgttatttttttaatctaatccaaaaagatacaagatgtttgactcaattcaaacgttatgtttaatactgcttccaaacagcttgaagacggaacgaatctcaaatgttaattaacaaacatacatgagagtatcataatagacaataatagtccacacgtcattgtttttcataaaagtaaaaatcatttattagaggttaggttagaatttgaatttgttttactccttcattttcgtttttgggctttagaggaaaccacaagaataaaataaaaaccaaaaagaaaacgttaaaagtttaaaatagcaagcgacattgacacttgacagtgtattatatattttcaacgctgcagggtaatcatgaaatacaagtggtgaatatcttttttacaattatcatatatataagctcaagttatctttttccttaattaaatatatactgatccatcccatatccttttcgatccatgcatacattatgtaacataacattagtttggctttttccacatcaatatacccttttgaatccacctaattatgcttctctgttgaagggacaatcaatcagaaattaataaggtttaccgactttggctccatatggagaaaaaaacattaaaccctagctagaacgtatcattgctctcaaaatattgtacattgttcgagtttggatatatcaaacggttcaataagattaattagtgttttcatcctagatcatcaaacgggttactataaaataaaggaatagtatatctcaattaaacaagtatgattcctctcgttagaaaaaatacccatcaaaaatcaaatacatgtgtcatcttgaacatcatcacccttaatgatatgagaggtaaggatcctgacaattagaaaaaataaacctagctagctagctacataattatgcgattaactaatactcttccttaatgatatgagagggaacaacatcctgaagaaggccatgatctttgactaaaccagctccatccagcagatcccgagttcgactcttcttcacaacatgatcgtcatcatcatcatgattaattcctttttcttgcctgttaatgtactcggttccaaaagaagacggcgcttgttgttgttggttgttgtaatctaaaagctgaggagggagtgtagggaggccaatgtgggccctagaagctgagccattggatggagagctgccttctttgggcatgatgagtagtggacgaggatgagtatgttgaccttcgtaagtggtgattacactgcttggatcactgaatgatctctctactctcttcttcacgtcacaccaagttgttgtgcaacggtaataatttcttgcaaagggaaaaaaacacaaccccttaaaaatttgtaaacctcataatttttttaatctatcccaaaggaaatatatgagtgttaattaccttggaaaagggctgtctttgacaggtttttgaccgtattttctccacttataaccatcatctagatgaagaacctcactcctcgtgatgaatgacacttttggcaccttcttcttcgtctgctttctactcattttagtgaatttaaacctatataatcccaattttcagcaagcatatatagttgctacaatttggtttgcaaaacgaaaacaaaagctcaaactcaccgcttctttgtcttatgctgctgttcttctccatcttcttcttcttcgtcatctccattcacagcttcgctcgaggacgagttaggtgtggtcggaaaatgcatcaacggcgtatgggtgggtgtatgacgatgaacacccagtaaatccatgaaccctaccggatacctctccgccgataaatcgtggaaatcagacaagagtgggtaaacccttgtttgccctaaatcgtaaaacggcatcccaacaccaacattttccattatcaaaacacagagaaagagatcaaagagattttatggttagagaaaaagagagagagtgaggaatgaaacatggatgcctgctaaataaatgccttgaattggtgaccggctattgtacgtggcttaatgtgtttaaacagtaattaatctgcgtgtcgtttggacaagatacgttttcgtgtgttttatttttgaccgcttcagtagttaaccggtatgaccaagatatatgcttttgaattataattgtaaaatcctcagcgttggatcatgtgcagcccaatacttcaagtcattccactatactgtaccttctttaaatacaaaacatttttttttctcttcctctttaagtcaagagcttttctttctacttgtacttgtgaagttaaaaactcaaaagcttttgagatttatttaatcatagaaggttgaaacaacatcaaaccaacaaatttgatggagaaatcatagtcggcgaataccaaatcaccgttcttatactatcaaacgaaacttgattttggtcctctccaatccttcgaaagtgagcagcccttagaccaagcatccaacattttgcatctaatcgatcgatattaagaatattaaaagaaaacaaatgctcccatttttgagtagaatcttgtaaactccaaacgtctaattctgaacattgtctgtgtagcacatctgataagcacaaacgctcatttaggctccacatttgcactccacgagtgtaacgggtgtaacattccggtattgatacccatcgaaaattttgtgtgtgtagatcacaagctaatatctgtgaaggtaattctgaaaatattcgatatttccaagaagtaaatgttgtccaccaaaagagtgatccgtttgcgtaaaccggtgtttgttcattgcaaatttcgtgctcatctaaaacgtaccaaccggcgtctcgttgctttccattatcaagagatatagctttgatattgaaaccatcaaaatatccatgaggatgatttttttctgagtacatcaaaatcaccttgtatgattttgtaataatgtcttttccaaatccaacgcaaaatggccttatggtcacaaattctccttcaaatgaacaaaaatacatatattagaaaaattgtcaaatatccactctcccgtcgttggattgattaagtaaaggtacttaaaatcgtaggtcccaaccaagaccaatccgtcgcaagaccccaagacttggatagtttcgtgtcgagattggttgattggattatcaggaaaagtataagaactagaagaagaaagacatatttgtccgttattgtcatgatctcttttaaaagttttcaaaagcaaagttgttgagtcagaatttgatgacagttgatgaacaacaagaagtttcgtgttcggggtttgtaatccccatcgaacgagacgtttgtgggataaataggttgattcgatcatcaatctccattgtttcgacacggccttgaacttagcttggaagatattgaaagatctcttctaaaatatcatttgatgtaatgatagtctcacgattatttttgtctttctccattcttttgcaacgagatagttcccagttgagagttctatatcatcaatattatatacttaagaaaaaaaaaatatgtatctaatgatctaatcatcagttttcaactactggagattgaaaattaatgactttgaaaaaagtataaaattaatttatgtaaaattatgaaatatataaataaatcagctatatataatctttatctttaataaataccaaatacaaaataaaaaagaaaatgttaaagataaggattaaatattttgctctcacataatttttttttaagtactaatactttgatttatttgttaacagtttttaattgaaattaatgttttaaattttcatctataaaaaaatctaagagaaaccttttgatatctaacaattgtttctgttatgatatttgttgtaactaaataagatacaacatatatatatatatatagtagtgtaagtggagatttgttgataatttagttaatagaaaaaaataaataggaattctctcagatgtatttgaattttgtaccaactgtatcattaaaaattaaatctaaaaagtaatggtaaaaactgataacagcgtttttggaaatagtcatggagaaaaagattctaacacaattcacatttaaaaaagaagactaaattgaccgttaagagtgtttctctaaactttaaaatggattagaggagtttctgagttctgcaatgttttgaataaattccctctaacgatactatataacaaaaaacaaaaaaaagaagaccgaagatgaataaattcttcagaacgtcttctttctagcaacagcttttcgaggttctctcttggcagatgtagtgaacccgggagacgaaattccaaccgtggcttggtagatgtctttcaaccttttttttataagcatgtggattactagttgtggaaatgttccaaattacaaatgttacagtttggtaataaattattacctggggatgctgaggaatagagcaattgccgaaactccaataaccagtggcaatatagctgcaggtgtcacttcctgaagtcgatacaaatcaaaccacaatgagcaaacaagaataatggaaaaaatgtcgaagattatgtaagttatctatttacctgactctgatgatctgccacaatgctgtatcgaagtggaccaatatggatttgggcattggtctcgaaatcaacttcaataatctctgattctactttgtgggagatcaaaggacgactggatttaagctgcacaaggtgcttacctttgggtaagccttttacttggaagaagttggagagtggtagtggaaagacattctctatcttagatttatcaatggctgatttgatctccactagcagattcgagtttagatcttcgttttgttttccttcgacatggcatgtcaatatggtcgtttctggttgttcaaataccaaaaagtcgagcccattgatatcttcataaccaatctataagacaatacaatggtcaggtaaactctgttgaaattgcggatgatgagaatgaacattatatggacaaacagaaacaaacctgaagagaaaccgactctggagatgcacgttcaatttgattgttggctgaaccaattttcttcgacactttaattacatatgctgtatctggatgtaaccctctcagtcgataatttccattaatatcgcttgtagtctcctcatagtatcctttggagtcagagcgagcttcaattgcaacaccttcttgtggctggcccgatagaagagcgactctacccattgcactgcacaggaattgacaagatataatgttacagaaataaagaatgtaatctaagcccacacatatgtggacaaaaatcaaaatgtgctaatagtggaaatctatgagattgcaattgaaacttaaagtgaccaatgtagtatgtaactggtcattttgaattggtacaagtttcaaaaacagtgttttggtctaattttatttcaggagaactgaaaccttggtgtaatcatacttaaataagcaattttaggagtagaaagcaatttcttccaaaatctaatcaaggtaacagcttattttgacaaaagtaaaatcaggaacgaatagtgagaaaaaggatgatttagaaatagatcaaaacctgtaggcaacacgagtagcctcaaagacagcttcactggattccccagaattcagttctatagccagtgttgaaggtttgaaagaatattcctgagaaacacgatagataatcagaaaaaatttccttaatttcttttcggctactttaacgttttgagaaagccttcgaagaatgttcccaatgaaagctattggcatttctatttaagatcacagtcagtcaagctttgctaagaatgcaagggcgtatggattaattaccttaagaaggggacgcaagtagaaatttccagggaataagctatcaaacacaaagagtccaccagcgccagatatggaattatttctgtaaccatgatcgccacttaatgataacaacagtggaggtattgatgtctcagcattgtcctttgagtttacacgcacagagatctgaccaagcttctggcaggagaaggaatatggtcctaaccttttaatatggtagccaggctgcatgtgcaagccagattaggaacacattatttcaaaacaattgaatgtaagtgagaattttagtgtagccaaatgcatgagatttaacctacgattagaaaagcgaagaaaaacatcatctcaaggtcaatttacatgcacatgaaaaatatatcagtataatatacaccaacctttgaagcttcagtggcatatggtatatcgtcatacaaaggcccagcaacaaatgaaccagctgataaagtgcttgtttcaatagctatttcccctttcttaagtgaagaaataaggctgtcctttgccgcaaaaatcttaatattaacaccaggaagaggaggagagactgatccttgtatgtaaagaccaagccgaccagtaaatggagaaacagaagcttgacatccatcttttgacactacagcctattaaaataaacataaattaagcttgatattccattctagaatcttttgtggctagcaatacttctagttaatacttacatgaatctctttagggtaaaacaacatcttcttctctacattacccctgaaacagaacatagatattgctgagtaacttgaaaaagaataatagctccaataatattcttttggtgtttgattttgaaatacgaatttctcttctatgagttatgatacattcctaagaaaccgaactctaaacattagaagtctatttcaagctcccctgaaatcataaaagcaggtcatacctagaatcttgaggaacaaagctaatcttttcaccaagactagcccaggtgtagtactcataaacgccacttccatcagatgcaagtttggcagcaatagtgttgataacattccctttcttgtcttgaatgtcaacaatgaaattctcttgcaattccgactcaatagttgaactagactccacatttatcagacctttgaggaggtacttctctgctttcagatgaataggctgcagaaagaaacgcatagagatgctaaatgaaggacaagccaaagaatgctgaaacaaaagagagaagattacaaaataaaacctgtggatttgagacatctatctttattgaattgctcccaaaggacatgcatgagtcagaaagctgaagctcatgccctccaggtgactcaatgcatattttctgtgaacctttctgtagttaccacaaacgaagaaaaccattagttttgatagatgttaactctaaatagccaaaactcatggagaatccacctgacaaagaataccttgattttcaaactagtaggcgatccatcaggatgagcgattctagcgtccacctcatgagtggagataatattaatccagtaacctttctggacaaattcaatccctttgatatcctcagttccgacattcacatcaatggagctacggtcccagcaccaactgtcttcatcagatgcggcttccggtgaaatacttttcacctaacataatcaaccgtgactagaaattttagttaatgtacttagctagtaatgtgaatttttccgtctccttacagaagtacccaacaggagaaaaaagtttagaagaaactatagcagcccacctcaactctatattttccaggcaatatgtctgaaaatagaaattgactgctctcgtcggttaaaacaactgtcttcttgtcacgatcaccagcagctcccacaagcaccactgagacagaaggaccacatttctccttgcaagtaacagaaccatgcacattgactctggcctgcatcaacacccaaaaaaagtttaacagaaagaaaacatccagaacatgtggaagtatattggccatccaactcctatatatacaatgctacaaaaacatttccaagagagtagagtcattcaaagcgaatcacctgagagaattctatgttcaacaaaggacttttaacggcaacatcaacataagctggcaaaaacagaagctcagaagcaccctttggtgtagcagccaaagcagacagcctatattcgcctggtggaacctggaatatatatgatggaaatacaataaatagatgaaaaagaatgtgttacagagtaagaaataaagaactcagtcataaacagaaaagcaacgagatcccacataagccagaaacaactctccaaataagcaatgcctttttggtttctttgatgaaattaacttttgtctactgtatttacaagagatacatctccgcatcaacaaacctcaaagcagaaagctccggtctcatctgttagcttcatttgtggtttgacatttgtgggtccatgagtcaaagctacctagatttaaaatattagaacgttaaacatgagagacaagtaacaacatagaaacataactatgaacaagaatttacctttgctttgtgacgagaaccaaacattcgcaccacaccacagatatcataggatacagcattgatgtctggaagtgaagccatatttggtaaaacctaagcaaagaagtttaagtgattactttagtttgctgaacttcagtgaggtgaagccatatctggaacaattaatttagcacgcaagaaaaaaaataagtgagaccgataccatgaacttcttcagtttgtcgaacttgtaatgctccttgactgcatcaattgtatactggtttgaggtaacctacggaattaaaccaatattacgttacatcccctgctgtaaaaactattgatcacaacatgaagctataagattgaagggtggtgaaataaaaccagatggcacaaaatttatatatataataatacatatgctttgcttagtacataaccttcagaaatctagccatattctttactctagactctagaagcctcaaaaaattcactaggagaggttgagtaacaaccaatttagcaggcttacaactggaacaaggtatatggtataaatttaaattgaagatagcatttacgtatacctggtcaagcttgtaatagccttccttgtctgtgacagatcttagactaccatctactaagattttaacgccctcaactcccactgaattaccgtcaactacgcgacccccaatggagaatcctgttacctaaaggagcattcagttcaatatttagtggacagaacatgtaagcagagtccgattatagaaacacagagtggtataagagtttgcagttattcttgacctgaaatttttggggaacagtgacatgttgatgctctacagatacaggcataacaggaggtgaaacatcaaagaccgtattctcacccttataatgcggcaccaattcgtattttcctgagtaaatcaaagtgaccaaaaaacaggtcaatagaaatatagagctggaccatgcaaccagaattccaagcgtccttcttgaacttcaacatgcttaatagtcatttaacttatgttgtacaatacataattcatcaggctaaagcttaaggtaaaatgaatgctcaatgaattggttatggataagtaatgatttaccacaagggatggacttgaaactgaaaattccttctgcatcggatacagcatggcaaagagatttcctttctccagcagcgtcaccagatccttggggacaatctaccatggaaacatcatctgaatgcaaatatatatggacacccaggattggattcccctacaaaaggaaacaaaataatttctataaaaaaattaaaattaagaatagagacagacaagtgcatgatggataggaacccaatcaaaccaatgatattcagattctactcatgaaagcagaggaatgtagttggatttgaacatcggaagaaaaaagaaacagagcaatagagggattacctgagcaacaaccgaccccttaagatcataaccaaggacgaagaatatgtcatcaaccatgccatttgcaaatccaagttccacctacaggtaaacagagaacttgaactattagcatgcataattaacaaagttcaagccaaatatatagaaacggatacaatagtaaagaaccgagtagggaaagacatgtgaacttaaaatggaaaaggttggtctggagaattttatacaaaaaaagtaaaataaaaattaaatgcaaaatcaaaaagatctgagacctctgttgaaccgcgaacttcaacttgcagctctggatgggatgcacggatattgtatgttcctgcaaccaatcagacaggctcgtcatttgattataacaagatacctggaaactaggcacttgacatttgatattactctatgggaaaacttccaactacatacatgcaaggcaagaataacaaagtgatagaaaaatagaaaaagagacactgatgatgaaagcttactccttacctggaataatattcttgaataagtagctcccatctgacgatgtgagaacagaagcgacaggatcttctgatccatcagaagacaacaattcaacattgacatctgctgggcctccattcttaatcagacaactctccccaccaacagctcccaagactttaccggataatgtaaaactgcaatatacaaaagagtaaagcatgaaaattttaaacgaagaaagatgaccaaaccaccaattacaaagttgaaaaaagaaaaaagaggcaaacgcatagactaaaacgaaccccgtgaagtggaagttaatatcatcattgttgttgcaactagagtcgtcaacaacaacagttacctgcaacaccaaatttaatgtcataactagctacaagccggatgtttttttatcaagaaagattcttgatgcataatcctcagagaaaaaatggcaaacagattaaccttatctggattccatgaccatccgtcaggtccatttatcttgagaatgaatgagccctacgagaagaaagcatagaaatcacttgcagaataaatgcaacaccgattaaccccgaaaagggtatgatgaataccttgtcatatactgggatgaaatagtaaccatttggggcacactgtgtactgtcttttaccaatccatctactgtttgaagctcaaccttgtaatttgaaggggaacaaacaaacaaatcaatgaaacctcactcagaaaaagatagaaaaaaaaacagtcaactaattgaattcttactgtgatatgagaaaaatccagtttcccatcggatcctttccgagacctgaccaaagacgaactcgcctgcacgtttaataattcagcagcgttagttaataaatccagatccgatcgttcttactgctgctagttcgttaacccatgataatctccaaaaatcaaaacatcctccaactacactgaatctactttagaagcaaacacacacactagctagtaaaatcggtcaggaagcaatcagaacgatggataaaacgaatcgggaaagaaagaaaaaaaagagagataaacctcgacaaaaccaccgcagccttttatcgaatccgcggaaacaccgtagactgtagaaatcgctatgaggaaaacgatcagagaatgacaaatcttcctactggccgccattgtacccgacgtgaagctccagtgaaggagctaaaatggttgaacttaagaaaaagaagaatgattattgttcgtcaatggagcacggatccaagatatcggaccgatgactccgatctgtagatctccgttggttttatcaaggttctcttgactctttagggcttaatgggctttataaagcccactaaaaataatatttaattaaaaataatatttaattaaaaataattgttttttaattacagctgtcgtgatttgcttaccgtttgaagaagagtcaagtaatcgtcagtcaactgtagaaaccaaatttccggtagaaaaatcaaaatgcttcagctcgtggttgtagcgtggctcttgattttcacggcggagacggttgtacctcaccaggaatccggcgaatggagttgtgaatcggactcggagattcaggtcttagccgatttcagaccggggattatcaccctcgatggtcacaacgatgactggaaggacattgacggctccgagttcccgctccgacctgcacttgatccggactccgatcacgagtatgacgccgggaagatgacagtcaaggtaatgtgttgattcgaatcggattttgcattatcttattggcattacttgtagatgtataatattgatgaaatttcagatttgccaagatctatttggtgagtttgaccataggactagtgatgctgacctcattccgacatttggattcgattgataaatctggattttatggactttgagttcgatttccttcttaacatttgattggtagatctttgtaggcactacatgatggtcgagatatctactttcttctggagattgatggaaattacgcttatgataaagggtaagtgtgtcttttattatttgattataccctttctagacctctgcatgatccaagaaccggtgaccattcattacctgaagtagatagtaactgcgtacataacttcaaattgcaagtctatcattatttgtagtgaaccgcttgcttctttaaatccagtgaaaacaacaagtgtccttcagtggctctcatgttccaaattggtgatcaagctacttatcacaatgtaagtttctcatttggcttgagtattttgttcaactaaacaactgatgtcaaccttctggtccacaagatgggtggttgtaaagaagggacagactcatgtaccagcaaggcttgcagaggcttcgaggttgatattatgcatttctccattggaaatgctattccaggacggctttacggtggtaatccaatagacaacggggaaggaaatggaggtgacaggtgatttgtagtaaaatgtcgtttgttctgtctctctcctactttgttcttgtcttgtaccaatatagtgaatctagtttagctccttatctgaacctctgtttattttgttttattgaatgtctctgtgtgtttttcatatgaacagatttggtcatctggttgacatttatgcatggaatccacattgtcggtaccttgatggtcttggaccctcaggtaccttcttatatcagagggctatatcataactcaaaaagcttttaatgactgaaaaattccctatgacgatgttaaagaataaccaatttcaactaagaacagaaattacctttttatctgctttggttcatggaagcttagtaattgactatggtcttcaattatttaccaagtttgttaggttcttaaccctctaatgtgtttccccaagtataagtcgtccttaaattataaattgtgtgtattctaattggatgctagctactctagagtgatctctttctcgtgtgcaaattacaaatatgtgatcacatggatattctttttacaggaaatgattccagtgcacagaacgattggcatggagcgtggtggcacagcagcttcaccactctatcaggtcagccttacataccttcataatcagttccatgagttcccaatacagagatatataataatcgtgcttttaactggaaaaaataagaggtgtaatttagtcgcagtgtttataaccatatcgtagccataggcatctcctctagttacttggttttgaagtttttaacaggttatgtagaggaagacagcccttacacgccagatggcaagaaaggaacttactattttgagttttcaaggcccttgaggacaatggaccgtctccaacaggtcagtaaatcttctactcgatcgatgacgtttagttaccattggcccttccctaaaatttagtataatctccaggcattttttccctctatgaaatagtagttactcttaaaccaaatccacatgtgtcagacacttgtagttgtagaaacaacaaatctatccggtagaactgaaacctggtcaatatgagttatgtataaagaacatctgtttaagaaactaagagtcctagattggtgatatctacaggatgttcagttcacgcttggctcgccggccaaaatgtccgtcgcattctggtacccagtggacagcaaaccatggcatggatcaggacactacacgatcaactgcgattggacaccgctagatatctcctcggggtcttcttcgggtctcacggcttcaactgtcaagggctctagcgatggggccagcattacagccattttgttgtccatgatatctcttgtgttttcgggttttattgcatataggctatttagtcccaggaacgttccattcacacccatggaaaacaatctgtaggagaaatatggttattagtccctttggtctcattgctgatttggttccacgttgagagaggttcttcttttttggcttataggtaaaatgggttgatttgttgttgctttatgtggctgttgcaaccgtatcgatcgacttacagagattaattctagatcgcatagaaaattgaaagttggtcataaaaaaacgttcagtgcagcatgataaggaaaacattgaggcatggtcgtttaaagatgagataaatatcgagtattggccattgaggagactataataagtaaagaaatagaaagccaatatataaactcattaattgaagaaatagagaaacatacagtatttgtttaaagcattggacaatgaaactagaccgaagaacccaatttctccgtatacaaaacgttggtgcagtgatcatcggggacctgatctaaagtattattagctggatctcttccggtcgacctaaaataataagcagctagacagagcttccaaaagtttgcgtctaaacaattcgtgcttaagatattaactgaaaacatcttttcccacttcacactaggctcttcttgctgcaaactccatacgtccacactcggattttgtagcacatcagatacacataaactatcttttagactccataagtacacacttttgcagtatttggtgtaccaactcggtagtggcacataacgaaatgtttctgtgtgaagatcgatggctgccagctttattagttgattagtgtaaaaatcaacgtctggctttggcaaccaataaagcgatccatttgcaaagattgatcttttatcattgccaagttgaccgtaagaaatggggaaatatacgtatcttcgttcgccattttttaggtttaaggcttcggtcttgacaaaattacgatcgaataaatacatcaagattactttgtatgttcctgtaaccatgtctcttccaaatcccacattaattggcaaatcattcgaccaacctaaagaaaaaaaaatagacattaaagtactataacaactagtcaacgtctatactttttggtaattcttctatgcatataaattaatatagccctttataaaattgaaaagtacttaaatatatatatatacttaatttactttgtaatttatatttataatttttttattttttttgtgaaacaatttatttataatagatatattgtatattgtatattgtatataatcagcataaaaatctagaaataaaagtgtttcataccagtgcggcctgtatactctcgcaaaaactcgggagaaagaatccggagttttctcgttgcggggttaatcagataaatgtaaccgagatcgtagatgcagactattccgttgcaataccccattatttgaccaactgtatcataagtagaatatttgggatatggaactggagatgtgtaagaatgaataaagatgtttatgtggtcgtgatgatcttttgaataagtttccaaaaatagggttcttgaacaacgatcactagacatttccaatcgaagaacaaggagttttggatttgggtgtcggacaagacgtttcttggcgagataggtagattcgatcattaatctccattgcttcgacacggatttgaatcgggagagcgatttcaccggaagacgctcaagaatctcttcaacgttatcaacttcgcaagtgtttggatttcattatatatacatagatgtacgtatgttgtaattcttttcctttcaatagacgattcaggaaatattctctaatatttctttcagccctttgtattctcaaaactaaggaagagtcaatatacgataatgaatattttgggagaaaaagatccactagtaataaagtttgtcaacaaaaaggaaacgaaaaagagaataaacctacatacaatgaaagtaaaccaattataggaagaacatatatgtataaatatatcttcatatttggtaattgtaaaaacgatcatctaaatgaatattttcaaaaagattatcgttagctttacagtttacacgtgttagcaaaaaataaattggtatacatttgattatccggttaggtagggccatgtaaagatgactcttgtaattttgaaactaattattattttttcttttgtcaaataacacgtatcttttcagcttactacatatttcccctccttccagagtacgtgccgacttcatgttaatcttttttgagattcaatccataacagtacgtaaaatcaggactttaattaatatatatatatctatatatacatttttcagcaattttgtgaaataaatatatagttgagacttatttacaatagctgccactggattttaatgtttgtttttgataattaggaaaaaaatcttcaaattaaatatttgacatttaacaatcttccctaaatctctccacattaactacacgattagttactaaaataaaacttccaaaatatttaatatcatttatttactacaaaattatcatttttgatattgtttttctcgatgactataacaattcaattataatcgtcaaaccgcagagatatttgatagcatttaattattacaaaattacaaaatatttagacaataattcataaacatattataaataagattaacattaataaaataaatgtttttttatgggacgggttggcgggacgggtttgacaggacgttacttaataacaattgtaaactataaaataaaaatatttatagatagatacaatttgcaaacttttatgtatactaactttaaaaaataaattgtttccgcggtgtactgcgggttaaaatctagtatatatataaagcgtcaagggatttgaaagcgttctgatcgatccatgagatacttcaatcacgaaagagatgatgatgatgaaatcacggcttacttcaatcccgaggctcacatacatcggcgatctattctctctgtgtcgacaagagaactgcatcgtgtattaaaagagaaatagatgattaattttgtgttttttggtttttctttctcgaagaagaagaaggataaaagataattttgatttctcaagaagaagacgaagaagaagaagaagaagaagagagtacttataagcaaaagttcggtttcttcaaaatcacaaaaaaaaggtgctaaagattcactttgtttggtaatggtagattactagattttatatagatttctagccgttagaaggtttcaatgaaataaagtaaattttgttaacaaaaggaaattcatcacagaaatttccttttcttttgtaaggttgagtattttcctttttttatacctttttttatatatttgggggatgtaacttgagactgaagcaaccgctgaacatcctcaaaagatatcaaaggtggcagagacgtaacgggtttcttaaatgaaccacaaatgggaaacaagcattgactgtcagcaaaaaccctagtgtactgccacaaacccacgcttgatggttccctgagaaacccaactttcccggagacaaatctctaaatacacaaagagggatgaaaatatcaactccattcccagaggaggtcgctgacgcttatattatgtgcacgttgaggagttaatcgctaagaataagatgaagaatatcaactccattccttgaggaggtctttaagactatttgtttactaattattctaaatggtcgtatattctttttttgaccatcagatttgtttacatacacaattgtagacaatgaaccaagagatggtccaagtaactttatttagttattttcctaaacaatgaaccaagagattgacattcacgggaccagcgtgagtcacaggaaaacgaaaatttggttttgtattttcagttcagttgtcatagtggggttttccaaaatggttttggtttggttggttaaatcggatcgagcaatgcctacattaaacaaacttttgaacacgtaactggagctttgattagtttgtaactgtatttatcgtttatggagcaaatggaggtaaaggaagtggttccaagtatcaggaacaccagggagacaccaatggctgcaatcttggacagctcttgaacgccggttttcgggttttgttccgtaaatagaaggatgggcgtcaattctgtactgagataaaccgctaacgttcaagagggttaccggtgttctcatttgcttcagtacgtcctcaacaatggactttttgctcgagtaacttggtttgaaggtttggttcaacggcatgttggcttctctgcaatgacctcctgagttccattctcctccactgtccaaagatgcaataaagagatgataatggagacatatgatcggtctataaaaccacacgagagacaggacaatgacctgaaatgagaaggtgcagcgcttctaaagaaaacgcgagttttcttcggatcgacatttttgtcaacccatgatgaccaagtctgcaaagctttcttaaaagcggttgatacatcgagtttgggatgaatcaggtctccttcttggtagtagttgaccctgcaaacccaaactaatcaatcaatatcttggttccattcttcttctgaagttttaaagtgaaaaagtactgaccctgatttggttttgtaatgagaccaccaatgagctgtattgaacactaagatattagcacctttccatctggaagaggttcgatccatagcatcgattctaagtgtttctcttcgcttctttcctattcttgctctaccctcacgaaccaagaaatgagtaacatagaattccacagtgcatttataatcctagtcaagtacacaaacatgacattaacacaaccacacgcctgaaatacacttaatggtccattaagattaaagtcatattgtaccacgaaacggaagctataattccctttctctttggtgattcttcggttgtgcgtttcgtatactctcttgggatctttaacagcttgaaacaacaaacaaagcatagattcccattggttcctattaattgaatctccaacgaacactagcctcttgcctctaatcatttccagcatctttgtagcattgaacctaaactcacacataccacaatttccaattcaggaccatgaattgcattcctacttattcagagagattaagtgctcagtggaactatgaatcccacttatcatcatcagtcactatcaccaaccactactacttcaatagagagatcttcttaaaggcctacgaggaaaacaacaaaattagaaagaagaaattaaacctgggagcatgacaatcctgaggctcccatctccaattcatgtaattaagatccaatcttccattgctttgacaaccaaatccttcatcgataaaaggacaagacgcatttgtgtacaatggataatcactatcgtaaacccacttccctttcgtaacatcacattcttcgattctcttctctgtcttcttatcttcaccattgttgctcggaagttcaatcactttaatcgaagttaaattagcaatttccctaacttccttaaccaaactctcgccgctaatcttctgctcaaaaacagaaatttttgaagacccggaagtgttttcgggtgaattgaaatgggtagagatcagaatcggacttgcttgaggagaaactgaagaatcggaaatggcggcaatagggcttaaatcgatctggaagttagcttctggtgttgggtaaagagaagagttagatttgagtaaggaagaggagaagaaagtgaagaaaacaatggcggaagagattattgtgatgatgaatgctaagactcttgtggacttcacagagaaacttctttgtctctccatcttctatctctttatttattttttctctgtaactgttataagttagttaagaaaaaacagtttcataattatctgtaatcagagaaatttgaaatcgaaaaatggaactgtttgagaaaaggattgaaattttggagtcgacaaaggtggttgaattagtggggtatagaggagagattcggtgaagaaatgataatgacgttcttacaaactcgtgagctcatgaattttacaataattaacggaacagagggaaagataatgattatttaaaaaagttcaggattaggaaattagtttagtgtgttgacagattggatttggcattattaacgtggtgggacacactcggggaacacgagcagcgaatggtttacttttttaaaaagcaaattccataaaatgcccattgaagaaataagagatcaggcccatgtttaaggcccaataagacacaaatggagtagagaagtgattatctgcttacgcaacttcttcaatcacccaccatttcgttttcgtcgtgagcttctgtctcgttcatctacacaatctgactcggtaaagtccatattcttcccttgatgataattgttgtttcctttatgattttgtggtgattttcgttatagataggtggcggattgtgaagttacgattaatttttatcagattcgaatccatttctcgttttttttcccgtgtagatcggtgtgcttaagatcggaatttctcgtttaaatcttccgttgatttagatttgatgctcttagtgttgtgatgctttgaaacgttaatccttttcttcgggagaaatgccaattttattttcagtatctggatcctgtggattagggttcttgtatcattttgggaataaattcaaagcctttgatatcttcctttgaatagagacgtagttaagaggttagacagaaaatggatcgaaattgtacatgtttatgtgtatatatagactccaagtgcaaaccagtagaaattaagagatcaggtagattagtgtgtgtgtgtgtatagatgttttattggttgtcaataaagttttcagctttaggaatcgtgagcattgtgaaagtatcaattatgttagtattgactctatgattaaaatgtgtgctaggttgagaagaaatggcaggacacaaggttgcgcatgccacattgaaaggcccgagtgttgtcaaggaattgattattggtttgacgcttggtttagctgctggtggtctctggaagatgcaccattggaatgagcagaggaaaactagaactttctatgatttgcttgagagaggtgagatcggtgttgtcgcctctgaagagtgaatgggaatgcctctctctcactctcaatgttgttggctcgatttttctgtttttatggtttcttgagatctcagataagttacctaagaaagttggttgcttgagaaataaacaaccactcagacatcaaaattggatatttgttaacacattgttttccggagatacagtggttgaaacttgagacatctgtcttgacttttccttaaacagtgtgtgatcattttattatacttaccagcttattttttctcatcttttttggataaaatacgcaacaggcacttgtatcttagaaaacggcttggatggctgcaaattttcaacatcgtactgcttcataaacgatatcaaatacgtggaacttaattgttggttaatagaggataagaaatggggttcacagaattaaattcacgcacacttcatatatcttgttccctcccaattatctgaactatcttcttttatcaaaaactatattcacaggctgccgtgtaccttctccatccaaagatggcaactatagctactggtcttaacattgcaacccagcgtgtcttcgtcaccagcgagaatcggccagtttgtctcgccggtccggtccatttgaacaattcgtggaatcttgggtcaagaacaactaaccggatgatgaaacttcagccgattaaagcagcaccggaaggagggatatcggacgtagtggagaaaagcattaaggaagctcaggagacttgtgcgggcgatcctgtgagtggagagtgtgtagctgcgtgggacgaggttgaagaacttagcgcagcagctagccatgctagagacaagaagaaggctgatggttcggaccctttggaggaatactgcaaagacaatcctgagaccaacgagtgccgtacttacgacaactgaagcgatcaagatcctgttccggattcatacgtatacgacaaatctttgttccggtccatttggtaatgtcaggttatataaatcatgtctttgaatctgaattagctctaaaaacatttgtaatttgtagttccataaacgaatacaaaagccaaaatttcataacaggtaatgcgcagcgaataataagaaagcttgaattcaataagaaacacattagacaccaattacatgagacacaagactagaggactgaggctacaaaaccatacaaagacacgaacaaattgaaattgcataaagattgcgttgtccattgacaacacaagactcaattcaccaatgacacactaattgttacaacaaggacagtaagtaaaacagaccaaagactcgaactcaatgcttcatttttgatccttcagatatgaatcatccatcttcagcaatcaaacatatcagcagaagctctgattggttgcattggacaaggcatctgccaagggttctgcatagattcaggaatctcaggaatatccaaagcctgaccactaatttcttcaaccatctcaagcacagagttcaatgatctcaacctatccgtcaactccgaagcctgtgccctcaagacattgttcttagactccatttcaatgtatttctttgaagcttcatcaacctgctcagtgattttagcgttatcattcttgagaagagtgacttcgttgatcaaatcaccaagttgcttctgtttcctcatccttgacctccgagcagattctctgttagagatcattctcttcctcttcctctcatccgtcaccgtggcgtacctcggatcattatcggattcaggacttgtttgcatttgcaacgaccccatttctcgttgactttttgacttcttctcaccaaaattaaaatcaatataatattattcttcttcttctagagatattttcctataaaaacctctcaaaaacacaatctgaaaatccccgatttctaaatctatcaaagaataagttagatcaaaaacgaaaactgagatcgagaacgattacttcatgagaaaacgtaggtgtagtagaggtaaacgacggagaaagagtgtagaattcgaatccgacgaaacaggattgagtagctcatagattcattcctaattttgtttttttttcaaaattcccaaaaaccaaaccctagatcaaaacaagcctctaagccaaatttccgatgagaaagaaaaaaacctagatctagatctagatctgagtgacagaagagaaggaaacgaatcaaagaaaggagatgaattatctgagaaacaagaattgtggctgaatcgagaagattgataaacgaaaaaaagcttatgataggatcaaaggccaaacgaaagaaggcgataaagtaacaccaagcttatccttttaaaggagaagatggtgatgagctgtcctaagcctttttctttatttttacaatattttaataaaggaagataattaacttttggtcataaatctttttattttgtttttttttaaaacgcaactgggggaaactgacgccagctgtgacgccgccagctggaattttataagggaagcacgttttgttgagggaagtttctccgtctgttcacggatggaatattccaccaagatgcctcctcagaaaatatcaaatattattgccaagtgttaattaactgaatattatatatttctgaatttgaaaatttcctcacgaaagcaacgtctaacacacaattcataagcgtaattataaaacgaccattaactataacgaaagtctaccagattgttgtttatatgcggctctctttggttaaaacttaaatgatgacgtgacgattacatcattttattgacacgattttaaattacaaaacacaagactgagttgggaagttggctcgtgggctttataatagccttaattcagctgatgggcttagctctcccttacacactcgaaaaatccagttagagataagaaaaacgccaagcttatgtcaacaaaagtttgatctttttaagattacttctctcacaatcttcacaaactagattctgagcttatgcaaagatttaagagtgtgatacaaaaacaaactcagttctctcatgtcaataaatgggatatgttaagattttgttcaagagggcttgatacgaagtttgcatttagatgaatttctcggtagcattaggagatccaacatgatctgaatctttgtgtcagctcttattattggcttaagctgaacttccaaaagctcaagacttggcaatttctctaacatgtgctttatttgcaccatttctccaacagttctcatgttgaggcaacaaacacttgtttgttcaaacaaacttgacctggactttgcatttggatgaagctctcggaagcattaggagatccgccaagatctgcagctttctgtcaatcttctttgtcttaacatgaatttccaacagcaccagacacagcaaattctccaagacatactctacttgctccatttcttcaatctctccaccgaactcagttatctttaggatctcaatagggcaggacaaaaggaaagaatacccatccaagcattcgcaaacagagttttcatccccatagccatgataatgcaaagcctgcaaaaagaccggaattttgagattgaagattttgtgagtttcaattcttttgtttgtccaatgaacttttggggtttttggtcacctcaatggtgagagtctttagatttggagatttttcaagaagaatacgcagatcatcccaacagatagcgtcatgagtactaactgataaatgaaacaggttctcaaacactgggactgcttccctgaagacccaaaacagctggaacagaattgaaaaaaaaaaaaaaactagtcagtcataacttcaataaacattctaatgtatagaaagattttttattttaatatctcagtggagagcacttacgtgcatcgtgtcaacagctcctaagcgcagaatctgaacatttttcaaccccttgatcagattcctaacattgtaggtatccccaatataaagagaaggaagttctagcttagcttccacaagggagttgagcttaacaactggatagctatctcggagagtatcaaagtatttaaagtattcaagactaggaatatccaaactgataggctcaaaactagagccatcatgaacccattctttacgccgaatagtaagtcgcttaaggatctgactagatactctgcgagaccatttccaatcttcacagttgtggccatctatgactaactcctcgagcacagggcaagcagaaataagctttgtaaacgaacaaccagcagtgttatcgaattcgaaccgaactgtatcaagaaggagagtcttaagagcaggaagccaagcattcttagggagaatgtcaataacaaaaccagaccctagtttcattttcacaacgctcttgcaagtgaagatctcagaaggcagtgagtaatctcctctgacattgatgtccagttcaagatccaagactccacactccaacacattgcgtaaacaatcattgacagttttatactgagcaaaattcaaagactgcaactttagagagaatctcctaatacggtgactggcaagtcgagctaacattattcgatcagcgaaatctttgaaacttgcactaatggcagacgccgaggaatcaacgaaaacagcaatcggtatgatggtaaccagattcagccagttcttggaggtatacttcaagcaagtagcttcttttgtcgaaagtaaggagatcacgcgatagataacaccatctggtaaattactgattctatccattcttttctcaaaccctaaagaaccctcttttcactacccagaaaaacctcaatttctaatggaaccttcagtgacttgacttcaacatcaaccaaaattcccaaactagatcaatttcaaaggctaagacgagcttacttcacatgtaggcatgaagcagaaacctagaaatcatcgcaatcgcgtttatgcagaaccaagaaaaccgaagcgtaatttgcagaaattggggtagacgagacactcaatccgatcaatttgagagatttctgaagcgaaattgaatcttcaatgagaaatggacgaagaagtagagcggagccgtagcattttcttgagagcagaggaaagaaatttgaatttttattatctattaattttgctcattttttatatactcggatacaaaaacaaaaccttttcgtttttgagccaatcattttgcgccacctgtagtccgccactccaaatttcggtttagtgtggggttgaattgtttagatttttgaattatttggtataagcataacaaaactaccaaattaaaattacatatattttcagtcgatttttcagattattctatttaattcagaataaaataaattattatttcaacgattttgaaggttcaatctaaattggacgtgtaattcctatagttgaatatgagaaaatgcgaagctgtttgtttgaaaatagattggaaaaaaaaaaaaaaaacgacaaacgttcttatatgtcaacaaaggtttgtacctaattttgttgaatcaatgaagatacttaataagtaaatctaggaaacgacctcgaatttgcacttggacgaagctctgggtagcctttccagatctgctatgagtttcagctttctttcaccagttgcttgagaatgaacttccactagctcgagacatgacaatttctccaagaaatgtttcatttgcatcaattctctaaagctaccatagtactcagttatctttaggacttccagaggacatgaaactaggaaagaatactctgacacgcactcgcaaaaaatatcgcctgcacaacgatagtaactctcgtagtgcaagggaccctgaaacaagacgcagaagacttgagattcaaggttctatatgagtatctaatgaacttttgtgtttgcaatatacatacgtcgatgttgagagtctttagatttggagctttcttgatcagcattggcatagaagaccaacagaagttagagagattaacggataaatgagacagcttttgaaacactgggagtgcttcacggaagacataaaacatctgaaacatatatataagaaaaccaaccaactacagtattagaaacataagaactacctagcaagattttgattcttatacgtcacctaatgttccaaaatgtaaaacattttttaaaaagtagttgtaaaaatttaaagatcgagtgaaaacaatagagtaaacttacctctgcagtcatgatagtgtacaagttaagagtctcgacattttttagcccatgaagcagatttattggattaaatcgtttttcatctcctttaccccacatataattttcttccggacaaagatagagcttagtctcaacaagggagtcgagattaacacttagatactctttaggaacataatcagagtaatataagtaggcaagactaggagtatcaaaactaatgctcttaaaatcagaatcatcaaaagcatcccactgtttacgcattatagtaagtctcttaaggctagaactagaaacagtgcgggaccatttccaaagttcccagttgacaccacacacggttagttcctcgagcacgggagacgaagcaagaagcgttttgaacgcacaacgaccaaactcgtagaacctaacgtgataaagagagagagtcttgagcgctggaagtagggcattctcagggagaaagtcaatagcaaacccagaccctagtgagagtttagtaactgtctcacaagtgaaaacttcaaaaggcagtgtatatccttgtttgccatgtacccacaaataaaaatccgcgaccccacgcttgagcacaacacgtagagaacggttgatttgatcaaactgagcaggctctgtatcttcaggctcagtatcttcatcaaactgagcagagtcagtatcttcatcaaaccaccatttcaaggacaatttgtttactcgagaactggctggaagagccattactctgtccacaaaatcagtaagactttctccatccttaaccgaactatcaaaatgaagatctggtacgatggtaaacagattatgccaacgcttagagagaacagtagtgaaagcagcctccctggccgagaggaaagaaccgatgtggcagataatctcgtctggaagattgctgatccgatccatactttagcaaaccctagagacttcccttgtaatcttcaaaaccctagcccgcttcaagtgaataaaaccagtaatctaggaaaatcctccgtgcgcaggaccacaatgcattatatggattaatccaatgtaaacgtgccacgcgtgtgacttgctttcgttttcctgcttgccattctaaaccgcgccacttgaaattttaattggtttgcctaaaccgaccactctaaccaaaattggatacgacagcgttttggtgtttggacattgttatcatttgagacttttgaagaaagaagaagcagatcgaaacaaattacaaccacggtgaactgaaacccttccgggcataaatcttgggtagttgggttaaatctttgcttcaccgggaaagtatcttagaaattatatctctggatgatgaagacgagatttctggattggtatttgaagatcgcgattggatcggctattatcggcggaggcatggaattcttcatgatcaagactggtttctgtaaattcccatcttttctattcttttctcgctttcaattttatgtgtgtttttctccataactcgtcaatcaatcaactagatcgaaaattgcttgacatggtttctgtgagcagtttaatttcactggattttggatagaaatgttatgcatttttggtttatggggacttttatgcttaatatcaaatctgatcttgtaagaatgcttattgatattgaagattcttactttccatcttttgatgaaattgtcttgcagacgacaaggttactgtaatagaagcagagagacgggcgttggaaaattctcctgaagctcaagccatcagagaagctcttaatccttggaggaacaaggacgcagaaacaagcaaaaccccataaatcattcaaggagctctttaattctcgtttaagttcatttcactctcaaaactttcgcaaatgctgcttcagtttcttactgcttgaaagttcaatatttcattttagtattttttgccaaatgctaagtgcagcatctcctgacccatgttaccaagataggagatgtttatatattaaggtcaaaccatcaaagattcttaagtcttgtgtatgtatatgttatatacgtctttcataacttgtgtcgcagaactgcacaagttatatatctcaaagaatacaagactagttttgaaattttgatcaactactatcactcatagtaggaaatgcttaggtttacattatacgcatatgtttatgtgtgtttgaaggttaaataagacctttgaaaactataaacccactattgtagcatgttacaatgatataacagataatgtgttgctgttcaggcaaatgttatagtacaaagagcagagacatgtttgagttttggacttgataagtaaccatacatgttgtgctgatgttataaaacagcttgtgttctctccattcgtatattggcttcctgatgcttctcaatggattctcattgagccattagaacctcaagtgttggctgcaatattaaccaagaaccatttacccattaaaaaggagttgaaatatccagttaagatccccaagtcatcaatcttccatgtttgaattcggttctagtcatcacgaagatcatctctgctgcagcaaacttgtcaagcaaaggagttttcaatcctttgtcaagcatctcctctgcacacgcctctctagacttcccttgacctataagccctctgatagaagttcttgtaaggacaactccgtttcgtgatcatctcgtcctacttgcatttcttcactttctcagagaaagtatgcttaaaaaatttcattagagtgcacaactgttattaatattatttttattacaaaaaaagcttgatgacagattctaaatgcatatcatcaaacctaaacgatcggatcatgtgataaatttagtttcatttcatcaacaacagcttccatgtttctatctagggcaaaacaatacgtcaatcactttgcagactctctatctacttcttcgggatgagtacttgttttaacacaacttcccaatttcatcatcattgtcgcattcagattcaatatcgtcatcactaccatcagaattcagaactaactagccctagagaaagtgtggcaatgaatcatacgagagacagatttgccaaataatattgttgggtaacaactagtgtaaccttcgaaatgatttgctaagaaaataacgattcacagatttgctaaataatattattacgagtgtgtttgatttggaagaaaatactagtaacaacagttgttgtgcgctcttataaaaaaattatgccttctaaaagagtttttaagttttaacgaaaggaagatgagaggtggatgtttttattacacagagacacacatttagaacaaaaggaagatgcatttagaacaaaaggaagatgagaggtcgatgtttttattacacagagacacagatttagaacaaaaggaagatgaaacgtggatgttttcattacacagagacacataaagcctttagacagagaacaaaaggacattagtatagaaaaacagagtcaatacaattctctgaatgattcgtgtttaattcattagactgaaattggcttttataagagccttacaacgtgaatacgaaaactaaggaataagaaacggaactgaaaaacgaaacaaactcaaaacaagaaaactcaatcagttcctaaaaacaagctaagacttgacttagtgattgacttattcaaaacccaacaaattcctccccttaaactgaaacgcacattggcatcagtttaatccttcaagcgccgaactccaagcatctctctaagcttctcgaactgatccagcttgattggcttagtcatgatatcagccacttgatcttctgttccacaaaacaacaatctcatagctccctcatttaccaagtcacgaagataatgatacctcacatcaatatgttttgttctcctatgcatgactggattctttgacaacttgattgcagaactgttgtcgcacataatgtcaatacactcacagctttcaacacccaattcctgcaagattcccttcagccaaacagaatgacacgccgaggaagttgctgcaacatactctgcttctgtagacgataaagtgacaatgtcctgtttgcgtgagctccaacatattgctgcaccattaagcaagaacacatacccagaagtgcttctcctgtcataccgatctcttgcataatcactgtctgtgaaacccaacaaattcaacaccgacgatctcttgtaaaagactccaaaatccagtgttccacttaagtatcttagtactctcttagcagccatcatatgttcttccttcgggtcagccaagaaacgagaaagcaaatacactacaaacatcaagtcaggacgagttaccgtaagatacattagggagccaacgagctgtttgtagagtgttgcatcagttccccggacgccttctctcaaaagttcagtacctgggacaatcggattcttgacagaattacagttccccatattgaacctctccaaaacttctttagcatacttcttttgagagatatgtatgccatcttcactttgatgaacctccactccaaggaagaacttcatcttccccatgtctgtcatctcaaactccttttgcattgatgccttaaactccacacacatcaactcatcatttcctgtgaataataagtcatcaacgtacaagctcaccatcaatatcttgctctcagatttcttaaaaaataaagtgtgatcatagctgcttttctgaaatccttctctcttgaaatagctctcaattcggctgaaccaagctctcggcgcctgcttcaagccgtaaagcgcttttctcagcttgtagactttgtcttcctcccctactctgacaaacccatcaggctgatcaacatacacctcctcttttaattctccatagagaaaagcactcttcacgtctagttgatacacactccaaccttgttgagctgcaactgccaagagacttctgatggtatcccatcttgcaacaggagcataaacctcagtgtagtccacaccttccctctgtgagtagccttttgcaactaatcgagccttgcatttttccacctttccttcctcattcagcttcgttttatagacccactttacgccaatttttttcgcttgcggtggcagctccacaagatccctagtgttattcttttcgatagattggatctccatttccatagcactctgccacttttcttcccttgcagcatcgtagtagtgatccggatcgtcattggagatatacagggcaaaataagacatatcttcttctgcctcttcctcccctatctccgcaccactcacaaaatcactcatccaggcaggctcctttctcacccttttagacgtttccccaagttcagacggagcagcaactctaggtgtcactgtctccactgcaacctcatcttgttcctctgcagtttcattatcggcagcaacatcagcttcttctacatctgtgtcttccccagcatcgacactattttctccatcttctccccaaacaaggacgtttggttctgaggtgctgagattccagtcccactttgcatcttcttcgaaaatgacgtctctgcttactgtgactttctttgtaacatgattgaaaaggcggtaagcttttgattcatcacttactccgagtagaatgcatctgtggctgcggttatcaagctttattcgtctctgttcaggaatatgaacatgaccaactgacccaaaaattctgaaataatcaacctttggtttgattcccgaccatttttcttcaggcaccatgtctttgactgaccttgtgaaacttcgatttaacacatgagcagtccacttagcagcttctggccaaaaagatctcggcatttccttctcagacagcaaacaacgaaccatattcatgattgttctgtttcttctctctgctactccgttttgttgtggcgtgtatgcggctgtcagttgtcgcttgatgccattgtcgctacagaatttgttgaagttgtctgagttgaactctccacctctatctgtgcgcagccctcgaacaacagtcctggcttccttctcgactgagcttttgaagactttgaaggtttcaaaagtttctgatttgtcagcaagaaaatatatccatgttttccgagaaaaatcgtcaacaagaacaaataagtaacgtttaccaccttgagaaattggcgtaattggcccacagagatctgcgtgaatcagctccaacttctctgatgccctccatttacttttcttagggaatttcctcattgctgcttgccaatgttgcacacagtacacaccttgttgtcctctttgatatttggaagacctttcaccatctcttttctctgcatcaattgaatggacatgttgtttagatgcccaaacctcttatgccagagagttcccaagtcttctccttctatcttgaggcagttggtggtgattggtttcttcacagcatttactaagaacatgcggtttttggtcatctttgtctctacgatcaatcccctttgagcatgaaaaattctgcacactccatcttcgatgatgattgaaagctgcttctcttgcaattgaccaatgctcagcaaattgttagtgaggtttggaacatagtagacatcactcaccacttgtaagattccctccacactaattcggatgttcccttttccctcaactcctaatttagatccatttcccagcctgacagagtgtctgaaactctcgtccagttcggtgaaccatgacttctctccggtcatgtgatttgagcatccagagtcaaggaaccatgaaccttgatcttccacactttttatctctgcatgtgccatgagtagtaactcctcctcttcgtcaaactccacaaagtttgctcccttctcaaggcttgtgcactcaaactgataatggcccatttttccacaccggaaacacttgattgcagatctgtttacaaacgatctgcttcttcctcgtcctcttgagctgctgcctcctcgataggaattcccatttcctctaccacgagcactccttggctcgttttccacaaccaagacttgttcttcacctctcttctcagtcaccttacgttcgtgtatttgtagagacgcttgcagctcatccactgtgaggcaatcaatatccttagattcctcaatggagcaaacgacatagttgaaattgtctgtgagactacggagaatcttttcaacaattttgacatcgtccatgctttctccacaatttcgcatgtcattggtcgtctccatgactcttgcaaagtagcttatcacgctctctccattcttcatctccagtgtttcgaaagtcttcctcagcctctgcaattgagccctcttcactctggcacttccttgatgtttaaccttcattgattcccacaattgtttggccgtctctttctgcgtgatcgtcttcagagtggttttgtcgatcgactgaaacagatagtttttggccttgagatctttgagatttgcatcatcaagtgccttttgttgcgccggattggggttttcaattctcctaagttcatcgaagcctggattgatgacacaccaatattctttggatcggagaagattctccatgatcaaactccaatgatcgtagtctccatcaaattttggaacagctggtgcagtgaagtttcccgaatctcccattctctctttagtgtttttcctctcaaacactcaatatgtatttgctctgataccagatatagaaaacagagtcaatacaattctctgaatgattcgtgtttaattcattagactgaaattggcttttataagagccttacaacgtgaatacgaaaactaaggaataagaaacggaactgaaaaacgaaacaaactcaaaacaagaaaactcaatcagttcctaaaaacaagctaagacttgacttagtgattgacttattcaaaacccaacaattagcatggagagaaccaagtatatctggtctcaacgtttagagtatcttctggtctgggcgataggcttgcccttagctgatagttttttccaaagaacataatgattcaccttcttaaactcgtctacagcaaaaccgtagatgctatctgagattagcattatcgatgatgatacatcacgattgacagtaatccacacccccatgccagttaaaacagctatatctctcgaatgatcctttcctttcaagcctgaaaccattttacgcagatcaaaccattttaaaacaacaatcaaatgtacacaaaaagtagaaaaggataatgattgaattctacttcaccttctggtacgcgcttgagctcgataccggcggagtgaaactccttatcctggatcctctgattcgtctcatcagcataagccttgattgagaccgtaccaggatatcccattttcgcaaaagccgtattgatgttcttcgaaacctcaccagcactgagaccatcagggatcttgtagtcctccacgtcccagaagacgcttgccttatgatcttccagtcttcgatgtcccagaagagcatcagggatcttactaccgtattcgctactagccgtggttttgaaggactgatcgagacatttagagagagagaggcggagcaaaggtatacgagactcgagcaaaggtttacagctccggcactgacttagaaacatggttttgacggagtaaaggaagacgagagagatgccgcgcaaatagggttttctttcgtacctacagaaaccctattattataccaacctccattgacgaagagaagcaccagtcctttaaactaataagcccatttgtaaatgggccttcttttagaccctataagagcaaactctctcttttcttggctaatactgtaattgtttttttgtaataacccaaaaccaaatttctcttagttttcaatattaattcaattgttcatatattgttagcttctttcttatttcttaaatcataaaacaaaataatttatatattaagctccaatatacataagtttaatttatatatgactttaagagagatcaagagatttaggttttgacagagtttcctaaataataaaagagagttattcttttgttttatgttcttgatctttctctaaaactagaaatctaggatagaaatgttatcacattttgggtttctggggattttaaagcttaatgtcaagtttgatgatagaaatgttgaagtttcttaccttttttgtctttcatctttagtgtccacattacactggtttggttttttatgtttctttcttccttttgttaaactttattttatagaaaacatttacgtttcatcttccttttgttaaactttgttttgtattcaaatgatttacatcaacttttcatcttccttttgctaaaactttgttttgtattcaaatgatttgcagacgatttaagctctgttttaagctattctctcggcctagttgcaattcttcactttctcagtgaaagaatgcttaattttttcattagagtgcacaactgttaattaatattttcttgttatagaagcaaattacaaaaaagctttctccgagtgagtgagttgaacgatcagttcagtccaagctgtgctagtgaagtcatgttcgcagataagctttctccgagtgagtgagttgaacgatccagttacccgcccccaagtcatcaatcttccatgaacctctgtttgaatctccttctagtcatctgagcccatctcgcaaagatctctgctgcagcaaacttacctgagaacttagctctctgtgccaattcctcaaatatctccggttgcccccctctgtggaaatcagctgcaaacttgttataatcaatcaaaggggttttcattcctttgtcaagcatctcctctaagtatctgcatgcctctctcgacttgccttcacctataagccctctgatcaaaaccgtgtaggagttatcgtcaggacaaatccctttcttgatcatctcttcccaaactgctctccccatctcatagtttctcgccatgaagtatgatttcattatcatgttgaatgtgtgtatcgatggctcaatttcgttctggatcatcttgttgtagatccttgtggcatgttccggcattttctggttcgccatcagtttgatcaacgcattatacgttttgccatccggaggatgtcccttttcttgcatctccttgagcagttcgtaaacagtatccagcttcttctgagtcccaaaccccgtgatcagacacgtgtaaaccgctgcatcaggttgcaacccggaatcaaccatgtcatcaaagtattcaatggcagtttccatgctcgactgtttgcagaagtcacggatcatgatggtatagctacggacattagggcaaggtcccttggatttcataacatggaacaatttgatcgcatctgattttttcctactcctcaacaacccttcaagcattacgttgtgagctacaatgtcaggtttcaatccctgatcaatcatatcattccagattctagctgcttctatcaagttcctcaccctgcaccaaccattgagtagaacagtgtaagtcatcatattaggtgtaaacctctccttcagcttatcaaacagaacctgagcttcttttccaagcttagccctgccaagactatcaagcaagcaattaatggtttcaacaccaatcttaaacttgtacttcttcatcaactcaaagataccaacagctttcttcctctctttcgcagcagcgaaagctttcatcgcgatagtgaatgtctccatcgtcaatagacctttcgtacccatctcttcgagaaccgaaaccatcgtctcgaactgtctagtctttgctaaaatactcatcatggagttatatgttcttgagtcatgagcaaatccttgtctctctgcagcccaacagaagaacctaaatgcaggcttcctagcatgtcgaaaacgttctaaaacctcaacgatgagatcatgtgataaatctagtttcatttcatcaagaacagcttccatatttctatctaacgcaaacaattcatcaatcactttgcagactctctctacttcttccggattagtacttgattcaacacaactgaccccagtttcttcatcattatcgcattcagattcaacttcttcatcacatccatcactaacattagaactaccactagagaaacctctacacccaagactcgcatcaagcagttgtacagaggagtgtggcaatggaatttgacggtaaggatgataagtagaagaatgaatcatacgagagaagagagcaccggaaaatcgtacttcctcttctcctctcccgccgattacgcggctttgactggaaatgaattcatccgaatcgaatgaagaagagcaaatgaggaagcttcttaatgaagtctgagtggagcttcttctcctagagagatggagccatggagcagcagccatggaagctcgacggcggttagcaatggcgaagtcggtgaaaagccactgatttacggcggagagctcttcacgtatttgggcctttgtttgattagaagctttgagtgataataattttgacccattaaaggcccattgatctggttacatataaccattgggtccaccaggagcattaaagcgcaaacgcataatcatcaaaggtgtcaatttctttttttagttggaagttatctgtatgcatcttatcttcgttttagggtcgtgatattttctcaagttttttttaggggaccaatttattttcagatttatttgattctatcatacatttctcttagttcacgttatctttgtatacgtgtttatggatattacataactgaaaatcaagatgagtcaatcagtgtaacatcaatcatcaataactctgcgggatgtatataaaactaaagggattgttgattctgtaatcaaacaatgaatttgtactaagggatttagacaaattcactcctctctcagctaacaaataatcaaaggggaagaacagagttgcttgaatagaaagctagggtttgctctataattgtagtctcttgtattaggttaaagatggatctctggggagtttgaccctcccctatttatacaatgggtcgaacataccaaaatatgataaacttctaattatcttaggtctaaatctccatttctaacactcatgaaggaaacgcatgacggagacggggggaatcattctggcggacgagctctctgccttaaaatcaaaaaagatggtcattactggccaactatgctggcggactgcgaagcctacgcggtgaagtgcgaaccatgtcagagacacggcccgatgaagaacgttcctcccgagatactgcgttcggtcacggcgccgtatccattcatgcgatgggccatggatatcgtaggaccaatgcctccttccggatccaaaagatttatgttagtcctaactgattacttcaccaaatgggtcgaggcacatgcataccacaaagtcattactggcggacgagctctctgccttaaaatcaaaaaagatggtcattactggccaactatgctggcggactgcgaagcctacgcggcgaagtgcgaaccatgtcagagacacggcccgatgaagaacgttcctcccgagatactgcgttcgatcacggcgccgtatccattcatgcgatgggccatggatatcgtaggaccaatgcctccttccggatccaaaagatttatgttagtcttaactgattacttcaccaaatgggtcgaggcacaggcataccacaaagtcaagtcacgcgatgtggttgcattcatctggaagaacattatttgccggcacggtcttccttatgagatcgttacagacaatgggaagcagttcgtctcgctcattactagaaacttcctcgccaaatggaacattcgcatgagcaactcgactccaagataccctcaagggaacggtctagccgaagccacaaacaaaacgatcatagccgggattaagaaaagactaggccctaaaaaggggaattgggcaaacgagctggatggcgtactctagtcatacagaactacgcctcggcgacctacatcattatcccctttctccctggcttacggcatcgaggcaatggctccaaacgaagccggagttccaactttacgaagatgcatgatgtccaacgaccacaaactgaacgatcagcttttaggcgaccacaatgatttcgccgaagaacttcgcgatcaagccgccatccggatccagaattaccagaatgcagcggcgagatactacaatcgtaacgtccgagaacgttgcttcaacgtaggcgacctcgtgcttcgggaagtttacagtatcaccgaagagaacgccggaaaactcggagctcgatgggaaggaccttatttgatctcgaaggtacttcatccaggagtctatctgctgatgaccatgaagctgaaagaagtggaaaatccgtggaatgcagcccacctcaaaaggtactattattagcttagctacaaaaaaaaaaaaaaaaaaaaaacaaactgtattcatatattctaagtacgcagatcgcctatcgcaaggatgcaggtataatacttaataaaattaaagtttgcattctcaatacagagttcgctttaagatctgttatgtcaactctcggcgccctggccaggcgttcgacgcgcgtcccacatggatgcagtggtgaaataatccacgccctattagaaacttaatttttgggaaagccgagaccagttttctcgcacttaagctctggttcggacagaaacataagccgaaccgtttcgcgatctgccgaacagatgctctacggggagtaagccgagcccagcatctcgccccccaaataatatgctgagcccgcctcacttattttggaaacagagcccagaactccctctttaaatcatacataagcctgctggacataagccgagagacgtctcgcatccagcacacgctgaatattctttctcaaaagccgggctcagtctcgcacctaacatctagtccaattagacagaaaaaattgcgttacttcgaaaagaactcaaaagccgacctcagaggtcgcggaggaaataagccaatttaataagattgcattgtattaatcaacgaccgaacgagatcgggggatattacaaagacatttattccagaataaattagagtttaacaaggtcgccagccatcacaagggcgtttattcgaaaataaaaagcaaaggaaaaaaacaatccaaaaagccaccaaggatcatctgctatcggccagataaaacgtcagatcgccctgtcagaaacaatgcgattatcctgaagaaggcgatctggcatgggccacactagttgcagaccagctttctcccaatcctccgaacgaatctccaatgccctaatcgtttgttcgacctcatccagacgagtgacgacccttcttttcttcttcagcttagcaatcagagtttcgagctcctcgagacgaaagtccactattcgtttcttggttcgaaagtactgcagctcgcggcattgatcctgatgcagaaatccgacctgagaaatcaaagcaacgaaattcttaaaaaacatcccgatatcgaaaacacaaaccaaagcaatccttacttggttgacgaagttcttacactccgtggtatcagcatcagtaagagccggcccaaggtagaatagagaaggcgtcctgggaatgaagttcccatcagcactgattgttggattcttctcctttgagacggcagcagcatctcgatcacagtcctcacaatacgacaaaagaacgtccggcatcggagccagaaggtgaaaaccattcttaagccaatggcgaggatgcgactccagcatagccatttatcgagcgatgtcagaccttcgttcatcatagtaccttagcatctcgcggtattccttatgcctagactcgacgcatgacaagaaaccctcggcttcacgtctttcctccgagctcgcctgacaagaactcgaaggttattaaagaacgacatccctcgttcaattacctcagcgttcgagaaagtcggaatagaaggaagaaagggccgatgaaacaattgtcgatcaacagagaactatttataggggcaaatatagaaatcgaattgggaatttgcctaaatgcgatctggcaattctcattttccttttccaagacattaatgtttccattttctccaaaactgggaaaatgggaatttacttaattacgggttgacttcctccaatttctttttccaaaaaatgacaaagctcataaatggaaaaaagaactattctgcttcggaaacaggcaagatagaaaatcatcgaaaatagaagttaaaatcaaaaaccgccccgaaagtgggtccacggttaaataagagctttgagatcgccccgaaaattgggtccacgatcaatatttcaaaatagtccgccgaatcacttccgataacgaggtcgacatttgagccgtgctagtccgccactggagcaacttgggaggtttgccttgaaaaaccgagctgatctggggacatgttcagatcatcgtccccgagctcgataacgttcaaggcattaacttcgtcggccgcccttttggttaactccttaaggccgctgagttcaaatgctgcaatcttcgcacctctctgcataaggatgcccactatctcctcagcgcctcttgcttgattctcagcatccacctttggcccgacgaggtcctcttgctccttgagttaagccttcgctctatcaagacgagcttgggctttctttgtagtacgggcgacattagcagcttggtcactccgcaacctgttgcactctctctccccgtgctcttttacagcaaccaatgcgacctgaagatcgctgatctctttctgaagatcagcttctcgactattgagcctcttgacctcgttattcaacgagctcatctccgccttatgaatctcggcagcatctctcaatgcagccatctccttcatgtctttggcatagatggctttcgcctggtcagcgcacttcttccggttatcgaaggcctctctgtcggcgagcttcagcttcaacttgcgatcatatgtcgcaatcagatcgttggccagggcggcggtctggaaaaagaatcatggttaaatccaaaatacaaagatattaggcaacaggaagacatgtaactagcgcgtacctcaagtgatgatctggcaaacttctgatatccctcttttagaaccagatcatcaggattagggaaatccttcgtcccggggagcatcaagttgcgccaaacgtggctggcggcctcttgatctctcacgaggaatttctcaccagaatacttgaacgtaaactggtcagaattaagagtctcgcctcgcgacaggcgaaacgtctttggagcaacggcctcatctaaaccgccttcagaagccgacctcttcttggattggttagccactcctttccctttctcctcacgggacctcctggaaatcccgggctcagcaacggtttcgtccttgtctcgatcaaggatagttaggcccgtgttgacctcttcgcctgctggaggggcggcataaacgacgacggagcggtcgtcggtaatattttaaacttcaggctcgacgacctgaacggactgactttgatcgcactcggcgatctcttgagctggcacgatgtcggccccttcaagacacatcctgtcttgagactacaggtcgaccatctcatgggagacctgatcaacatcggaagggccggcactagcgggaggatttgacgcagctgcctctccgtctaaaggctgtctttcctcttcggtgggagctgggggaggtggcatgtttaaaagcccagcatcgaaactaatgaaggatttcctgaccttccccattatcctgttgacgcgcgacctcgtgacgtctttccaggtacgacgacgagctcggaagatcgcctctataactccttcgaactcgacgggaaaatccggactaggcctgtatcgatctgcaacaagaaaaagctatgagaatctagtcgggatcgacatatctttaccctatctatttaaaagaaatttaccaggaaactccgtccacatccttttcctccccgagaacggacgctcatacgactcgaggtcgaccctgacgtagaagtaatattcttcccagttcttgaagttactgattttaggaccgggaagaaagttatgctttgggcggttgttcaccacccaatagccgggcgaccttatagctttcaacgtcgtcatttcttcgaaacaacggacgtttactaggtaaccttcttcagcaccgaaggtcagagcggcaacaaaattacagatcgccgccggagtaagctgggagaacgccatacgacgacgattcagaaaggagatgatcagagagggaatgtgaaaccaggagtgacattgtctgaagtaggcttcatacatgcagacgtaccctcgagggggattccacggacgctcattttctccgggaatcatgtaagtgagcgggcgatctccggagccacacaaggcaaatacttccgcgactgacttagttgttgaaagggtcttttcgcggtgatctcggtgtttcagctaaccactgagtcgaggtgaagttcgacatgatcctcatgaagtaatctcgcattaacttcggcctctgtatactgtggctgcgtgttataagcatcctccaggtcgatgagcgggtcgaactgagccaagaaatccgccggatcttcaggagcagcgagatgtccaccggaaccttcccgatagggctcatcaaacaacgtcgggatctcgatccggttagatcgactagactgagcttcgtcacttggattcccggttaaccgagagtttcggcgaacttatgacgcttcgctctcggaggaagaagaggacggagagacaagaacaaccttacccattgccggaaaaatcgataaagaatcgagagtacaaaataattcgcagaggagagagcgagagctacctttgattcttcttgcaagcggcggaaaatgatttcccgagggtttaatctaatataaatagaggcgaatgggcggcaaacctacgaggtcatcattaaacctacgagacgcttcggttcctgagcttcacgcgcgcgtactgacgcagcgattggacacatgtcagatacgttcgaaatacgaatcgattcggaaatctaatgattaattcacgctttccaagatttaaatcgaatattcaatttctaagttcggaaatttcgaattaagcaactcggactctccgaactggggggactaattgttggtgcaggaattagcacctccgacaataccaatttaaaccaaggaataacgtgaataaaatcgagaattcgattgaaccggggaatcccggatagcctgtgaatgggccttaagtcatgagctcgccagaagatttaggtcgacaatcgagatcgccataagcggcttctgaggtcgtgtgaagggaaaacttccatttaaaagagggtaatctcatgaagaatggaagtaatggagatttagacttaagataattagaagtttatcatattttggtatgttcgacccattgtataaataggggagggtcaaactctccagggatccatctttaacctaatacaaaaagactacaattatagagcaaaccctagctttctattcatgcaactctgttcttcccctttgattatttattaactgagagaggagtgaatttgtctaaataccttagtacaaattcattgtttaattacagaatcaacaattatttatacttaaaagtaaatttctggtttgagaagagaactataatttatatactataataatatagaatgatatacactgtaatctttactgcaacagagaaacacacttcccaaagttttagccgggaacgtacacgcgcagagatgtcatgtcacactagacaaaccaaaaattcaaattttattataaggaaaaatgaaatagtacaatactagattatagtcgtatcagtttttccttgtattaaacaagacaagacgtagaactgagaattttagtactcgagttaatatattttagattatattcccatcagtcattgaatatatactatatacgaggagaatatataacggaagaaatatgagatattttattttatatagagagaaaagagaggacaaatctctctgccaacaccatctccaatgtccacttcagtaatttttttatcttttggaatcttctaatgtcattactctcttttcttatgacaacctgtcttcttctgctttcttttcctcagcttttctcctgcataatgttcaatctatttttcaaattaatcataatgtaacctttatctctctcccttctgtacctggtaaaaaagcaggatcgattatgaataaaccacaattaagtctattcctttgttgaataaggcatatctcatatacctcacaaatctaggtacttatatatggttgtaaagacgtttttgccctaataattcattgtcgattgtttttctctttctccttccaacatccaagtttttcaaagcttcgataaaaattgatttctcttttggtttagaattttgatgaattggaaaataattgatctgatttgtgtttaagattagagtttttgggttccctggacagtatcccttagagtttagattccttcaatgacaattcgtttgattggatccatgggattttagaaaagattggtgttgacggatataacaatgatagagtagaagaatacggcgttaatgaagtaattgcggtggggagaactgagaagcaaggactgttgtggtcggaaaaaattgtggtgatgatgaagaagacgatgaaagatgagaacacaatcaattagagaaaggggtaaaatcgtcattttttatttcaacaagtacttatttttataagcccattaaaatgttctttttctctagtttttggcccaataagtacccaattctataataccccctaaaaaagcatgtgtttcatttatgttttaaaaacacgaaataaaaactaaaaactgacagttccttatccccatgcatctaaaagatagtctctttttttttattactatccgttacttatatggttctatctgtctagaaatttggtaatactaatcaactaaagggtgtgtgcaaaaaaaaaaaaaaaaatcaacgaaagggtgtgtctagttaaagtgaaatatatagttgtggcgaattacaattaacaagttcgctctattgaaaaattaaattaaggttccgaatggtgattgcgttttgtggtgtggaaaaagtgcgatgcgattcaaataataacgaaaatacatagatacatatgtatatgtagagattttgatactgttacaacactgttgtagtgcggttttggatgcggttttggttaccattcacagcttaagtatgggcaatcgaaatattggaccaagatacgtaaagcggtatcagtactcataatgttcaaagtcaaagtcaagtaaaacaaaatgaatttatttattatttatcaaataatagaaaagaggagacaacggtgatgtcacttgattgttaaggcggtgtgtttgtttttttggtctcttggttgtcgccggcgtggcctcctcggtcttctgctctaggagagatcgtcgcctggactgaattgtttagtgttgttttaggaagattgttgtacgaattttggtccaaaagagggttaatcgtctataaatatgcatgggctgatcatattattttgctacaagatttgactattcaacaggggtattttggttattatgaaaattggcttataatttatcagaaaaattaaacggtcgcctggacgacagcaattctcgcggagaatctctgtgtttttaatttggagcagtgaacattgttcttggaattcgaatggcgaataatggttgaaaaattggatatggatttgttttgtcagtgacaaactgacaaattacttgttttttcgattgttctttgaaatattcaggtttcttggctctattggctttaaattatcaaagtgcatatacgttcctaacattatggaggccctaaacaattaaaatgctatctctcgtctttcatatatacatatatatgtgtgtgattggatgataagttttgagtcttattcgatatgaaaaatataatcttcctcaattgcctgggattacatatagttcattgtttttatgatggcaaaaaaaaaaaatgagaagacaacgaaatcggttttgatatgtgtggtaatgccaaaatgttccatgagaaacagacttcccaattgtttggctgacggtgtgaaatctaactaaaatataatcttaaagatacaataattgccaaaagtcagtttttatgagtgcaattggttgtcacttataagaataggattaaaatattagtaaaaacaaatgaaaatgaaaaataaatcattcatctttagttttttcatcttctttgtttttagggtaatagcacaatctatacacagaaacttcaataattaagtcagactttttatcactatttacgcagtaaaaatacacataaaattacagtactatccttatttctattttttttttcttttttttttctatctctcttctctttcatctactcattcatctcttttttttctaactaattttttcttcatatatatttttttttgttatttttcattgctaattatttttattgttatcacattaacgtcgttagtaattattacctgtagttattatgtattaattatatgttcaaataaatattattcatatatcgattatcttaccgtgtgttaagacaaatattattttgatagttagaatgttagcatgttattaatcatatattgattatcttaccgtgttaagacaaatcttattttgatatttaaaatgttagcatatcattattctacggtaattattgttataatcgttgtgtaatatgatattttatcatattttattgttttgatatatttatatatataaataaaaatactaattcataattttgaattgataaacatttatttaacatataatatgtaaatttactatgttagcttgttaaacaaataattatatatttattttcaaatattaaagttattttttatcgatggtatttttgtaattaatctaaaaagaaggattttttggtttataatttatttttctttcttattaacttaaataacaaatttgtacgtacacattcttatttttttgttcatccatatatatattttgaactcacccttgtttttaagtaatgtaaaatggagttgaaaaaatgaataactgtttataaattttcatcttaaatgatttttttttttacttttcaaattatacctttaggaacccaaccatttgcaccctaatatcatatgaatattgacaacaaagactacatgaatttaaaattttcaacttgcagaattgtaaagatgagaatttgcactcgttaatgacgttcctttctttttgaatcttattttgttaattcttttttttctatctttgattttttgtatctaaaaaatctctaaacgaaaacgttgcatctgatgtaccatagttttttcgagtaaattttaaattttattaaaaaaaaaatgagaattattagataaacaaaggttccgtgatataaacccaattaataaaagaaacaacttaggcacaatatatagcctaagaagcttttttaatttttttttttaaagaagaaaagagagagaattgttcaattgatgcgcgacgtcggatttgatgaaaaggaagttttcgacttggcgcctacaactacttttgtaggcctgaaaattcacagtcttccctcatcagaacacaatatctttctcctcctcttttgtcttccttcgccgtcgattttaaggttttatcttctccgtagtgaaagcactgataatttctccaaggaatttacgaggaggatttggtttgtttctcctgcgtgttagagttttacgatttctctgtcgtttgatttcttaattctatcctctgagagaacgagaatttggttttcgttttcgaatttagggttgaagaagcggtttcgcattgggtttgttgtctattgagccaatttgctaaaggaattgaaacgttgcgagtttttgtttcccggaggtccgaagtgcgaatctgttttgtttaatgaaattaggggtttggaatcggaatttgaatagtcgtttatgttgactacgcgataatagctgagataggacatgattttgaaacggattttgacgacattcgataatctgaatctgaagcggtgcaaaattgatttagaaattgagtatggtagccaaaagggtgagattatggtgtataagaagagacaacgagcaagcgttgatcaaccatgtagcagagaacccggagttctaacaagtagctcaagctccttgaccagtagagaagaatctcaacaagtgtgctctgaccagtccaagtcttcgcgtggcagagttcgagcggttccttcaaggttcagggactccattgttggtacatggaaatccttgaagagtcgcaaggaagagtcgacggagacatgtatctggggaagctcgaaattgcatcgaagcaaagacccgaagctgtttccacgtaaggataacgaagacagcagcgaagtagattgcgattactgggatgctaactttggtatgccgaaaaagtccgacgcctcgcgtaagggcgtgtacaaaccagaggaatttacagtcggcgatcttgtctgggccggctgtggtacaagcgcctgatggggtcttgaaacattgcgtccctggcgcaatacgtgtcatgttttttgggtactctaaatggaaaaaaattgtcaattgtcaaaaagtcgtgttaaatatagatgtattgtacagatctttgactttgaagtacttcatttgctgatcacagcctcatctttatctgttttttttacactgtaattatagattggatgccgattggtgcctttgtgcttgattctcgaacttcactcctgactgagagtttgagtggtcgcctgaaagtcccaaaggaaggaaccatagaacggatgttacaaaaatgtcttattcatgatcttcagaaactttgtcaactgcaggaaaaactgtaacatatggcttatctcattttccagatttacagcttgtgcgacctgtttgtgacctcagtacctgtgaggtaaaagacactaatcaactctaatctgttgctgaaacttttgtattgatctcttgcaataactaaattgcaactaagagtgtttctgttttactatgtaggaacaatgcaaactcttgatgctaggcacattgaactcttccttagtgaaggctacaaagatggaagctgggactacaatctgattggatctcataagttgcagaaaaacgcaagtgcagcttgtggagccatatttgacctcaaacaccataaagaatcttcatcctcaggtaacttcaaatcttcattactgttatgttcctttacttctcctctttgaatcattctcctttgtctcatacaaatttcacatgaaacctctataataggtattctcaacctcaagtcttggaccggacagccagatatttcccaacctaaagcagttatcgcaccccatgcagttgctgttcacacaagattgcgagaaaacgaaggtatataactttgcatcatcaaccatctttatctagaaaacacaattacaaataattctcttgccaaaaggaattgaatccaaatttgttgtttcagttgcggaaatccaatcagtattgtggcatttgcaagagagtatggcagcccttcaaatgatggagattgggtgagaatatatgtgaccatgtttggtgaaatacagacctgtaagaaatgattacatctatttagctgacttgatttgatgtattaggtttattgtgatgagtgtgatgtatggccgtatgggtgcgacaataatttatataagcgctttaaggtacaccttcatgcatcttaacttttgattctaagtaatgaacacgcttgttgaactatcacactaatttggttatcatcttaaggaactggagcacaacagttactattgccctaactgtaaagtccagcatgagcttatcaatattagaagaacagaactcagtgttcaagtatattgttaacttctcatgttctcctgattttattgtttgcatttctccattgctataatatgcgagatttcctcacaacctctttgggattggtctacagaaaaggcgacacagactgagctgcctgatgagattaatgtagtctgtaatggcatggaaggaacatatatcagagcatttcatgcgtacgtattagatgtctcagccttatttcaatttcttcatttagaaaggatcttatttgtttatgaattatgactatgcagcacaatatcgtaaattgattttttctctgaaaacgataaaaaatccgtgtttaatcctaggtttctgttatcattgtcttgttgttttagagatttgaccaacacattaatctttgaactattgtttcagaattgagtgcaagtgtggttcatgtgggtcaaggaagcagtcaccaagtgaatgggaacggcatacaggctgtagatactagatagcgtaagagtgaaagacacaatgctacctctagaaaaatggctttgcatgaagactttgatactatatgtatctgtatatgtagaagagtatcagttttatctaaatgactagtctccaaatttgtggtttattgatttcgtcagaatggtaggctctttaactgatttaaggtgaaaactacattggtctttgttcagtgttagatttgtcttttgtgggtttggaatggattaaagaggagtcttttactggattttgttgaatgctagatttgggtttagtaaacaatgaatcctttactggttttgaaggatgttatatttgaaactgattagagctaaaccctctattgcttagtggttcttaatttaagggttttgccgcagcttccctaatttaagcttgttttctaatacaaagtacaaaagcagtgtgttcgtcaactatcttcttactctgttttcgtttagagagtttttgcagagatgaggagaactataacaatggtgataaagatgtcaatacttatgatattgatttcatcaatggtgatgaatatggtcgaggttgaggttgaccagattgaatcatgggtcaaggacttccaggtttcattctctttttcacacattcacacaagctttatgtaaaagaagtatatatgaaatcaatataacctaaccaaagaaaatgttttctctaggatggaaaagctgctgtccacaaaaattctcaacctattccagctgagaacaacgaaccagtgaagcttgttgtcgccgagagccttgacgacatagttcaggtcagcgagcggaaacgttgtagtatacgaaggagacaggacaaaggaagacttcatagttcagggttggtgatactagcagaagatgatgaggaagaacacgaaaagatggattagttaaagcttccaaaaactgaatcaaaacaatcattattacattagtttgtggttgtggattagcaatgtttaagtagtttgatctatcaatctcctgaatttctagattgcagatattttatctcattttgctgtctcacttgattcgtgggttatattgcttaatttgatttaaactctgttttgtgtggttacataggactctgtttcgcctgtgtataggaagagagtaatgacgttgagtgtacagagttggagaagggtttcgagaaaaaattgtaattcttgaattcgtctcagcttgagaatagtgagtccatggacttttaccggatatgagttgtacaatgcagagactgatcccgaactgaaagctgttatgagaggacatgggaaaagccattggcttcgtttgaccggaaagaatttatgagtagtaagtagcatatctaaagtaaacgccatgcaaacaaagaaaccaatgatgaagatataagagcatccacattggtgggcttttagcaaatgttcttaacaataattttataatttattttgaagttaagagttttgataagagttttttttttttaagagtgtattttgtctcttatataagagcaaaatcttaggcctgggcattttaaccgaaccgaaccgaaccgacccgactcaaccgaactcaaaccgatccaaaccaaacccaatctaagactcaaacaattcggttgtattttatctcaacccaaatgggtcggttcggttcggttttgaaccaaaccgaaccgacaacccaatgtctttatatacttaattaattaattctataaataatattacaaataactctaaatatttatttatctctaactaaaactctaaccctaaaaagtaaaaacctaaggtttacttctaacttcgtttcatttgttcttccgtcgtctctctctactctctacagccacggtatgatttttaactactctctagcaatacaattacgctcatctcaattttagttaaatattatgagtatatgatgattttttcaatctgtacgtacaccgcaaagtcatggaaaagaaaaatctgtgtttgcgttgtcttgtttcttctatttacttagattttttaatttttaagaataggtttcatgtaggttgggtgattttgtttgtttacaatatatataatatattttagcattcataccaataatcaatggattttcgtgcaagaaaacagatcatacatgtttatttagtttactaataatgaaagatgttttaatagaaacgtaattgtattctttcaattgactaacaattttatacatgttttgtttgtagatgtctaaaagaaacacgactagcaataaaagaaaagaacccgagtctccaacagtgtcgccaaaggcaaaaagaaaactacctacaagatcaacagcatggaaagtctttacgaggttgaaagatgatgataatagttgctcatgcaattattgtggtaaaatctattcatgtaatcctgctacatgtggaaccagcaatatgaacacacacatgagaaagtgcaaagcttatttggatcatcttgaatctaattctcagaatgtcatagtctctagtggtggtggtaatggtgctggcatgataaaaccttttgatcaaaacgtgtgtaggcaagcaacggtgaaaatgattatcatggacgagttgtcgttttcttttgtggagaatgatgggtttaaacatttttgtgagatggctgtcccttggtttactattccatcgcgaagaacaattactagggatgttgttggtctgtacagagctgaaaaaactgcattgaagactattttaagtcgtaataggcaggccatgtcgtttaccactgacatatggacttctattacgacattgagttatatggtcgttactgctcattttattgacatggattggcaattgcatagaagaattattagttttagtcctattcctgatcataagggaaagaccatcgccaatcagtttttaagatctttggatgattggggtattgagaaagtattttctatcactgtggataacgcaagcgccaatgataaagctaatactgttttgaaagagaggctaagtaacagaaatagtgatgctttgatgatgaatggtgattttatgcacatacgttgtggtgcacacattcttaacttgattgccaatgaaggtcttgaagatataagtaatagcatcgtaagtgttcgtaatgctgtaaaatatgtgaggacttctaattcaaggctggaatcatttaagcgttgggtggaggttgagaagataacaagaggaagtgtggtattggattgtgttactaggtggaattctacctacttgatgttgaaaagtgcacttaagtataaagttgcatttgataggatggctgatatggataaaccttatgatgcatggttcaaagaggttgattctaataaaaagaagagggacggacctccaatggcaattgattgggacaatgctcgtcatatggtaaggttcttgaaagctttctatgattcgactttagcattctcttcttctataaaggtgacgtcaaatggttgttacaatgagatctgcaaaattcagtcaagtgtgcaaaaaatggcttttagccaagattctgatttgagagagatggcttctgcaatgacggccaagtttgacaaatattgggaaggtacagaaaaaatcaataagatattgatagtggctggtgtacttgatcctcgtcgcaaaatggtatttacaatgttcagttttgaacttatctatggaaaaggtaatccaaaatgcgttgaaatgaaggaactcgtgatggatgttttggagaaactatttgacatatatagtgttcgatatgccacttcaaatctacaaccttctgtttcctgtgacgctgagaacgtaacccaagtacaccaagactttgagaatatggaggttgacaacattgatgatccttttctaaaatttatggttgctaagaagacttctgtagcagtggtaaatgaattggtaaagtatttaaaagacgaactgcatgtaactactgaaaatagtttggggctcccgtttgatcttctagattggtggaagacaaatagctcaaaatacccaatcatgtctttaatggctagagaggttcttgcaataccagtatcttcggttgcgtcggagtctgcttttagcacgggtggtcgtatcctagatcaatatagaagttgtttgactcctgatatggttgaagcgttggttttgactcaagattggttacgtgcttcacttcgttcagaagcaatgaagtctcttgataagctagaggaagagaacaagtttatggattcacttgaagaaggtattttactttatttctttataataattatatgtgacaatcacttatagatttactctctgttcatgttagtgtctaatttttattttattttgttagagtttaatcctccatctcagaatgagaagtgagaacgataggtacatgtctaagtaaacgattagtgggagcagaaaaagattaaagaggtaatgatctttcctttctatatattagttttacgatgttagtgcttttctgttgttgaaaagtttaaaattgttagtttatgtttttttctttctgttcttaatagtttatactctgttttggtttccaatattctagttaatactctgtttcagtgtaagaagtgattggttttattgttttcgtttcgtctttatatagttataaacttatatgcaagttattgacttgttgcagattcttcttgatgacattgggtgaaggaatcatggaagattgttatgttacgttgttggatttcttgcattttcctttcttttaaattctaagtactaggcatttgataattttgatttgaacttgttacgttaattgattttttgaaccagattaaaaccgaactgaattaaaaccgagggatcttaactattttaccaattaaatattaaatttaaatcttaatatctctaagaattatattaagtattcagtccacatgagggtttgacacacagtgaaggtgatgatgataaagatgaactcttgggaactttgatttgcctctctcactgccttgttcattctgtcacaacgatatcgtacctgaccttactttggttcttcattgcacatcctattgttctccatttatgaaacacgattctggtgcaatgagataaccctaagtattgggatccattgtttttgcaaggcctggagatgaaagcaccgagggatcaaatcgctttttcttgcatattcagattcctaattgcattgttcagaatcacaatctcatcttaatttggtttttgtttgttttaaccagccatgaggactataccgaagataagcagagttggatttcaactctgttgaagcttgaatcaaacatttccggaacagaggagtgatatagtagtgttgcttcagacagttaaaccagactgtagattaagttaggttattcacacatagctcaggttaaagcgttttttgttgtttatgatttgattctataagtactttttgtgcacttgctactcctccttactttggttcacaaaaagtctttagaaataagattttatgttgccttataattctccaatgtcatgtgtatgatgatgcatgttttcttaatccgtctccgactaaccagacagcatacatacttcatacttgtgtgattacatagacacagttacacacatcaaccgaaccaaacacatataactctaaatatataagatgcaagacttgtactaatcatcaaagaagacagtgttgtggtttgaataatgagatcattttagcagattctattgccacttcaaagccatggagttatagatcatgtagtggtcagaatcaacattgaggacaaatgtcatgatttctctggtcctaaccaaagcaattaattgatggctccggcattctcataaccagaccacacaaagaatggcattacattggtaccctgatgtcagtttctgttagatcatcattcactgctgatttaaaggagccaacatcatcccacataatcttacaaacttaccgtttagatttttaggttatcaccgtccgatctcaagaaacggtccatatctctcgaatgttctcaaataattaagaaaaccgtcgaaaaaagaaaacaatcaaaagtttccttttctttattcgaagaaccttttgctcatatatactcaagtggaaggctaatcaatatccaacatcatcattcacttctcttcttcttcgaaaacaaaaccaaaaaaagaaaaaaactttttctttatgcaattctcatacagagaggctcgccgataatccatgtagactttgaataagagagaaagagccgatgatacataaaccgaagaagccaaaaacatcttgggagaaaaaggatagcttttttgaaaccatggactgatgagagacatcgatcgtttcgaagaaggaggcatatatactccaacaatctcgcatcctcctctgcttcttcttcttctaggtatgccggcttcttctatctttattgctgctgctacttgttctgcggtttatatttatataactttagggttcagaatatgtagttatggggtatgcgaatatagataagcaaagacagagattgccagtagtacaagtgtacaagttacacaactgagattctctttttcgtggagatcacgctaccaccgtcgtcctcaggttttttctctcttctttgtccttggtttatttgtttgctttttgcttttctaatttcaggcatcttagaccaaagacagagattgccagtagtactagtgcagtctttttaatatgttgtagtacgtacccgaaagaagatggatgggctcaatgcctcaatgaggccgagttttttgcttgtaccagacgaacgttgtgaaacggtaacatttttggaccgtctgagttaattctcttactcggttttctttctttcttttttcttacaaatgccaaacacactctgttcttatcatcttaattatttctgttctccgacttgtgttctcttaaccgacttgtctgtctctcacttgtgttctcactcagacaacaataaaggcatcatcttacaggtaaaaaaatctatagtttgtttaccattaaaagatttttgttagtctctgacaattatgtgcctataattatatcaagctaatgttgacttcaatgatgtgagattaattttatgtgcggttgtgttatttttatgtataaaacaaaaagttatatgttagggtataaaacaatgatgtataaaacaaaaaagtagaatgggttatctaattgttgtgaaaaaacgaaagagagaatatatattttttttttctttttgaatttgtaattaagtaccgtacttattgaagatttatttttattaattttgcagagggtgcacggcgtatatgttatatgcaatgtatattttttttttatgaaggatgtatagatgtataaatagggtgtgaatgtgtctcatgcataaatccataatagatgtatgatagggtgtgaatgtgttcatacatggcacgaacgtgtctcatatgcataatagattgttgattgggtgtgaatgtgtctcatgcatggcacgaatgtcatactcatatgcataatagatgtacgtatagggtgtgaatgtgtgtgcatagattacgtgtgaccgagcgtagggtagtagcaaaaacataaaacacaaaataccaagcgctcgctagttgaaacactcaaaaattcaaaaaatgcggtttttatagctagacaaaaaacacaaaaatatcaaactcaaaataaaaatcactagacacaaaccaaacactcgtacttgaagctgagaaagacccaaatacgtcgcttgagacgtctttatctgaggaggaggcttcgtcgtccgctcctttaccaatcaccaaagagcgagatgcgcaagagtgaccactaatcgttgtttccagatacagttgccggttgacagacttgtattgtagtcggcccggaatgcatcggtagattctatgggcctatggcgaggctttaagcacagaaactgcttggagaaggaccatcctacactattcgattcgctggcatgtgtggaaacacccaaaacacataaaatacgattgctcgaaacactcaagtctcaagttatatcgctagaaaaaacatacaaaaaaacaagctaaaaactgcggtttttaatcgctggacaaaacacacaaaaataccaaacgatcgctagtcgaaacaccaaaaacacaacaaaaatgataacttaaaaaacaaaaaacaaaaaaaaaaaaccacacaccaaacaactttatgcgtttgcgctttaatgctcttgggcgaaccaatggttacatgggtaaaatgtaaccatattaatggacctttaatgggtcaaaaagtttcttatctaactaaggcccaaatacgggaagagatcgatgactaatgctcctggtggacccaatagttaaatggagaacatgtatctcgaataatgggcctttaatgggtcaaacttattatcaatcaaacttctattcaaacaaaggcccaaatattcttgactaattttgctccgccgttaatcagtcccttttcaccgacttcgccattgctaatcgccgtcgagcttccatggctgctgctccatggctctatcgctctttgagaaggagctccattagagttactcacagctttcaatggcttcattgcttcctcatttgcctgatgctgcggtttacacgtgtctgatcacggggtttgggactcagaagaagctggttactgtttacgaactgctcaaggagatgcaagaaaagggacatcctccggatggcaaaacgtataatgcgctgatcaaactgatggcgaaccagaaaatttcggaacatgccacaaggatctacaacaagctgatccagaacaatattgagccatcgatacacacattcaacatgataatgaagtcatacttcatggcgagaaactatgagatggggagagcagtttgggacgatatgaacaattgaattaatattgaaaactaagagaaatttggttttgggttattacaaaaaaacaattacagtattagccaagaaaagagagagtttgctcttatagggtctaaaagaaggcccatttacaaatgggcttgttagtttaaaggactggtgcttctcttcgtcaatggaggttggtataataataggtacgaaagaaaaccctatttgcgccgcatctctctcgtcttcctttactccgtcaaaaccatgtttctaagtcagttccggagctgtaaacctttgctcgagtctcgtctacctttgctccgcctctctctctctaaatgtctcgatcagtccttcaaaaccacggctagtagcgaatacggtagtaagatcaacaaagtcacaaagcatgtcaatgaggaggatggtgcaactttctatgttactcgaaggggggcaatcgatagttctgcccctgctgaatcaaaagcatatccaaaagcagctaatatcagttcaatccatagtatgaggtaactaactcaaattacttgtagataacttactaatttttgaaaggtttattgattaaaatcaactatagggaatctcttctggaggaaacagaggaagactactacagacgcttggcactttttgccctgaggaatcatggtggagaggatgccataaatgttattatagaatctctaggtgttgagagttctatgattcgcattgaggtcaatcaaatttttatgtatatattgatgactttgagtttgtctcattgttctctaactcaaaatgcattttgtttttgcttcttcttaggctgcatttgtgttgggacaattggaatccaaaacagctatagcttctctaagcaagatcttgagagatgtgaaggagcaccccatggttcgagtagaggctgcaaaagcccttggtttcattgcaggtatattcctagaagctaccacaattttgtgtctttaattaattactctttgacattctttgggttttttttcagatgagaagagcagagaagtactccaagaactttcaggcgacctcgatcccattatcgctaaaggttgtgattcttcattgagtatcttggaatttaagaattcaaaaaaatatgaccctctcatataaaatggtgtgtgtgggtctgttgtgtaatgaaaacatctacgtttcatcttccttttgttaaactttgttttgtattcaaatgatttgcagacggtttaagctctgttttaagctattatctcggcctacttgcatttcttcactttctcagtgaaagaatgattaatttttttcattagagtgcacaattgttaattaatattttcttgttatagaagcaaattacaaaaaagctatctgacagattccaatgtgatcagttcagtccaagctgtgctagtgaagtcatattcttgattcaagtaagagttgtggctcgaaaaccaaccatttgcagataagctttctccgagtgagtgagttgaatgatccagttacccgcccccaagttatcaatcttccatgaatctctgtttgcatctccttctagtcatctgagcccatctcgcaaagatctctgctgcagcaaacttacctgagaacttagctctctgtgccaattcctcaaatatctccggttgtccccctctgtggaaatcagctgcaaacttgttataatcaatcaaaggggttttcattcctttgtcaagcatctcctccaagtatctgcatgcctctctcgacttcccttcacttataagccctctgatcaaaaccgtgtaggagttatcgtcaggacaaatccctttcttgatcatctcgtcccaaactgctctccccatctcatagtttctcgccacgaagtaagatttcattatcatgttgaacgtgtgtatcgatggctcaatttcgttctggatcatcttgttgtagatccttgtgccatgttccggcattttctggttcgccatcagtttgatcaacgcattatacgttttgccatccggagggtgtcccttttcttgcatctccttgagcagttcgtaaacagtatccagcttcttctgagtcccaaaccccgtgatcagacacgtgtaaaccgcagcatcaggttgcaacccggaatcaaccatgtcatcaaagtactcaatggcagtttccatgctcgactgtttgcagaagtcccggatcatgatggtatagctacggacattagggcaaggtcccttggatttcataacatggaacaatttgatcgcatctgattttttcatactcctcaacaacccttcaagcattacgttgtgagctacaatgtcaggtttcaatccgtgatcaatcatatcattccagattctagctgcttctatcaagttcctcaccctgcaccaaccattgagtagaacagtgtaagtcatcatattaggtgtaaacctctccttcagcttatcaaacagaacctgagcttcttttccaagctt

SEQ ID NO: 1380 - DNA, 110257 bp, Arabidopsis thaliana
gaattcggcgaagatttcgatattcctgaagctagctcatctactcagtttcgctacagcttggggagctgctctctgggctaccttcatcggaggaatcatcatgttcaagtacgcatctctatctctatccaatcaatttggattctgtgtgatttatttttctctcttctattgactgatcaggaatttaccgaggcatcagtttggtaatcttcagagcaagttgtttccagcttacttcactttggttggttcttgctgcgcaatttcactctctgcttttggttatttgcatccatggaagtcatcttctacggtcgagaaatatcagatagggtttctcctatccgcttttgctttcaatctcaccaatttgtttgtcttcactcccatgaccatcgatgtaagtggctattcccctccaattgcatagaaaaatgcatacaagatcctaatgaaccagtcaatggcctttgctttggtgtatgtagatgatgaaacaaaggcacaaagtagagagggaaaacaacattggagatgaagttggttggtccaagaacagagaaaaggcaaagagtatcccaaagctagctgctatgaacaagaagtttggaatgattcacgggttatcatcccttgctaacatcttttcatttggaagccttgctatgcattcttggtatctagctgggaagttgaatctctagtttcctcctcaatactcatcttgtcacaaaggtctgaccttttacgcccccttaatgaataaatctcttgcatttcctcgccaatccctttgtaagattgtgtcagactccaaacatatttcagtgaaatcatgaaagaaattgttaccaagcactcttgtacgaagatacttcctgtctttctctaaaaataatccatgtttgatagattctattacagaataggcctaagctgcttcacttgaagaaactaaaatgtgcttgtgaatggtgaaagaccacactgtagacactcattattaacaatctaattgggagaaagaagatgatcactagttgactactccttgatgccacgaatcttgttatgagtttcaaagaatctctcccactaaataaaatgtttataataaagaacttgcgcagccattgatcccgctcagctttcatctgcttcagctccttccggatcacatgcctcaaggccttcaggtaagagctcatgtcatggtttcttttgatttttccttccgacccgtaagaacgacgatcactgagaatctctagggggtgtggtgagttaaagaagagaatctttgcagcccttagacttttctctgtttcatcggtattcttagatgctaagagatagagaccacttccgggaggaagcagggggtgtgggggagagaatctctcggatggttgcagaattagaagcttccccattggagaatacaatacattctgcagaataagccaaacagagtaagccaagaaacaacgatctgaagcaaacagcttaagatgtttttcacatttttacctggttattcagacaaggatggttccggaagtttccattcaatgccttgagaagctttgcggctcggttagggtaattgcaggagaatgctcgaggaacaatatctctatgcattgagattccgagaagatgactcttaggcaaaccaagtttctgaagaagcctatcgcctccgcacatgatgcaaggcgaaccaaaagtgatcactggaagcagagaagaagcagggacttgacctcttatcagaagcatgaggttcactaacaatgacaagcttccgcctagagaatgtccactaaacctgagaaaagcacggttcttgccacgggaattgaggtgggcatgaacttctggtaacatctgttcgtatattccttttgcagcttcgtatatgcctctgtgaacaagcacatcaaggtcctcaaatggaacaggctcgaacagaaggttagcttgccatgaggccagtgaatctgatccctgtagggtattgagttcctttcttaagatatccatcttttgacaaatgtaagaccaatcaaagattacaaagagcaaattacctgaataaagaagaacctggtgccgcttttatcatcatcacatacaaaccactcacaaggcggtgaacggtttgatttgagatcatctgcgacggcctgcttaacttcctctttggctgccacgactgcagtaaccgaatcagcagtagccagtagagaagcttcttcgttgtcttgacgtttagatgatccaaaaggaagcacagacttagaatgggaaaagagacgagaggctgcagaagcagcgattctgtaagcaacagcagggttgattagcttcttcttctcctcatcttcctcgccattgttgttctcttcaaccttaagactcatcctcttctcaattgaggatgtaacgaatctcagtttctgatatttcaacagattctcaggctgcaacaaatgtcaaaactaataaggatcagatacagaaacacagaattgagacttttattataatctcacgcaatctcgtcaccttgattttagggattgaataagccaaattccccagaaacgacaatttggcaaacatctgagcatcttcaacaggaattttgcttaacatctccgagaactcaaacactgtcttctccttttcttcgtcttcatcatcatcatcgatcctgcagaaatcgcattcctcacataaatcttccttcttcttaggctcagcaacttcctcttcctcgtcctcttctccaccgccaccgccacctgatcgttgtctcttccctttccagattgatccaacctccaaaattttcaaaacccagtttccgttatcgttttcgttgcggttccggtcccttctctccaacaaaacggcgtcgtcgtctcttaccgttcccttttcctctctcttaccaccgatccgaagaaactcaagcggacgaagacgacgaagggaaacccaacgcggcagagaagcagccgttgatttctcctcaacagagcctccgatggcgcatatgaaagaagaaggtcccaccggtatcatcggagatactccaaccaccgacatttttaagaaaacaccctccattccaattcaaacaaaaactctttccttaaaatttcctcttcttcttcttcttcttcttcttcttcctaaatagaaccgtataaaatacgtatacaccgggaataatccggcgttggcgtgcaagtttgaatgaatctcttgtcgtttttgtttttttctcagcttcctcgtccgatcaaatcttcctttgatagcgatggatgtgttatgtatgttacaaagctggtgaaccaactttaacacgccttaatggatgccccaccgcatcaatttcagaattttactactacttctctggaaactggaaaggttaataaatgtatttgctggtttgatttcaagttttaattccgattgattttttgggtttattatataaagtttgcaatttttgagtaatttaagggatctttctgggtagagctatatggaggacacgtggaagatgaaagcgcctaaagaacttgtttgagtctcccacgtatcttggaacaaaatcaggttgttggactctattagtttcatcgcaacaactaaaacctaactccatcgcctaattaaaagagacacaagtgttttcattattatttatgtgataacgtaactagcgcacaaaaaaagagtattcgaaataggattcacagaaataattcaaatcgtatttggatcatgaatatgcactaatatgattaacaaagagcaaacaaaaatgacaacttgatcaaaacgtccttccgactttgtctccccatatcttttttctttctatattaaaacctaatcatgttatacattaggaccatcacatgttcttctctttaatccccaaacttctaaagagagagagagcgaaagcgagagaagagcactaagcaaagacttctttaatcttcttcttctgatcgtcagtgagagaagacggaaacaaaacctcaaaagtgacaaagaggttgcctttctttgtgctgtagtgaagtggcatcccttctcctttgaacttctttacttccttcggctttgtaattccctgttgtcgccacacaatatttaacccataagatgataattgatggtcattgtttcaagtgttttgcgtgtatggggaaagatattagtgttaccttggaactgatgtcaacttcgtgatcatccaagtgtttgaatgatttctcaaaaccaactagcgcctcaacctgaagaaaagagatttggtggaatcagaaaaatgaatcaattgttggtctatgatgtagagatactgatataagagtagtttgttgaatttatttaccagtgtaatgttcacgttcatgtgtagatcgttgccatcccttctgaaacgggcatgtggtgcagttctgattcggaactgcgaaatgtacaacaatggtttattctctctgattttgatgtttagtgaagtcaaggatagtgaaatttagggaagaggctaaccttaaggtcaccagggtcaccgtcaagaatgggttcgccgtcttcatagaaagacacttcctgaaaagtatttggtatttagaaactaagatcggaaaaatcgataagctcataaataaatcaaaatgaattaaagagctactatgaaacgtagtttcgattgattttacaatgagggtagtagaagttcgatacttacttctccatctttcattcctttctcgatatcaactgtcacaaagtatccctcccgttcgtatttgacattagggcatttgtcacagacctgaggggaagaagaggatacgtcgttaaacagtaattaggttggaacaagaccatctgtgacaattgaacatatccgtcctttacctgctctgtcatctgttggaacattccaggaccaatttgtctgtgatagacctcgttcctgcagttacactttctctttccaggagctggttttatcacattcttttccctccatacctgatagttcaatgtggaacattctcactgagaacttaatgcaatttcttttatttgcattaatgtaaaaaaaaaaactgtctactctaaccaaaacatcgcctgaactgaacctaaagaatgtctgaatgacactatgaaatctagtttacaaatttctattgattctagtacatttggatcaaagtaacatttcccagatgagtaacatgtattagtgatgacaataacatcctgacacggagcttaacataccttcatagagcctcccatgtacaaatcttctagagttgcctcaagttccacaattacgtcatcccccttgacaaccttctcttcttcctccatcgaacctccaccaaaaaacctattaaacacatcaataatctctgcaaattagcaatctgcaccctttaaacacaaatgtaaaacattatccaaatttaggaactattcacgctacagagtaaagtcccttctttaaacacaaatgtaaaacgttatccaaatttaggaactattcacgctacagagtaaagtcccttaacattaccaaattcaattgtatccactatcaataaataaaactcacacgaattctatgttaagatgggttcaacaggatagaagatcagacagatcctagtgaccctgtatcttgtacctctagttggatcctaaagagttaccatttgcagaaaacttacgagctgaagatgtcctgcatattcatgccgcctcctcctcctcctcttcctccatttgcagaaaactgtttaagtccctcttcaccatacttgttatatatctccctcttctcctcatccgataacacttcataagctattacatcaaacaccaatacgtcaattctcaaaactaaaaacgggtgagttaacaaagagagcagaatcacacaagttgcaaaacgaaaataccattgttgatctcagcgaatttgcgagtcgcttcctcatttccttgattcttatcgggatgatacttcaaagctagtttcctataagctctcttgatctgttcatcagatgcacctttcgggacttgcaacacatcgtagtaactcttcctaaatccacaacacagattttctaagcattcacattttccacacatttctgaaggaatcgaaagatgttcttacccggcaaggacgcagatggcgtaggaaagagcgaacagtacgatacacagctccgaccaccgaatcgccatggaaacggaaatcggatctctcccaaggattactccaacctgagattcgtttcgattttaacaatgaaacctcacagaatgaacaagaacgaagatcttcttcgctgatttttatgattggaaaactcgaatcactctctctacttgttttcgtggaaacgattccaaaactcgagcctcgtggtcgggttacgtgtacactgcaatgcttaaccaatcaggattaagtctctgacgatcgtaaccaataaatattagccacgtggataaaccaacgtcgaatcgctgactgttcttttcgtcgactttaatgagtacgacgtcgttatactcatataatctatacaaggcgcattaataatgaagcgggcctgtaactcccctacgattgttattcaataaatgtggcctaacccgattaaaaaccctaggttactgggcccatacaaaatcgagattgttttatgtaaaccgatctggggaggccagatccaaactagttttgcatatttatgcattatggattttgtacctaccatattaaacttgttaatataatgacaaaaccgctgctatgagaaaatttatttctttaatctttatataatctagactatcttagtcacacattacgttgtgcattggttaaacactactggagtataaaacaaaaaaaggtggttaagtaataaatacatattttgttgcttattaattacatgcaaagaaacatagactggtttggacaatcatgtcatatgtcaggtctcttgattcttcgcatcttcgacgaaacattatttactagacatacaataataactagacatctcacacgagtggtcccgatcccccactaataccattttactgtccattgaaaaataaagaaacgttgctgacaatagtaaactaaataaaattggtgtttacatattttccacgatacgaagtaaaatattgagaaagtattacgcttatgattttattaattgttagatgattaactgaatccgaattgagcagtatgattagaaacaagtcagaaataataaatgtataactagtatttaaaaaaaaaaaaaatgtataactagtatttaaaaactatagttagcatctaattagagacactaggacgacccagctggacagctggttagtagctctcgacctatgatgagcgcctacgacttttgtttcaacatagacaaacgtggctcgttctatcacctgaatatataacccactcctctctattcttgcatgtcactcctataaatatttaatactaaaccaatcactttttgttgtgtcgtcactttacttctctttaaataatctctttctctagtgattgactttaggaacaagtgaagtgagtgatttttaataatcgccggccgagagaatgggaagggcgccgtgctgtgagaaggtaggaattaagaaggggcgctggacggcggaggaagaccggactctctccgactacattcagtccaacggcgaaggatcatggcgttctcttcccaaaaatgccggtaaagttttttttatctatacagtactctgtctctcgactatcgcatgcatctcataagatagtttttttgtttggtcaaaatttataagagaatctatatgcatcgagaagttaattaatcttacgtacggttcaattatacaccatgagttgtaaaaaaaattaaaatagagacttgattttttttttttctatttaatgtatcagtttctataaggaatgcataatattttaaagtacataaagtgtttattgataattcagaccaaattgccttcttgttttatttacatgtatatatggactgtaacatcacaaataaaacgataatttatttcaatatttaggaaaagatgagtaatcgctgcaggcattattatgccttaattaaaatctgacgtacattttaaaaagggctaaagagatgtggaaagagctgtagattgagatggataaactatttgagatcagacatcaagagaggaaacataactcccgaagaagaggacgtcattgttaaactgcattccactttgggaaccaggtaactttttcatttgaacaaaagtttattaatgtcgatatatttccaatagaaaaagtacactatcacgtgaaatcataaatcaaactgttgctgtgtaacgtcgtgaaaaaaaacgtttttacaacaaaaaataagaatagcgtcaacgctaattaaattgcaggtggtcaacaattgcgagcaatctaccgggaagaacagacaacgaaataaaaaactattggaattctcatctcagccgtaaactccacggttacttcagaaaaccaactgtcgccaataccgtcgagaatgcgcctccgcctcctaagcgtagacctggaagaaccagcagatccgccatgaaacccaaatttatcctaaaccctaaaaaccacaaaacccctaattcttttaaagcaaacaaaagtgacatcgttttgccaactacgacaatagagaatggagagggagacaaagaagacgcattaatggtgttgtcaagtagtagcttaagtggagcagaggaacccggtttaggaccatgtggttatggagacgatggcgattgtaacccaagcattaatggcgacgatggagctttgtgtctcaatgacgacattttcgattcttgttttctattggacgactctcatgctgtccacgtgtcctcatgtgagtcgaacaacgtaaaaaactctgagccatatggagggatgtcagttgggcacaaaaatatcgaaacgatggctgatgatttcgttgactgggactttgtatggagagaaggtcaaaccctttgggacgaaaaagaggatcttgattcggttttgtcgaggctgttagatggagaggaaatggaatctgagatcagacaaagggactccaacgactttggagaaccgttggatattgacgaagaaaacaagatggctgcttggcttttgtcttgaaagatttgacaccatgcatatgcctttttctccgttagattttagcaaagaccccacgtggcaggatctggtcggtttgtcaatagaacatgtttgtcccctagcgttcgttttttagttttaaatgtatttatattcttttttatttcttttcatgtgtaaatacgattttggcggtggcaaataaacaaaataaagtcgatcttcttagttcaattacatataagcgatccattgatgattacaccattgatagccaacttaagtaatctttcgactttcgtatatatgtatacaaatataataagaaatttaaaatacaaaaaaaatataaataaaattcagttccatattgtgaatcagcaattctcactattggtacatagtccaacacttgctagttgcattctaggtggaagtatttcaaagaaacaagtttctctgatagactaataatagaccaaaacccgagcaaatttcaaagcatgtcgccaaccacaactcttttttgtgtgtaaatgttcactggtaaagtggtaattaatgaacgttttgaattttgattaaaagctataagaccatctccaacgagaggatgtaatcaaaaaattgttgggctctcttgtttaatgacaataaaaataaattaaaactgataaaaatcaagagagtcggctttctggagagagttttgagaatttgagagaaccgtcgatgtggcaacatgtgattgggttttcaatttcaacaaaaaaataaatgtgtgcgcgttctgttctatcttctttctcctctctgcccaaacgaaattgaccaaaagatgcaaagcccaatcatcgtttcttctgaaaacttttcgcatttgatatcttttctttgaaactgaaatcaagatacacaaactgaaaccaatttgttcaccaaaagaaaataaaaatgcgtgggtttcgatttcaaagatattcaggaaaagatctccgatagctttcgtctatggcaacactcttttcaattctgggttcgagcttcgtggttttaaaagcttgtaatttcgtgtgatcaagctcctgcgacgccgtttgatgcgattcaactttgaaaatttgatgaaaagcctcttggttatgcttctattgctcaggtattatagattatggtggaaacttaacaattaagtaaacatgattgagttagagtatttaggagcttgtaaagcagaaggtcttggtgatggacccataatgaagctgtatatttatgttgtaattgaggaagataatctggtcataatgctttctagaattagctactcttgccgtagaattattatctcttgacgtggaattgtagcaacattgtcaaactctggttatgtttatactaagacaatatcatttatttgctttcttaggttcacagaggaagtataaagggtaacaagatgaatgttgttgtaaaggtgaacattatcggaagttctagatggggctgaagcctctgctcgagctatgacagaggtcgaccccaaaggaattttcaagtccacgggtctgttttccttttactgatcactctgttttttttcctttaacttatctatggagtaaatgtgaagccatactagtctcatttgagccctctaaaatgcaggctatggtaactatttgtttatgcttgctccgtcaaccaatgaatcattcagacaaatggtcatttccgatgcagtctctgttttgatgccgaggtaactgagattacttatggtaactctatggttcttgatcatggttggattgacactttgaacaagaaatgggatttggttcattgcattgaggttagcttaggtttggcttttaataaagtttctatttgagtggaattgtaaaatagaattgatgtctagtacgtgtttgatgaaattcctctaagagtgaaccttaaatcgtgtgtattaagctttgtttcttgataaacaactaatgatttagagttctcttcacgttattgtgatggaagttttatgttcatacactcaaatgttcttttatgttcgaactctttgctatatatttgttgtaaccaaattttaaccataacacttaaacacataatcacaaattttcaaaactttatctacaagtttaagaagcaaaacactttaaccataagtttaagaaccaaaatacataaccacaagtttaaagaaccaaaaaacacttaaatttttgttcttttttcaaatctattttaaaatgtttgaaaaatgaaaacaatgtatatttaatattttatgatttgcaataattattaagttttagtaaataaaataattttaaaagaatagtttttttcagagaaccccattagagagaatctgtcattggaatatgaaaaactaaaaaaaaaataagcaaaagttctcttgtaatttttgttgaaatttaatcaaaaaaaattgagaaaacctctccatgagctctctccattggagatgctctaaaagcttaataggagccttgccagttgccacaacttatacgactaattcagactctctcgtttcttttaaaaggatgatattgttcctaagcgtagagtagacgttttagtaaatagtaattgaggaagaaacaaaaacacataacgagggtcgctatctttcgcttagaagtacgatttggtccattgtcattgtcacttttgtaatgcctcacgtgatgccatgcacttttgtctctcttatttatttcccctttttttaccgggtgactaaatgatacttcaatacttatttacatagaataaaatcttattaagttcatgggaccgatggaccatttctacgaattaaccgcaaactatcggacgcatttcatatgccgacatggtactatagtagaagaaagaaaaacaattgtaatacaaaattatgtacatcatatacagaactataaaacgcagaaaaaataaataatacaaaattgtttacatcatgtaaatgcagaaaatgtaaagctctctagtacaaacaaattattgatgataatgttaaattcctattggttaactcatgagttagattaatagaaagttagaaacggtaactgtatatatacccaaaataatgaaatatatcaatagaagcagtaatacgattagcggctaacaaaaaaaagaatggtattaatatatatatattttttttgtcggcaatggtattaaaatggaatttattgtactatcattttaaagggcccaaaaatggcctataaaccaaccagacaattgcacacatttgtcggtaagagagcacaataaatcgttttaacaatgggtacgaagaagcctctaggcccaataaaacagacctagtaagataaacaggccatcaatacggcgtcgtttgataatattcaatcggcgttagaccaacttcttctcctctctttcttcccggcggagcgactacgatgtttgcggcggtgagtgtacgagcttctctcaaaactttgttccatggaagacacagctcatcttacagccgatattgtacgttattcgttaatttcttgtatcaatccttgctctttcgagagattttcagatatttgaatatctggaaaatgacacttttcgcaatggctaattcggagtttctcaggtgaaattgcagcgatttcgaagcgtatttcacaagataggtgaggtttgatttcgtatttctcactttcgtcagtgtttttggttgcttgacatggtttcgttagggttttagatatcttaagcttagaaacaattgcatttgagtttcttcttgttggtagattcagtgatggaaatcggattctgaatagcttgaaattatctggaaatggagtaggaatcaaactgttcaactgcggatttcatagttctccacagtgttgtacatcagaatctgatgtaggtacgcttgttaaccagaactttggtgattgagaatataacaaatttgtgctcttgataatggttttgcctttgattctttatctgcaggagtgaaaactcatgcacctgcgttatttagtcatcttgaggatgattatttctcagagttgggtcctgtagaaaaagaagtggatgagaatgtgattgtgaagatgttaactgagaagccagtgatatctctggtacgatttttaatcgtcattgagatcttcttctgtgttcactgtatctatccttaggatagtcagcgacgtgcttcacgcagctctggttttatccaaaaaagattatattttcttagttgagctgagtttgtttgttttgccagaaaactaaaggcaataagaaaaagaaaacgaagaagcaggagctagcttctgattctatttccaaaccaaagttgttgactgaaaagccagaagtttcttgggtatgtacgtttacaatatttgattttaagtagcaatgtttgattcgaaaagatttcgaatgctcataattgtccttaatccattttcttaccagaaagtaaatggcaagaagaagacggaagcaaatgcatcttcaccagcaaaagatgctacagattcaaaggtttcattctccaagccaactaagtcatcgtctcaagttcaagatcagaaatccaaatctcaaaagaaaatcagtcccagttctgagccggaaaacgaaactatctccaagggttctgcgacctccaatacactctcttcagtactcgttataaggattggtaatctaaactcgaaaacagctgattcattgatacactcgatgtgcttttcgattggccctctcgaagggcttactagggttaatgaggacactgttgacgttttatttagattgaaagacctgaaggaagcagattctatactggaagagtaagtataactgaagaaaaaccagtcttatatggtttttgattcaaaaatccctaaagcttttcttagttctttgttgaatcacattgttacttgttaactctctttttttctttccaggctaaacgatgcaaccgtagataactctcaatggacggctgagattgtactggaagccgaagaagcttccaaaaatcaaatgggtatgaggatcaccagttgtctcgaagatttggataagcaactgttaatgcaacgcattcttggaaaagacttggaagttctgctccattcagttatgcatctggaaaatcacccaatggctcgaggaagagactaatgtcttttaggtagtttttgagtcttgcagtccctttgataatcaattgaattgggggttgatttaatcaaattttaaagtaaggaagtataacgaaattattaccaattacaggcggtagtataaagtttttcagtccgtttttgatggcggtagtctttgaaagagactgtttgggcctcattttttcaagcccgctaaagtagtgcattaatgttaagcccgttaatatttacacttttcgaatgagtgatgtttctgttttgtgtttgaaagtagtagcttctgtttagtcttttcattttctaatttcgattagtgtttaaaaattttaatatcccccaaacataaaataaatagtactatttataatttatatatattttgttttattaagtccacttgcaatatatatatccagatgtctgatagtgataaaactgataatgatttgaacttgagaatgtattaagcgtttggtcacttcacggccatcatcccagatgttttataagttttctatatttgtaagtatcacaaatgtataattttttttccccaatctttctacacctaaattatggtatcagtcgttataaaagaaattaaataagtatatatatgtatgatatttttattatagaaaaatagaaacaaaagcttacattggttattggaattagaaagttccccactcataaacagtgagacagatagatcagcacagctaagcgatgaagtgtacagttacacagacgagattgattgaagtgactcttccctcgtcacttattttgcatgcaacttgtgtttcttttatttccctataaatttttctagtattaatccaaaaattaagataaaaacaaatctaggtaaatattaatgagacttagtttcttgtttaagtttctgtcttagagctagtaatgatgttagaccggtcctatgaatgattatagtgtttccactttccaatacggtcttgtatcatacaaaaatagttttgtagaactcattattttattctgacatgagttaaagaaacaaataagaacaagtctccttaaaatgtattaaggtcccatgacatgactgactttaatgtaatctgtctcaaattattactcttattgagaatcatttggagaagaaagaaagaaaagtgagattttctcttttcagagtagtgggtcatgttaaggtatggacctcctcctctgtttttactactagtcccttacgacaactcacgtggccttttttcttttgttttctaaaatttcacaaatgtaatcagagagactacttaaataaaaatttgggcccaaacggagacaagttcatgtgggttgaatcgtatatttcagatagataagacagctaaatgttttctctgatgtgcggtggatctttaaagtcgctatacgtgcacgtcatttctttattcttgttttattttcaacgacacttttttttgtcgcagctgtggcagccagaaaacgacaccgttcttattcccgtcactcgtaattattagttagaatttcaccacatttcaagataatgtagtaatgcgaatcataactttgaactagggacatccaaccatatgaattgattttgataatgacaagtaaatttggtatatataagagcaactaaaagtatgatatgttgtgttaatcaagaatagatattttaactaaaggaaacaaaaaccatacataactcatggtggggttcttcttctcaacaacgagttgatgtaatatggttatgaagtgtgaagaaaaatcccaaataatagatagagatatttaacaataaagcatatatgataataatactaacaaaaagacaattagataagacttaaaagatgcagtttcaatcaccaaatgttaataagacaaaccacaaatgggtcatgtagatgacgaagatgctctctcttaactctttgacacacattactccaaaacacaacaactcactcatggccccaatttttattttaatctctttcctgcagatctcacagagtagtactacttacaaaaaataattgcactctctctcaacaaactaaaaccccacccaccattattgttttcattaccttgtccacaagtacactaaaacaaaactcacaaagctgttactacaacattactgtaaattttagattctgaatacattcccaagaactagaagagaatcatagtaatcaaatctaagaaatgatggaatacaatgacatatactatagtctatatataacttaaggattcataatctatacataaaacatttgcttaatctatgatttaaccagatgaaactgggtttaagctacgggctaaaccgttcaaggcactgtaacctttggaactaaaccctaaacaaccaaagagtccatgcctgtaaggcaaatatgttctcttcttcatttcctctgcttgagctctgttcgttgtgtaatgtagctcgtgagcagacggctgcaatcctctccgttttgctatcccgttggttggttttccgttaaccggagctttcttcgccggcggttgtttctgcttctgcttctttgattccacggcagcgtcaactgtttcttgaatcggtttctcttcaagttgagatgatttgagtttcttgtctttgaaattggaaggagagaaggaaatgttggaccagaacttctctttcccgttgcctcttccttcgcttttgcttctgtgaagcagatctttaagaaagatccatttcttagagtttctaccgtaagacgatgatcgtgaagaagaagcagaacaagacggtgtcgtttcagctgaaggcacgttttcgtcttcttgaagctttcttatacactctttaacttctctctctccggcgacttcttcttcttctccttcttcttggttccattgatacgctgcgtttcggagcggagagagggatctggccttccggtgaacagatctgcttcttagtttcagatctctcccacgcttcatctcaccgtttggtttggtctcatcatcgtcgtcttcttcctcgttctccagatctagaagcggagataagatctgaggtctctgaagatgcgaagagagcttcattggcttgatctggccattagagaaaagctcttcagctgaagtcatggaaacaccgcctaaaggaccactgcttgaagacaacctcgacgagaagtcaaactcaaagtcgccgcatgaagacgtgtcaagctttttaggattctccgatgaagaagaagcagagcaaaggaagaaatgcatcggactcgacggtgcactgaagaaataaccaggcggaggaccacggccgggactagacggagcgctaacgaacggagtagagcaagcagagccagaaccgaagtcgtcactgaaacgcggagtatcaggatcgccatgggaaaaactctcaacaagatccatagtagagagtgatagagattgtggcttctttctcaagaaaatgttttatttttcttctgcagagagcgcgaagagcgaggagagaaagaagcagagatatgcagtgttgtatgtatgaagctgcttttttattctccctatttattgaccctttttctttatttattctgtagtaaaaaatattcttatgctattttcctgtagagaaaagtatacgtgatcttttttttttaataatcctgacatgttttgtatgcatgaattataaagttgaaaatctagtggtcttaattaatatacgtaattcatttgataatttaggtacgtaatgctatggttgttgcttaggattctgcaggctgatccaatagaatataaaaaagaagaagaatctctacggatgtttttggattttccaatgtcgtttttacgagtttgcccttaacaatctttctaatctttctttaattttctcataattaaccattgataattctaattggcttggttgatatattaagacacaacatttattttgttacccaatgactcgatgagtaaaaagaccaatgctctagagtctagtgacattcaataaccagaatcaattcaagtcggcttataactttttctcctgacatataagctataacttacttttcaattttaatttcaaatacaaagatctgatctcaataaataaaacgagcccaaaaccatgttcgtatttgcgtctttattatcggatcagtaaacgatttcaaattttcgaaatgtaaattttttttatctggacttcaatttgttgtttacattttttttttacatgcctacaaaaagtcctcatacgtcatttttttttttttttttggtgtaatgtatgttgatagcaatttatttattggaaataaacgagggcgtgcagaatctggagaaaattacaaatgattaacgacaataacaatttaaaaatcattcaatcacaccagcggggcaatattgggaaatcagttaaggttattttaggtaaagcgaataaagagaagacgtggcttcacgtgctcagctacgatcgtgcgtcgaaggtgctttggtgtcctctttgtttagttaaacaaaaagatcacagttcccgatactgtttaatactctctctattcgtacttactaaatgggccagagttaggtgttatttgggcttcattaagatgtaaaaaagcaataaattgggccacaaacatggaccgcgtttgacctgaatcgcgttgtacactaaatttattttctctcatacaacgacatcttgctttcaaaatcaaatcaaaacactccctataacaaatctcttttacgtcaacaaaaaaataatatgtcgccggagattatcgccggtgacaacccaagacacgaaaaatcaaataaaaagttaaatcatccgtgtataatatgagaatacctgtctttgatccaatgaaaccctttcttgaccgtggatttgacttttccttccaaagcgtaagtcttgtacgtagcgattcttttttttctcttcgtttccgcatcgattaatctccaaggagtagcagttgtacgtgtcttcgatgtagaccctggtggaggcggaatagacggttgaaactttggtgagtcgggtcgagttgagtagacttgggttgttccaccaacgccgtaacctttaccattaactatatccatccattgatcaacggcgagtgttcttggatgcgacccgaacccgtccattttccggagcttcgtccgaataggaaagaagcaccggtaaaaggaacgaaatcaaatgattcttgatttgggaatgtgagactaataaggaaagaggtgagaggtcatgcgatcaatgaggcgttttttcgtttttttgaatgaaggttaatttaagtaaataaaaaatagattagtaaggaattattttctgtaatgatgacaaccaaagttccatcatccatgttgttaatattttcgaaattttactgtatttttagatatatattaagatttcatagtttatgctttttgtatttaagagtgtaaatttaagggacataaaaaagattgtttgtacatgcctggagatgagagatgcaattgggttatgtatccttagaatattcggcccaacttttagatagtgtattagtctcatagtaagaacaacatctggttgatttatgattccaaaacaaaacgaaacttctgtctggtttaggcccatctagtttctgagcacaccacatcacattggtttgtgacatatgcatgtgacaattttgattaattagttgcagaaatgcgtttgatgtaaacaaaagacagtattgcacgcatttcccgcgagcggtgtgtagggaatatatcgatttgatcgaatcacagctcgatgatctcattaatgtcccctctacgttttcttaagtcaaatgtttcccaccataactaataatgtacttatgtacacatgaaaccgtatgtagcctcacctaaaacatgctacaatttatttgatttagacattagaatatatagtaatttcaaaatattaatactcggaagatcttatgcagcacagaagaatacaatgcataattgttgttacatatacatgcgtgtgtctctcaccctctatcttatagatttgcgatgaagagagatccaacggttaggatttactggaggctttgtcacatgggccatggcccatagggagtctcgtcacacatcgccattattgctacagcgatcgattcgcgctaaacgccagtacttaaaataatcaaagtattcgttagacactaaataccaaaatgctgaaattaatgaccattacgctcatgacatgaatcacatatagtcaatcaaagaaggaaatcaacgctagttaacataaatataaatcaatgataacgcttcttcatcattattcagaccattcgtttcagataagaatattcgactgacacaccgttacctgcttacttgtagtgcggaaaagaaatttcatatgcatatgcataggtaaaaatattaactttcattttctttgacaaaaaaaagatttaactttcattttctgtaaaaataaaagtgaatcggatgtccagagagggacatcgatcattcattgttggatttattacttaactataatcgttgtaattgaaaagaaagctttaaaaaagaaaagaaaaaaatgtgtatcaatatcataccgaaaattattacgtataatcgcatatatatagatgcgtgtaactaatcacgtgtatgcagctgcatagacagtggatttaaccatttaggtcttctttagtcattattataaatcccaaccaattctctctctctctctctctctctctctctctctctttttaattcctcgttcgtctcttaaacttagctatagggagtgatggagataacgccgaagaggtactggaggaggtggagaggatacgagaagcttgatgggtcatcggagacgacttcgggtcgaaggaaaggcaaaagggtcaaaatggatccgactcgcaagaaacgtttttggaggatcaagattgtgccgaaactgaggatccttaaaacggcgtcgccgaagaagttcttggtgtggctacgtgattcatatgttaagatgatgatgcggttggctaactcacgggttgttggatcttctggatacggtggatccggattcgggtcaggtcagatgaaggagtacgatgagaaaatgcttgtggagatttacaagtcgatactgatggtgcaggcgcaggggaatctcgtgcaccgcgacacacctaataataatcttaagcttccttcagaaccagcggttgtctctgtcgtatcttctgttgttacttgttaggtaataaagaacaaacaattatcctttcttctttacgataaatttccaatgttgagaatcaaaattgttgacttgcttgatactatttcgagattgatgataggcaaagtttgtgattttgatttgtatcaaatttatatatatataaaaatagtacaagaaagaaagaaagaaataatagatggtggattgtgggtccaatttatttaatgcgtttttaatttatctttcaagtttttgtataaatctatgcttctgaaattataaagatttgcatttacatcgtaattatttatggttcgtatagtttgttgtaccaatcttgtcgtatgtgtaatttatttgtttcaaatcgtctatataactaaacctgtaactaatctaattttgttgactgttttgtggaatttcggttgaccactcttgttcaatgaaagaacggaagcttctcaatgagagggagggttttggtttggcatttgtaattttcaagtggataagtgatgatgaatcaaaatgagtcagcaagcacgtattgtgtttctttcaactaacttaaaaacctgaaccttaatacctaatcatgtgaaccagtggtcctaaaccttactttaggaagcatattaactccgagttttaatttacgacacacaaaactatataatatcctattaaacacatgattagttgttcatcaatagttagatattatacgataaactaattatttagagacgatgtgtgaccttttaacggattattaccatatttgggctaatctctctgtctgtgttgtaaatttgactcgtcgatgctaatcgagaaaatgtcacgaggtctttaataatggaccatgttgggtcaaatccctttttttggggtgtaatcttaaatgcttgggctaagtttcgagcatacgaatatacaatgggcctaaatgttttaaatgtggctatttctgccgtaaaatagcctcagttatgaacatgcatttaaacctgaatttggattgtaaaagtgttttttttaatcaaatcatatttaagaactaaagtacataagtaaggtgtgatgttgttatcgatcatttacacatctagtactgactcaataaatttggctaataatttctagaagaaattaataaaatgaaggacacttgctattaaactcttcataataactaggttaattacttatgacgcaagcaatgaacataacgaattatacagtttccatgtggttcctgcctaaataaattagccatcgttatgagttgtgtgaccaagtgttggaggctacactgaaatttcatatgcaaataaatagtggactttattattctgttcccccacgataatatataaatagatccaatgtgtgcatctcaacaattccgtggatttttaaaactagctgtatatataacttctcctcactactacattttataagactcaataaagtatctaaacgaaacttaaataacgacacgataaaagaatcttcctgatttatttatattaaatttatcttaattgtaatacgtgtatgtatatatatgtgtgtgtacctttggttatatacaagttaatcagggacttgacttgtatacaaaaagtcccattagctcataagcgtgaatgatagaatacttgaacgttattgttgcacatggagtttcgtggtcggtccataaaagaaaacaagtaacataatatgaaacatttatttattgattctatgatcttgtaccacgaacatttctatacttgtactgcattgtccggttcattttgtaataaattcttgaaatatagtatagttatacaatgacatatgaaccattcatggttgttatcagttgtgaaatatatatgagtttacttgtgtaatgaatcgtattagtccctcacaatgaacatgtgtatagttgtcttatacgaccatttttaatttaaacaaaataggacatttcaactgtaatattggaatatcatttatattcgaactataatattaaaaatgatttctttctttgttttttaaaaaataataagaagaaaatgacgaggcttaaagtagacgacgtgttgtaacctgatggttataaaaataattgtctttggggtttgaattggcttcatatatatatgttaccgacatagtttccacatatgttaagcaatactatatgatattcagttataaatgatgacttatacgtttgatatactgagatcattcacgcataagcacgcataatcacgcataacagtgatttgttaacataatcgtttcgtcaaatatgcaaactaataaaagaattcatcccccaaataagctaattaagtgaaaaacttgagctagcagatctaaccaacttgtttgttttgagattctggttaaacatccataggtctgatataaagatctttccaacactgaaaaatctctttatgctgagaaatctgaacataagaagaagaaaaatacagttcaaagatcacaggaaagtaacactcctattatctaccactcatgagtcatgaatcatggggttcacttgatctgaaaatctacactttatcacatcaataaacaaactaatataaagtttcaaatgcttgagatatgaatgtaattaagttagcttgttaccgaatcaatgtttctaaagtttggttgtgtgctactgctacatctctctctataactaacaattacttgttccagctgaattagaaaatcattaatttatgtcaaatgtatttagccgggaagtaattagtaactctacttcgtctctacgttataaatcattaaataaatgttggtttagtataagtaaacaatatgcacataagaagtagtaatactcaaatacaccaccacttaattttggttcaacggaccagaccggattatccgggttgttgttggtcaaaggttagggatggttttggtgccgagatgacacattaaccgccgaacggtattctaagcacctaaatacaagcttatcgctaatgtcatgatgacgatcaatttctttatttttcttaaatcacgtatttgtcaataaactcatgaatcttttcagtctttgtttgtctttaatttggtttagttaaatgtttatgacacttgtacctatatttataatttataaaagtcagctataagaaatgtgcataggcttatctaattcaaccgatggctgtttgattaggattttggtttgcgtttggtttggaatatttttttttctttccatggattttttttaaatagtttgtattttggtctagatttggcttttaagcatataaataaaaataataatatgtattagtgttattgttgtgtcactacttcatattggaaaaataaatagtactaacatagaactaagtaaatattaatcttaatttaaaatttgatttaatacagattaaatttacaaattataatttaagggcattaacattaagattcaattataattaacaggtattaataacaatttttttacattaaaaattaatttgatggttattgaatttgaaatagtataatttacttatcattaatttaaattataaaaatgtagttagtattaaagtgtaaagtttagtgattaaatctgagattataattaaatagccaaatattctatatacatattataataaatctggacagattatatatgatatggtgatgtatttgcataaacgcaaaagattttttctaccaaaaaaagaagaaataaaaagatatttttccaaaaatatgtcaatttcaatcacaagtgacaaaatgaatagagataatatataaacacaagcattaggctgtcgagaaaacataaattttctatgattaggccatacaaatcataataagtagtagaaatacaaaaaaatctgtttgttggctaaagagaaatcgaaggaattagtcttttcacccatttttctctctctgtgtggcttcttcttcttcttcttcttcctatcaaaatcatcatcatcatcttctctatattactaaaatagagagagccaacaaaagagaggagagggcgtaaaacagcagacggtggcgcaccgtagcaccgccccctcctaacctgcgcctttcttccttctctttcattttttttttttccggtttcaggaattattcctctcctcctctctcaggtcgcttcgatcccaaggcaaaatagtttcctgatttttgattcttaccttcgattttggcttcttcttcttcttcttcagatgcattcacctagaaaactctggcggacatcaaaggaaccctagcttttctccggtcttgttatatcgcctctatcgccgccgatcggtggtttgatttcaaatccaagagaaagaaacgcagaggttcatttctcaggatgctttggatcatgagattctccggtttattctccgccgctttggttatcatcgtcctctctccttctctccaatcgtttcctccagctgaagctatcagatcctctcatctcgacgcttacctccgtttcccctcctccgatccaccgccgcatagattctccttcagaaaagctcctgttttccgcaatgccgccgattgcgccgccgcagatatcgattccggcgtctgtaacccttccttggtccacgtcgcgattactctcgatttcgagtacctgcgtggctcaatcgccgccgttcattcgattctcaagcactcgtcgtgtcccgagagcgtcttcttccatttcctcgtctccgagactgacctagaatccttgattcgttcgacttttcccgaattgaaattaaaggtttactacttcgatccggagattgtacggacgctgatctcaacctccgtgagacaagcgctcgagcagccgttgaattacgctagaaattacctagctgaccttctcgagccttgcgtgcgtcgcgtgatctacctagattccgatctaatcgtcgtcgacgacatcgcaaagctctggatgacgaaactgggatcgaaaacgatcggagctcccgagtactgtcacgcgaacttcacaaagtatttcacaccggcgttctggtccgacgagaggttctccggagctttctccgggaggaaaccgtgctacttcaacacgggagtgatggtgatggatctagagagatggaggcgcgtagggtacacggaggtgatagagaaatggatggagattcagaagagtgataggatttacgagctgggatcattgccgccgttcttgttggtgttcgccggagaagtagctccgatagagcatcggtggaaccagcatgggcttggtggagataacgtgagaggaagctgtagagatttacatcccggtccggttagcttgcttcattggtccggtagtggtaaaccgtggtttcggttagattcgagacggccttgtccacttgatactctttgggcaccttatgatttgtatggacactactctcgctgatgatgattgatgatctctgttattacatattattatagtctcagtctcagctggtaaattctctcatctcctttgacaaaaaaaaaaacattctttcttctctcttttgattttaccaacttttggttggaatttgtttcgttactctgtattctattcgattgttctgtgcatcaaaccataggatacaatcagatttgttgttgtacaaacttttttaccatatgtttctttaatataattctgtcatcttttttacttgaacaaagattacaaattaacagttcgttgaaaagattcaccgacagtctctatttgtttccctcttgaagaacctggtctacaatgatttttatttatgaaatgtttgaaattggaaaaagattttgcttcaagtcggaacaatgatggaaacatggcagaaccaaagtggaagaagaacacgacactttgaagagtacatacgttctagttaaaacatagtgtcggtctctttgcttacttcacttttttttttttttttttaatctttttgtttctctagtgcttgactctttttttttttttttttgatgggatgattatttataataagcttagtttgaattgatatataaccttatgatggtataaaagtaaagaaagcgtcacagttagattgtttttgtcctcctctggttggttcttaaccaaaagtaaagtgctttacacttttaatcagattaaataacacaaattgtatttgaacatttgttacaaggtagtgggagttattgattgattaattgatttcaatattcggtgaggtctttctccgaagcatatatgttccccttttttagaggaaaaaaaaacgaattttattaaaatgaaaaatccttaattattgcgttagtgatacggaaagcttcgtttgattattgggatcatccataatgatagagtgataaattaaatatcataaattttgaaagaaggcaaaaaaaaaagtgggggcaatttttatgatatttctttttaggttgacccaaatgagtattcgaggtgatgtggaatttaatcttttaaataaaataacaataaaactggttatttttttttgggtttctggtaaaaatggatcccacaaaagtgatctcctggcagcacacgtggccaagttgctgtaaccttctcctggaatcagctgcttccatgtgctccgtgtcactctccaagctgtctctcttttgtcttttgtttgtttcggttcttaatttttgtggtcatcggttcttaatcctcaacgttatcactctttttcatatatcataattttgggcaaatggtcgactgtattaagcctactatagaagaaatcttatataaaatcaaataaactggtacgacatagaaaaccttgttggttcgtttatcttttttgaatcacaaaaaataatataagtgcttaatcgtgaaaatttgtgttaaattccaaataacacatatgccactgtttcagactatttatttttaacttcaaaatattaatatctcgcaaggcccataatatcctaaactgacatttccatggtaggtacttgaaatttcattatgctcagaagttaacatatacaaaatttggatactaaaatgaaatcgcaaattttattgttgtagttacatagcctatatagttttaatgaaaacagagaaataaaatatcgtttagtttctgtaacaatatcgtcgactgtaaaaaaaccttaaaaaaaagcctctgagcgttcgaatacaaaactacatactaatccaaacacagtgagtagtgtccatgttgacattgagattacccacgccctaaatcaactttatatctacgcaagtgattatatagatctcactattaaaccataggtttgaccaaagtttaaaaaaaaaaacctagtgcttataacaaaggcatatagcaacaaggtattgctattcgcgtttgagggattaaaagagagagacacaaaaaactaggatagatagatatatagatggattcatcaccttagattggataatcaattgtgaccaatctgatcgaaaatgttgaatcctgcaggtgggaaacactcgtcgataccgaaaggtagatttgaattatagatcatgagcggctcggaattttccatggctgatgatggcacgtgtctagattcttgcttggttagcatggcagatatactatttagagtagactggtactgttgatgttgctgctgctgctgcagctggtgctggaattggtcaatataagtggaagggttggtcatgaagcagttgttgttgttcactggcaggcaactggttgatggatacgggatattgttcatgaaatatgatcctctaggcgcagcttgattgtttatcaaatacgatggtgtagcatgggagcttaggagcgttttagaggctgcaagagtgacatctggcccagcattaccccagacaaaatcttcttgaggctcctgaggagtgcaggtctttttggaactttgacggtacttctgccatcggaatcgttttaaattgttatagcccttattactggtttcttgtccactaagaaacaagaaaaccctaaaatagaataaagatccaaaattacctggagatgactggctacgttgtttctagtgagcccctggacattcaattcttcttgcatatatttgagaatcgtctttggaaaagcctctgcaaaatgcaattaaaaggtcagataataatcaagtaacttgcttattcacgcaagattaattagtgtaattaattactctcaaggctgcccattttttcgacggctacttcaaatttgtggtgaagttcaggagtccattgcatccgcggtttcttggtcggagacttctcttctttgtgatcgcaagtgtttttggagccttcttcgttgctctcatagagattgtcttgctctaaatcgtcgtattcgtccggatctgattcaaccgtacctgattcacccggtttatctaaaccagattttgacatcctttttcgataaacatgtcgccatagaactgcaatgacctctttgctcaccggcttcacaagaaagtcacacgcaccgtacttaatcgattccatcaccgtttccttcttgtattcatgagacatgacttgacatgaataatttcacattggatcatattaaagattagagaatgtcttactacgttacgttatatatatcgagaagaatacaataaaaaatattggtataattaataagggatatatacttacttactacgggtaaatccatctgtttaccaatgatattgagagcgtcgagtccattgatatcgggcatatggaaatcccaaatcactagatcgatctcatgcttattcttcatcaagaaagccatggcctcttctccgctctcatatttcgttactgaaacacgaaattaagcataaccatagaccgcaattaatgtaaacccctcaattaccgaaaaaaaaaaagtaacgtaaaaccctaaccaaccttaattcgtcaaagaaacataaaaaaaaaaaaaactaactcaatctacctagataccttgataggaatactgtgtcatgagattcttcaaagacgaattggaatctgcaccgaccaaaagaaccctattacttttagtcaagaactcttcgtcgtcgtcgttgatgggagatgcaattccatcatcacaaggtatttcgtttcgcaagttgcgagagttctcatcgagtatgttcgaaaaaactgacattaaagatagaaaatctaatctatgaatgcttgaagcgcaaggaaagagatagagattgaattgaagaaggaagagagaatagaggggtttatgagcgtgcgaaaaactaggtatgcatatatatggatcacgtgcgaaaagttgaatattggaaagtatatatactgttattaattgttaggtatagactttttaaaaaaatatatatagttatccatatattattttgaattaaaaatcgaaaaaaatgagttaaggaaaataacaaaagaaaaaaaagaaacaaaagagtattgttggcgtttctctctttagctccgtttcgtgtttactgtttgactaaaacatgaaacttgagtcctcattgttattgtgaaatgtaattcctgttgaggaacttcagcttctgacatcaatttgtgcccagtttttcgacatcatagggaaatgagagagagttccatgaagaaactggctgaaataagggctatgaatggtaaacaatggtatcagttatggtagtaactatagtcaacaatataaagatttcttcttcttccactctgtttcgactttcctgtttacgttcagccgtttaggctattacttagagggcacgttatcaagggacaatgcttattaagattgagccttagtcacgagccctgatcgtaatgagccgcagatttaattatggagacaaggatatggagtttcttgagaaacaaggaaagtgccctgatgcatgttgagttgagaagtggacagatgactattgaggaggttcaaaaccagagtttccagcagcgagactaatgttaagtctttgaaatttataaaatacttattgatggacaaagggaataaaattaatttaaaacaaaacacataaaaacgaagttgaatgtcatttatgaactttatagttaaattgtgtaagaaggcgtgtctctgtactagaaaaggaaaaatataatttgtttccatatagataaaccggtcgttaaactttccaaatacttcacatgtactaatgtaaaagcttaagaggatatatgtataacaattgcaaaaagaaatatatacacgaaaaagtgtgttttccaaattttcacatgtacataatataagccaaatctttacatatttgacgtatatttcctttttaaggaaagattcgctcgatacgatataatgtatccaaccacatgtgcaccttattataaaattgtataaagacgaagttaaaccatctgtattctgtaatttctaactaaaaaccgacagaaactgcttaaactaatgaattgcacaggtatgttccgtcagcttctccaaattgtatgaattatttatggttctaacaacgtcttttcctctatcaacgacaggtttcacccatatgtcgtctccgccttttgatttatttgagtcctttactgaacctggaagtgggccgaaaattttctctctaattttattcttcacgttgacgacctccattgccgcagaattcactagggagtggataattttaagttacccttacatgaagtgttatttaaggcgtcgtaggcaacacagtaaacttgaaggaattaaactcttcgcaaaaaaaaaaactagtactcatcatccagttggcactcctatctatggtagctgatcttatgctctctttgtttaaagagcaaaccaaaattgttattttgttgacttttgtgatcagggtttgttgggtccttttctcagttgggatgatactcatatttcccgttgaagtcgaaattgtggcacccacaaagtcgaagaaattggattgagatggacaaaagtaacaaactaaatccaacactttgattttgtccttctactattaatatagtttggtcttctatttagcgtgttaatgttttgatttgtggttttgttttattttagggttttgttttgggttgagattctgctttatcattttttaatatatttaaaatctatactaataaaaagggaatattaagaattatgaacaaccaatgttgtgttgaaaaagaaacgagcaaaccattgtttttctactatcctagtaaaagttccaaaaagaaaaggtatgtaatcttatgtataaaagacaaaagatacagtataaacaaaattacgttgtgtctgaatgaaaacttgttttggttttcatgttagcatcttgcttctctttcaatgatgatgacatgttaagcccatttctatacgtagtgtaaatatattatgcatcatggcattgcatatgttttgggctcacaattcgatatcgaattgagcttaaaaaatattcaccagtcccattggtatcatcatttagcttcagttggattttaaagtaacaaaacttaaaagccgccttaacctgtccgtgcctaaatactggaactttcactgtttgatccaatcccgtaagtctaaaattttgtgacttttgagtttacagcaaagacatgaataaacaaataatgaatatgtatacatgttagctttctctaaagcttattgccattaaattgaagcaagacacaaaaactgcaaaacgataagaagattaaccaaaactatttggctaaaccaaatcaattactcttattttgagggctttttgtctggccattgtctcgtgataatcacactcatttccgttcatgtcgtcaaacctgttgaatccacgaagtcaaattaaaatgtacggagatgatgaagaagagaaacaagatagaagagttgtaacgcaagctgtggttgtgggtgacgatcttccttatttcgatattggctatccattcaagtttaggttgttgctttgttctactattaatatagctcggccttgtgattatctagttacgtttattgctgtgtcttttgttcatgcatattatttcattgctttataatgatacataatatcatactttggtaattacttagggatgtctttttgaaattattaatcagtcatagaacatatatattcatccaactctaatagatggtatatgatatgaatgtttaccataccacacaacatacgatggaaaaatgatgagttgatgacaggtcatatattattatgtatcttggcatgccatatgttttgggctcacaattatatttcaattcttaaccaaattgggcttcttaaacattcaccaggcccattgacataatcatttcgattcagttttcagaagggtttttgactctaggatccctttctctaaagctcattgccattaacgttaaacaaaaacactagaaatcaacaaaaactatttacctaaaccaaaacaatcacagtttatacagagtacaaaatagtgtcataaaacccaagtaaattagagaattgattagggaatatatatgtaagcagagttactaataaaacaccttctgggataaaagagaagaaggtattatcagcgaaactcgcagctttagtttaggcctcacatgaatcagataagtacttcatcaaacttagctgggattaagaaaggcccttccatctctctaatttctcttctctatttgaaaacaacttttaaactatgaatcaaactgcgagccttaaacattctctaagcatatgagaaaacaaagacgaagaaccctaattctaagatccaacataagaaaataaacaaaaaccgaagagaaaaatatatcgccgaatatatataacaaatctccgatcattagtcaatcgccgcttgagcttggatttgaggcaaagacaaatatataggatttgcttttttcatcattagggtttccagttttcaatgttttgggcttatattatcgggcctttaggtttaattggcccattagttgaaactatacacggatggttttcttactttctaattgctacaaacaacagactaatctgtttttacatatttaatggttcagatgtcatcaaagattatctgtccaaatatttatattataagatacattttaatatttaattatgatttagtagagcggccgatccgttttgatatgtttagaactaaaaattgaaatatactaaaatcaaaattggcaaacatttgaacgagtctcatttatatgtcctctgaccatattatttaatgggcctatcacatttcccgagcccagataacgtcttttcagttctcctatccttttggtcagcttgtgcatggttgttacttgttaatgatggccaacatgtttttgatcgtgcattacacttaggtatgagaatctcaaacatacatgattatcatcaattactcacttttaagataacgtttctttatttcatattcaaatttttaataccccaaacattttcttataaagccccatttggtgaaatcgttttcctcatcacaatttaaatacaaagaacacaacaaacgaactagcttaaggcaatatacaagccaagcgctcagcaatggcgatcacacgctcctccttggccatttgcctcatcctctctttggttaccataaccaccgccgattactactctccctcatctcctccggtttacaaatcaccggaacacaaacccacgctcccgtctccggtttacactccacccgtttacaagcctaccctctcccctccagtctacactaagccaactatcccacctccggtttacaccccaccggtttacaagcatacaccctcacctccggtttacactaagccaactatcccacccccagtgtacaccccacccgtttacaagccaactctctcacctccggtttacactaaacccactatcccacctcccgtttacaccccaccggtttacaagccaactccggtttacactaagccaacaatcccacctccggtttacactccaccggtttacaagcctactccctctcccccggtctacaaaaagtctccaagctattcgtctcctcctcctccatacgtaccaaaaccaacctacactccaaccaccaagccatacgtcccagagattcttaaggccgttgatggcatcattctatgcaaaaacggctacgaaacctaccctattctaggtatatatacatacttaactaagcctccctgattaaataaatttattataacaacagcattgctaatttataaaacttttggtttattaaattcatgtaggagcaaagatacagattgtgtgttccgacccagcatcatacggtaaaagcaacaccgaggttgtgatctacagtaatccaactgactctaagggatacttccacttgtcgttgaccagtattaaggatctagcttactgtcgtgtcaagctctacttatctccggtcgagacttgcaagaacccgaccaatgttaacaagggtctcacaggagttcccttggcgttgtacggataccgtttctacccggacaagaacttggagctctttagcgtcggacctttctactacactggtcccaaggctgcccccgccactcccaaatactgatcgtgatgatcatattatgatgatgatgattatgattttgcatgcattatataagaggtcactttaatcaatttattatttggaattttttcccttgaaaatgttcttttgtttgtttgttccgatttcatttgattccaatgcaatctatccttttggttatgcttttcatttcatataataaaattgcaagagtaaattctttttttttttttttgtttatgcgactacttttatatgagaaatttaatttaacgagtattatttgtatgaatgataaaaaaaataattttaatttattgccattgcgtcaacacgagtctactaaacacataaacagcgatttttctagcttttaaaaccgataaacaatagtttacgagtttaatgctctaggcatttaccacagatggattgcacgatatattttgattttttttttgtttccttctgaatgtgtaaaaaaaacatatgagatgttacatgaacaacaacttaaaagaatcttctcagccaacgaaagccttctatctaatgaggacctaaacaaaagccaaaacaactctttatctttcaaaaacaaagctgcgagaaaacgagaaatgaatcaggtttagttttaatcgtgcaaccaaatctcgctcttgcatattacggcatatatagcgacaaaattattatttttgtatcgccttgtcaaattcattgctgcaatacataaatcatcgtgcaccaggatcttgctgcaccattattctaaggttaatttacctagcaatttgactttgtcttcttatttttatttattaaatcagattttatcagaatctaatctttacatatctaactcaaaccggatcacttggctagttggctccactcctgaaattggtaagtttttgaatatcgaattagttctaatgatgtgaatgatgttttcctttgtcctttttaagctttaacaagagtatgggttatagaagaaagaagagagtcaaatatgtgatcagatttttcctttttggtcgacatgttatatcattacatatatgtattggtaatttgtccccacaaatcaatttgaaaattggagacatgtgctcaagaaatagctttttaattaacttaaagtcgcctcgtcgttatactttgtttactaagaaatgaatcagattccactttctttacccatgcacaccgcacgcgagtcggtcggatggtccctcttagactgtttgagtccatgtcactttgtgtacgtgtcactgagtcaaaactccatcctactcctacctaataccacaattgtggtatattgacatatcaattaagttctaaaagttgcttgagtcgtgtttgtgtaacttgtaagtaaccactatagccaaaaaacaattaagtaaaatcctcagcaattttaaaggatttgcattgtgtatccattttctcataatacgattatacaatatacatgcatgccctgagagttttacaatttgaaacaacatttgaccaaaactagtagatggattaaactttacaaatcgatacactagcatttaaggctaacattcggttaaattaataataatgaataatattttaattttaattacagaagtaagataaaatcttgatcaaattacattcacttattttaattaaattttaagagaagaagaaggaaaaaaaacaaagaaaatcgttttggtgggagagcttcgcttagcgatttgctccactctccactgaacgacgccgtctgcttcttcttcatcaaacggctccgttactttagatatcacttccgttcatttttcccaaacggtgtctttttgtaaagcaaacgtcccagtgattgccatgtggatccccaaaaacgccacgtgtcgtcttccatgccagtaatacgattctgcccgctgcgtcatattaccggatcttcagaatccgaattattatgcccacccatttaccgggtcggattcagtcactatccaattatgtgatcaaataatccatagccttttcaacgaagcccgacgattcgacccgttatctgcgggtagatccgaattagaatcttgaaattccctgggaatctccacaatgataccgactaaatcaatcggttctctctcacaagcttccatcggaaacctcaccggcgaaccagaggaggaagacggcgtcgaggattcggattcgtccgatgaagaggaacttccggcttcggtatcctcaattggtttaaccgatggaaacacagcagcaaccggttcgggttcggtaaccggctgtgcgggttgaaccggagctctacaaagaggacaacttgatctggaccggaaccacgtgtctatacaatcgacatggaacacgtggccgcatttgggaaggacacgtccttcgtcgtcttcttcgaattccgacaagcaaacagagcattcctcaagcggagattcatgggttttaacggagtagacgaagatagggatcttctcgagcaccgtcggatcaagaggagagagggaggatgatgattgggtggggtctctagcggcggcgagtgatcggaggtgagcactgatacggcggcgaatacggcggttttgacggcggaataaccatctagcgtagctgtggaaacagaggattaaaatgacggcgacgaagaggatgatgacggaagcaagcatgattttgccgtttagagagtaacgtgacgatccatggttcatgtttccccataaagtcttgctactgtcaaacaggtttcccattgttttgaagatagatagagaaagtgaaggttttagagagagaatgaagtgagtgggtgaaacgatgaagaagaagcaaacgagagagagagtgggaagtttctaatgtggtataattctgtgggtttgaatctctttatttatagacaaatactatatgaattattggcttctctttattttatttattttcatcttctttctatttgtttttattgttgattgttaacgtttatacgagttttatatattgctagctaagagggaaaaattatcacaaagaaaatataatattttcaaaagtgattaaagcttttgcgacctttttttttttttgtttttttgttttgtgttttcatagaacatatattcgtctaataagtactctcttttttgtttttgtcaaatgtctaatagctactttatacttgagctttaaacccacttgtagatgtgagttctaataaatatcgtggagacattacttttgcgcaagtctttgaccgtagtttactttattagttttaacatcttgctcaccgaatctttatttttttgctaatatttgttcaaccgattttttttcaaggcatatcagacgtataaaaaatactgccaattttcaaaccatcattctactaaaattcgaagtatataaaaaaaacacctaaaacgatcatatgcagtttaccaaaaaaaaataaaacgatcttttgcatgtttgctagagcacatcggtagattatctcatgcatgtctttacactgtttatttaagaaattcataaatattattgagcaaataacatacgttgaaaatctaaaaaaagagagaagtagcaagatggaataaacacactaatagtataggcgaagaaatgcatggtccaaaccaattgaaacgaaactgaaaaatgcataactaaataaaccgaaacgaataaaatctagtaaggaatagcttttggatctccatgagtcatgggactcctcaagcgtggtctttcaaaagtttttttttttttttttgcttaaatgctaagagaaagactgtccctatctggcggctctttatttctttcttcttcttctttttttttttttgctttatttctttctttctttttgagttttttctatattttttttgggtttaatttccgtcaactataactttatttggggaagtctttttcagaaaatgtctttaagaccgttttacacatcagaaacctactaatttttttgtcgtgaagaggatttttaaatgacccgtccttgctaacgacctttgatgccttcacctttttttgtgtcttgtttctactttaaataacattggaattcttctctctttttcccgttcctatttccactttccttcattttcaataacactataacaatttattattaatttttataatgataaataacatatcttttggaaaactgaataaaatatctaagaacttcgtaggccaaaatgattagaagataccccaacacgaatattccaatttaaccttacttaacggtggtccatttttgtagacaaattaataataacaaaatcttgtatatagaggctagagattcacgtagtattcgattgcacaagtcacagctaatgttgaaaaaaaaaaaaggtcatagctaacgaaccctcacatgcttctaactatgtaacacactaacacatatattaatatcttgactatcgtaataatttttattttacttttgacatataaataacacacgaagataaaacaataaacaactatttcaacctgtttcggttgtgatattcggttaattataatacaaaaaaatggattgtaaattcttttactaattgatttagctagggaaaaagagtgtataattagacttgtttctacgttgagaaattatatttaatcttgttggtcagtgaaaagttaattttatgataaggtcggccattggtcaaaacattttacaacttgagagaaaaactcaaaaggctacataaacccatgtgccgtgctcgtgcgggttaacatgaatatcatactttatataggtctgatgatagttactcgtcttctacttttatttcagtacagtgcaactttcttatttcctagacacacactatattatatatatttctaaattatcataaagtacttaaaaattgaattcgaatatcaatatgcaatacagattatcaccttttatataaaaagaaataccattgacaggtttatccaccaaaattgtattaaagctgggaggtttcttaatagtcaagaaaaagagaaagaaataaaaagacacatttgaaaaagagttagaacgaaaaatggataattccgaaaaagtaaaatggattcataagtaaaaaaactaaaaacataaaattgattaagagattgtatttcacaacgtttagaatactgctagctaggcgcacaataagtgttagaatggtgtttagcgtgtaagctgattaatcgtcgcttcaaaatgcatgcatgcatgcatattattagttcgtgatttctctatattcaatgtttttgtttaattcaaaatggctaaactttaagaagctctgatattttacaatcaacggaaccgtgtgaaagtcgtaaataaatgatgtaacagccagtgaagttacacttcgctagaagtcgtggccagctcattcatctccctttttcaaattgctttttttttatttttcaactttaactttttcagtctttttttttgggattttttttgtttttatttttcatttttaaaatgtgaaaataattaataaattggaaaatcaataataaacacttacctgcttttaagcaaacagaaaggcaaagcgataccaatagaaaattacatgatgaaatcaataataaacttttagcttcttcagagaatgttctttaaatttgtattcggttttggttacagtttggtgaaataatggacaaaaaaacagtttatttcttttatatgttccgatagcgtcatgcacgtaatcgccgcagtgatccaaatttaaatcccgtgacctaacaaacaagccgtgaggaaaaaggaaagagtaacttgtgtgtgtggatcaataaaatctatcgatagtgaaaccacaaaagattaattataagtatatttgatctaatccaaaaccggataatgtgcagaaaaagaaaagcgttaaaaaatagaaatgatacttgttaacatcgttttatttcgtcggaatgttcagtacggaatctctgccgaccaaaattgagctcctttctatgtattttcagaatcttttctcaagattctgattgaatcaacactgactacattatgaccagtcgtaagtctcgtatatctaaatcgaatcaactctagttacattttttcctaatgttcgaattgctcatctttggcttacggtttatgttctagagtctagattggtcgacatattttcgaaagatagttaagtcttttagtttcatacatgaagtatgttggtttcatatacctgtataattaattttcctggtatttagggtttaaaactaaattaatccaaatatcgagcagagagttttaaaagactttttttaaccaaaaaatcaaagcattcggaagaacaatagagcattgccaaaggaatcttgtgattattgaaatcttattaaatctacataaaccgtcaattctcaactaaattataaagacaaggtgttttcatattcatattagttgagtcaacaaagttgactactaagaaaagaaacgaaaagcaaaaaaaaaagaagtggtctcatattccggcagatcggagagcatactcttgaaccaatgcagcaaacaacgactgtctctccagtaaacggactggactatcatactctttcgctttacctgcagatttcacaaaccgttacaaactccactaatcaaccaaaaaggtaaacaacttgtatgttctgttttgttacctgcgtctatgacaagaacgcgatcacagtccataactgttggaatcctatgagcaatgctgataatggtacagtccgagaaatcctccctgatgatcttttggatcatagcatcagtctgcgaatcaaccgacgcagttgcttcgtctagaaacagaatcctgcttcgtttcagcataacccttcctaaacacagtaattgtctttgaccaacactccagttctcgccattatccgccactgtggcaaatattcaccaatgttaatgatcatctcaagtaacatctgtgaattaagtttcaaaacaagtaacttttaactcaccgagagagtcgagcttctcgggcttggaagcaacaacatccttaagttgacatcgctcgagactctataaaccaaagaaataacagaacaaattttataaaatgttggatcaagaatcgaataaaaaaggtttaatcttttaaacctctaaccttccagatttcttcatcagagtatttctctgttggatcaatgttactccttacggttccttcgaagagaacaggttcttgaggaatgataccgaatcttgaccttagatcatgaagtcctaaagtgcagatatcgattccgtcgatgattatcttcccaccagatggctccacaagtctaaacaaaacctgaatcaaagtcgacttgccgcttcctgttctgccaactacaccaatcttctctcctcctttgatgtctattgtaagtcccttgagcacaagaggcgtgtttggtctatatcgtaccttgacatcttcgagacgtatgttacctttgtatggccaatttggaggtggacggctctctttgatctcccatttcgcttccgcgggaatgtcagtgaactgtttgattctctcaacagaaaccatcttgttctcaatgaaacagcttagatatattgcccaaaacagaacaccgttcagcgatagtccgtaagaaagtgatagcccaacattctctgcattgaatcccaagaaaaaatcatcacaaggaaaactaatgttgtgctataaaacaagcttagtcactcttcttcatacctggtttgataatgttgcttggtaacatgaccatgaacagagccgagatgcagagtacccagctcccaatcagctctaaccgaaacccgagccattcgtttgaaccattgttgtggaagtccatcctgagattggcgttcactcgcttcacattctcttgcctaaacattggctgtttcttgaaagctctgattgtcatcactccggctatgctctcggagaaatggtggattactggagccttggtgattgagtcaagacgagttagttcccgagatgatgcgaggtaatatccctgttggatccaaaaactcaatcagatgaagaaaacagtagaaacagcagaatgatataatctcttttaataatataatcagaaacaaataatataatctcttttagccacttacccggtaccaaatgttaagccatccaagcggaattatgaagaaaacagtaggccaagcgtattgacatgttactatgaagatgctgagaagagtagtatacattgtggccactagtcctatcatgaacgggataaagatatccacattggtctgatcagtagatgcctgcaaaaacatattatagagattactatctttaagttgaaatctccctggttttctagattttaaatggagaaagttatctactaacccgactgagaattcttcccgatggcgtggtgtcgaagaatgacattggtgcatgcacgagactgttgagaatctgtttgaagaagatctgagcagtcttgaggcctaagtgagtgacataaaatgcccggaggcacacaagaacaatagaaacagcagcgataatgacatagacgcggatgaagactgtagcgtcgaatgaaacctcgtttttggctgatgtttcataggcaagccaataatcgctggccattaaagaggcttgccaagccacagagaagaagacaacaagtatcattccccaccagccataagcttctgttgagtagagtttgtaaacttgaaagctcacttgtcctacttctctttcttcttctttgatcagtcttgatccatcttctggtatgttggagccgagaaacgacttgatgctttcatcgtttagctcgcttaaacgaggagactccatcgaagtagttctaagtactcttggagactccattgaagtagttctatgtacttttggtgattttggttgacggggagactctattgaaatacttctctgtgttattggtgatgccattggcacatttgctgcagtggctgatgccgagccagcttcaactagctccattgatgtctcgtgcgctgctaccaattccccaaagtctaaccccgagctcactaattcgtcgtattttcctgactgcacaatcattccatctcgcataacctgtaaaatggaaccactcattagcaaaccactcaacaagttttaatctttacttccatctaaccgtaccaagatgcgatcaacgttgtgaaggaagtctacttgatgagttactagcaagatagtctttccttttaatgctccccttacacatttctgcagaaacataatcacaaagaaacaagattcagcttttgactttgatgaacttaactgataatttaagtgctcaccttgaatatgtctgaaccggtatgagcatccaccgcgctaaagacatcatcaagtaaatacacatctgattcctgataaaccgctcgcgcaagttgtatcctctgcttctgccctccactaaggttaattccgcgttctccgatctcagtctggtctccaaactccataatctgcatatctttttctaaacaacaaaccttgagaacttcattgtacttgcttctattcataggaagaccaaacaagatattgtcttgaaccgttccattttgaatccacgaagtttgcgctacataagcagttgtcccacaaacccgaaccttgcctgaaagtttgtgcatttcgccaagaactgaagctaacaatgaagacttccctgaaccaacggtcccaacaatcgcagcgagctctcctttcttaacttcaaagttgatgttttcaattgcaggctcgtcatcttcatcatcccaactaaagcttccatctttgatctccacagcgacattcccatcacacccttgactcctttccacagtctcttccgatagctccctgctcatcatgtaagcatcgagtcttccgagagagatcatagcctgcgaaagagagatcatagactgcggaaacgtccttatcggttcttgaagaatcttgaaaatcgtcgttgtggtgaaaaccgttcctgcatcaagcttgacacccaagaaaaccgcggttgtgaaagttagcgccgagatcaacaccggtgtgctccaaagcacgataatgttaccggcaatcgaataaagaaacttagatagccaaccaaactccatttctctaaacttgagaatcctctcgttgaaatgatcttcccaagcttgaaacttgatcactctcatgtaattaagcatctcattagttgctttcatccgtgaatcacgattcatcatcaaactgaattgatacctattgtttcgtttcgttcccaagagaataaacacgaagattccggttaaaccgataacagtagtgaccacagaaggtccaagagtgttataaagaagcacaatagccgcagctacttgcaacggcatgagccagattgcgtgtagctgaagcatcatatcagaaagttgctgagcatcaacggccatgtaattaacgatttgaccaacgccgtgattctgacgagcagagccggttagctttaaacctttcttgtagagagctgttatgagagtggatcttataagcatccctagcttctgtgaattgaaattgaactgatgagtagataacacttcgacgaatttggctattaggaggataagaacgaggtagtaaccctgtgacggcgatgatcttttgccggaagtgaaatcgacgaagctttggatgagaactggtccgacgtagatgacactgagacggatgatggctagaaccgccgtgaatgcgatctctttccagaaacatctgattagagttgtacggacggggtttctcgagttctcttgaggtttgggccatttcgattcgaagagcgtcgcgagcttctctgctctgtgctccggtgatagagtcggaacttggtcgaggtttaatggagatttgtagccttttcttagtaacggattcatccataaccagaaagttttcgatataaacgatgctgatgcgtatagtgaaacgttttcggatttctctacaacgacgtcgtttgatttcgccggagctgtgacgttgctggtggttactacaactccggtggatcctttgatggagacgaggagtagaacggcggttaaagggaaggagatgaacgaagcgacgtcgtctgctcttagactcgcggcggcgggatcgtcggagagaagatggagaattccggagacggtgaagagagttgtgacgacgaaattgaaaacccagtagattcgtaacgttaacggatgagacggagatgcgaatctttttaggtggagaactaaaacggcgatgacgacgttagtaacggcgtggattagccaaaacagagtatcaacgagctttaatttcgtccgagtggtgaaaaaagccgaaacgcagagcacgagagagcaaaacgacaggacaatggttaccacgactgtcgttttgaacaaaccggttgttctggttcgtgttcttcttccgagtagaggtttagtgatgtcagcttcaccgttggttcttgaagacgatgaagaacagagtttttggatagcgaagaagaagaggatgaggaggaagaggacatcgacggtggaggagagaagtcgttgtgggcaaggagagagtagaatgaatcttagccattggattggagcgggaagagatgaagacggttctatgacggacgatgaagagcaagagagatcggagagccacgtagaagaaagccaccgcatcgtctctctctgaagatgataaacttgaagataatactatctctctgaatttattactagtatttatgatcgttcttggtttgttatcaactttaatgttttgtgtgatgcaagaagaacttgtattttattattaattgttttacaagtattaaacatttgaaaagattgataatgatatcaatcaaaggctgctttcatattgattacttatagccgactagaaaaagaagacaaaaatacgactctaatcagtagctaaattagtaatttaatgatgtgaatgtattgtctctgcatgacacgtgtgaggaaatcagttatgaaaattgagtggaaacgaataattaacttggacttgagagagtgggagtagagaaaatggatgtcactttctatacaagattagtttggactcaagtgttgagatctctccttgtttgataactcgtatccaaggaccatgtgagtcatgtgacgtttagtttcagtctcttgggtttttctttttgttattaaaattgacaatccattaaagagtgtttaatagcttgatactaacgacattctgatcatagcatggtcaattatcttcttagccttgctttgttagctatttttgactaattgaaaacttaacattattcaaatttttttaacaaatataacaatcctaaagtcccaatacatctcccgttggaagattaagcttgaactctaaaatgaggtaaggtgtttttgttcgatcaatgtaatcgtataaaaatggtagttcatgcgtgaccttatcatgaatggaaccaatgcatatgtccttggatctatgcttatgtatttatggaaacgaacatagattctcttatgagctctattgctctaatcctattttaaaattttactaaattaagaaaagaaaaatgacattggagtagagaatatgctttgtacatagaaattgattaattattatctcaacaacaaacctcgaaccaagtgaaaattgtagagaattttagtgaattacaaaataatttcctcacgtgtttaagatcctgaagaatcaccaaacgtttctgtcatcggacaaaaggttatgcattattgctaccattgttttgtctataacctagaagttttttggacctatatatcacctatggcctagctagtgattttgaaatgcacattctctttaaaaacatctacgacaccaacaaatctacatattattgctctcgtttgatttactacagttcaggatattcaattaaacacatgatattaatcatcatcatcgttgttgatcacattatatgaaaagccgacttgtctctttttgtatatccgtttcccttctgcgtatgaatgaaaataggactgagagcgactatatgttccctcgtaatgggatatttttcattaattcttatttatgaaagtcatcccaaaattaatagatttttttttttggtttaaaaattaatagatttaggagagcaaacttaacgttttaattacacaaatcttatactctgtaccatttatcaaacagttagctatctttttattattataaaaagcaccttttccatgaaatatcaacgcatctcagcatccgacattgcatggtgctaggtaggacctgtttcgccgtcacgtggtctttcttgtcttctctccattttcacaaaaaccttaaagacttatggattttttaactcaaaatgagaatcttcttgctttcacatcttcgaagcaaacaaaggtgaaggagtgggctcaagcccataatgagataggcatgatcggtcatcaaatcgtgaacaagttaaatgttacgtttcatggccatagtccacattatgtatattgttgtaggtttctttcaattttgatatggaatttctaacataggattgcatatatgtaacagaaatttaattaatattgatcgggaaagtgttacagttacattgttcatataaatacatggttatcgtacgttattgatttaggttttgattccgtatccgaaggggtagagagggtcgtagttcttgtcgccaacgttcatcggaagctgggtaacatgcttcatccacgtgcgaggcaacgtgccggtgaagggatgatcaccaaacaagacatcagcaactccttgtccttcggttccgggaagccatgcgactgcaagagcatcgagcatatcaatgtaaggttcgatcacgagcggacgtccagtgactaggatcactagacacttcatcccactaccacacgtgtggctgagcgtgtctggacctggcttggttatacccagcgtggggctgtccccaaatgtctctgcgtaaggggtttctccgacgaccacaattgtgtatgctgcgtcggcgtgaagcttcgctgtatcttggtttggttcctccacgtagacaacctcagtagtgggatctactgctttctggatggcttccaatatggtggttcctacatatatatgtttcgaaataacattttagaacgaatatgtcaatatagttaaaccttgaatataattggaaagatccgggccaccatcaagtttggaaagatttaatgtgtatttgattccatcaaggttttttttggaaagatccgggaaaccaagatattataatgcatgcatgtgtgacggattaatattctctgacattctaaattaccttttattttaccggtagggagtccatgtttcgtgttagtgggcatatcttcaccggttccgttaaatccttgccaagtgagactaaagccaccgcattgccatcccatgtcgttagcgtgtcgtcccgcgacaacgatctttttcaccttcttcgggagcggcacaattttatcggcgtctgtctttccgttctttagaagcaccattgatttcctcaccgcctctctccctacttctcgatgagcctacaacattgtattattaaagcatatatagttaggtaagtaagacgaaatgctttacttaatttgatggtatcttcatgattttattatttcacacattgtccatattatatagatttttccttttaactctttaagaagtttatttaataaagtttttaaattatgtatatagtacaaaaccttgtgtccttctgaatttacctcagatccaaactcagtagtgggaagtttttcatctgccaatgagttctcaaagagaccgatagagaatttgactctcaagatccttcgaacagcatcgtcgatgcggctcatagggatgtatcctccgttcactagatttgtcaatttctccaagtactctggatacgcccatggaaccataacctacgcaacaagattccacattttaaatatctcgatcaagaatcagtttcttgatcgagagtaaaattagaaaagtaaagaaaagggccaaccatgtcaatgccggcattaatagaagcttcgatggagtaagtgtagtttgatttttctatcggtgtgatcttatcaattccgagccagtcagagataacaaagccttggaatttgagagtgttcttgaggtaatcagtgatcattgcacggtttgcatgcatcttaacaccgttaagactagagtaagaagccatgattgatgcgatccctttcttcactgctatctcaaacggaggcatatggataccaaagagagtagcgttatcagccacagtgttgttctcattgattccatttattgtgcctccgtccccaacaaaatgtttggcgcaaccagccacattaatcctaaccacgttttcacgttagttaactagattaaataaaaatgtagatttcgaaacttcagtattagttcttggtggttacttgggatcagcgaggtaaggagcatttccttgtaatccatcgatgatactttcggtcatcatattcacaactgcagggtcttcactatagctctcgtaacaccttccccatctaggatctctgcaaacctgttcatccattttttttccaatacgaatgagaaaggtttattatacatcgacatctatatttctgttgtagaatttctacataattaccgcaacacaaggtgcaaaagcttgagcgactcctgttgcccttacttcctgcgcggttatagccccaatctttttaacaagttgaggatccctacagcaacacagattgacaaccgtcaaatgccttgaaacagcatttcacataacctatttatatatgattcatttacatatatacctagtggcaccaagtccgacattgtgggggaaaatggttgcatcaataaaagtattgtggccatgaaccgcgtcaacagcgtaaagcagagggattccgagcctcgtcgaaagactcaatttcttcatcgcgttagtctggaatatccgctttgctatgtctttcccggtatcatacggattgctcaaaacacttcctgtaactcgtacgtacaccaattcaattataagctttatcaaaaaaaaaaaagttattcaaaaattcgatatataacaagatgttgcaccacacataccgatcatgtactttgtgaagatttctggcacaacagtggccacaccaccggtaacttgtgagaagttgaaccgatcaatttgacacatttgaccaagtttctccggtaacgtcatacgtatcagcaagtcttctactctttcttcgaccgctactttaggatctttgtacttaatgtatcctctgtcagctgcggtggcttctccataacggccggcgaacagtatcacaatcaccgccgagaagaaaaagctcctgacgccgaacattgccgccgccattaacggagaccctcctccttaaccagggagaattcagaatattgattaaaaagatataatgatctttctaaatcctgaattgaaaaataaacaagaacagatcatatacagtttgtttttttacttacgaaaggccgttaattaatctccaacggtaaaaatatctagcgtctataatcggttggcgcactaaatttacaacagacaaaaacggaaacataactaatttaatccggacagttgtgtgagctccaagccagtcgttttctgtttaacaacttaccgctttctgttaacggaaaacaaaaattacccgtgatttaggccgacattttaattgggcttagattgttatcaaccaaacaaatgggcttagattattaaggcccaatttatatctgaagagtgttttaccactagtgtttttttcactacactgatccgccgcaccaagttttaacgcgtcccagacagacaggcaggcatgttctgtctgacatttccaaaaattcaaatatttttattaaataaatatattttgtttacttgtttaatccaaatttaaatcttcattgaatgctttttctgaagctttatctaataaatctcttcgttgatccttcctttccattaacgaggtagaaattccaaaacgcgtaataatcttgtcgtcattacaaattacaataaaaagaagacatttttatttagatttccctctgatcctctcttttagatttcgaatcgagaccagatctgcgtgaagatgatagagaagtgtataggagcgcatcggtttcggagattacagagattcatgcgtcaagggaaagtgacgattctttgtctcgttctcaccgtcatcgtcttacgtggcacaatcggagccggtaagtttggtacgccggagaaagatatcgaggagatccgtgagcatttcttctacacgcgtaaacgcggcgagcctcaccgtgtcctcgtcgaggtctcttccaaaacgacgtcgtccgaagacggaggaaatggtggtaacagctacgagaccttcgatatcaacaagctattcgttgatgaaggagacgaagagaaatctcgagaccggactaataaaccttattctcttggtcccaagatctctgattgggatgagcagagacgtgattggctcaaacaaaaccctagcttccctaatttcgtggcgccaaacaagcctagggttcttcttgtcacaggttcagctcctaaaccgtgtgagaatcctgtaggagaccattacctcttgaaatcgattaagaacaaaatcgattactgtagaatacacggaatcgagatcttctacaacatggcgttgctcgatgctgagatggctggattctgggctaagcttccgttgattaggaagttactcttgtcacatcctgagattgagtttctatggtggatggatagtgatgccatgttcacggacatggtgttcgagcttccatgggagaggtacaaagattacaacttggtgatgcatggttggaacgagatggtttatgaccagaagaattggattggtctcaacacgggaagtttcttgctcaggaactcacagtggtcgcttgatcttcttgacgcttgggctcctatgggcccaaaagggaagatccgagaagaagcgggtaaagtcttgacccgggaacttaaagaccgacccgctttcgaagctgacgatcaatcggcgatggtttatctgctggcgacggagagagagaaatggggaggcaaagtttatctagagagtggttattacttgcacggttattgggggattttggtagaccggtacgaggagatgattgagaatcataaaccgggttttggagaccatcggtggccattggttacgcatttcgtcgggtgtaaaccgtgcgggaaatttggagattatccggtggaacggtgtctacggcagatggatagagcgtttaatttcggagacaatcagatccttcaaatgtatggtttcacgcataaatcgcttgggagccggcgcgtgaaacccacgcgcaatcagacggataggccgctcgatgccaaggacgagtttgggctgcttcatccgccgttcaaagcggccaagcttagtacgacgacgacgtgagtgagtgagaggatatattgttttgtatcttttaattttgcgtttaggggacacacgtttatttgttttattcaattttatttgtttgtagtttacttaattgttttgatctcccattcatggtggagtcgtgtatggagtatttaatgatttattgtagacgttatttcatcataatctctttagcataacaaataaaaattcatcacaatcacttttggatatgatttccttgtagactctcttaagacagacatactacatgtatatgagtttttgtaactttaggatatttactacctttgttcccgtgacttttggtttagcctttagctatgcttgtgttgtgtgtgctaaagatttttcaacaattacaattttacctgtaattttcagaatattagtcttgtacaccctatactctttggttttacgtacgttcctcttattaacattatagcatatgcatatgcatagaatattagttgaaaagtttgaaacgtcgttgcgttgtaatgtggagtgtacatagtgatcaatggtttaattgggataatttcctttagacaaacgaatcaaaacacttcagagataatttcttttggtgaattattgcgttcgtagtttttttactctgaagtttcttttggagattacatttaaatcacgtgtataactccaacaccgcctcctttgtggaatgcacgacgataatttgtcactattatctataatcaaacatgagtcacaggagtatatgacacaatagtttatttattaagtggtttgcaaaaatattttttctcttcaaatatatgtaggctcactaaaataatatcttatttgtgggcttagatttgattcttcttttttttttttttttttaataaaatttaaaatttattcgaaaaaaaactggtttacaacgagtgcaacgtttgtgcctataaattttagatacaagagtcaaagaataaggccagaaagaatatgtagagagccacactatctggaaccgaaccaacatgtcatacaaccattatattttttgtcttcttggctttgaatggaagagatcctatttcagacttgcttatcaaggaaacgaaccatttgagctgcagcctgcggcacttctcaatgtcgtctgccatttctttccttccaaagagagtggaaagttagctgaaaagtgtatcttgtcaagaacagaacctcgtgccccaacgacttgtttgttaagagctttagaatagcttcccagcggttggtgaaatgttgagaaagaagcttccgtgtgagtgtagaccatacctctactgagtaagggcatgtgaagaacaagtggtcgcgcgtttccacgaggtggtgacagagcacacacgaagagtcagctcccacattccaacttaacatccgatctcccgtagttagacgattctttatcgctatccaagctaaaactgagtatttaggcgttgcatgtgaaaaccaaacacccttataccagttgactttcagttttggttccctagttgcagcccaggtctcctttgtgttaaaacacggtttaaaaatgtccccatttcccttccaacaaactgtatcctcccccgaagtaagtccctggtggcgcacctcggcaatgacgtcttctattcgaagcagagtatcatgtcggtggcgtcttggtctatggttcacaaccgcttcagctacagaggcgtgaagagtgattcccatgtcaatgcaaccccgatgacctgttacatcaatcagccttcctatctttgaccagttatcaaaccaaaacgatgtattgctgccattgtgaatgtcgtgcttcacaaaacctgaagctaaagctctgtgtttaagaatcttcttccacatccatgatcctagagttgtgttcccactgatagaccaaaaggaaccctttcgcagcagatataatcgcagccattgaacccacaaagaagtagacgagagcatcctccaaatgagttttaacaaactgaccttgttcgcttcctttaaagatctgatgcctaaccctccttcatctttgggtgtgcaaacatcactccatgctactttagccttttttgtattcagttcggggccagaccagagaaaagaagagcaaatgctatcgatttctttgatgcaggcacttggaagacgaaacgcagacatccaaaagttggttagactatggattaccgaactaatgagttgtagacgacccgcaaaggagaggtgtctcgccgtccatttacctattcgtactctgattttttcaacgagaggaccgtagtcgcttgtcgtcatcttttttgtcagcaatggtagcctaggtagcgaacaggtagtgcgcctgaggcaaaagggaaactgtgaagaatgtctgctttgtcattgtctttcactccagccatgtaaatggtcgacttctcgagactaatctgtaaaccggagaaatctgcaaatttaccaaagatctgaagaattccttctatagaacttttcttgccatcggtgaaaactaacaaatcatctgcaaaacacaagtgtgtgagcttgagatgttgacattgcgggtgataccctatcctcctgtcccaggcagccttattgagcatgtgagagagcacattcatacaaatcacgaacaaatacggagatagtgcacagccttgcctaagacctctttcacttcgaaataaacccattaattcaccattcacttgtacagaaaaagatgctgtggtaacacaaagttctatccatttgataaatttcggtggaaggttgatggcagtgagcgttgagagtagaaagggccattgcactgagtcaaaagcctttgaaatatcaatctttattgagctacgagaggagactgtttctttgtgatagttcttaactatttctgaagcgaggaggacattttccatcagaagtcgatctttaacaaaagccgactggttagggagaataaaatctgggaggatgagtttcagtctgttagcgatgagcttcgagattaccttgtagataacattgcagcaagagatggggcgataatccttcatttccttagccactttcttttttggaatgagagccagtatagtggtgttcactcctttaggtatgaaaccatacttgaagaatgagtgaaccgctgtaatgaaatcgggtttaatgactgaccatgtctctttcaaaaattccacagtatagccgtccggaccaggtgacttatctgatggcattgagaacaacacttccttaatctctacctcggtaacttcacgaatcagcactgctccatccggttctgaaacgtgatattgaaagatatctctcaactcctcgagtggtatacactggtattgggctggcctgtgtgcaagaaaatcatggaagaaactttcagcttccttcttgatctcctcatgagtatccgcagttgtgccatcagaacgagtgatctccttaattgaattccgctgttcacgcacctttgctgccttgtaaaaagctttattgcttccatcccccactttgagccagtgaagttttgatttttgtttcaaatatttttcctccaactctgacacatgtaaccaacgaaaataagctgttgactcacttcttatggcctgtgttgatgggtttgttagagtttccagttgcttttgacatagatctgtaaaagcctctttcactttcttcgttaagtttccaagcttgttcttactcatagctttgatgcttggtttcaaagctttgagcttcttcgagaacctgtagatagcagaagtcgagtgataaagagcatctgttgtgtcccagtaattcttaaccatctgcagaaaatctggatctgtagccaaagcatttgtaaacttgaaaggttttctaatgataggcttatctgctcccatttttattttgcagcgaaggtgatcagaacagcctcctgcctcataaactccataagcttgttgataacatgtggaccacttatcatttactagaacacggtctagttttttacaaatgagctcatcaccatcccttttgttactccaagtaaacagaggcccatgagattgcagatcgctgagagagcagtattgaaagacatcttgaaaatctctcataccaggcgtaagaatcgattgagtgttaaaacctgagtgctcacttccttttaaaatttcgttgaaatcaccataaatcatccacggtttgttcctaaacatgggtgagaatcgtgatgatttcgcagatcttcccataagacttttctctcctccacaaaattagatgcataaacaaatgagcagaagaactcattgtctgtaccctccacctgaacagaacaagtgatcatttgactacttgtaaagcacggcgttaatctcacatttggactccacactacccaaattcgacctaatctatgagaatcatagttagatagaaatgaccagtcttgaaatactttcctgacaatactctctgctttactttctctaactcttgtttctagtagacaaccaaactgaaatcattctctttgtatccagttcttcactacggaatgtttagtaattttattgaaacctcgaacattccagaagaagctcgacataaaaactaggaatgggtggaccttgaaggaaggtccggtacgacttttgtagatgggttagagacgaatttgtgggtggtctttgagccacgaggcagatagtgtcgtggttgcacacttgctttcaacccccgagactgcttcgtacccgcatcctgtgatttcactgtttgctcctccactttatttcccctgctggtttgaggcttagatttgattcttatgaagtattcatacgtctcgcgccgtagtgcatacgtgtagcatcataatcgtcattagaaatgattgagttcaacgtgttacggttcatattttgctggaaagtggaagaaattgttatcttttctactgtcccattcatttagctaattcttattttctcaatttagctgatcctaccaaaaaagtcaagaaatttgcgggttttttttactcatcaaatctgcttaaatcgggacccaccaaaataatttacaaaaatggcaacacggttttatttatttattaaacttcgatagcaataaatacatggactaataatcaccagtattaaattaatgagatcactattacaatcttaatcacgattttattttctagtgaattgtatcaatggaaacttttaattgtcatgtgaacatacaacgcaatattcaccataacacccttcatcaagaaacatcctagcgatccttccattggcaccacacggccaaaacccgccaggtcggtgctcatcaccggtgccgtacataaccctgaggatctcttgtgctgtccggtcataagagagagagtaaggatcagcggagaggatgttgctggtggtgcgattctccgctcctagccacaacggcacgcacaagccttcgtccttgatcccgcacataccgagttcattacggaggttagatatctcattggtcagctcagccaccgtgactccaccgtattcctccaccttctcattctgtctctcgtacagaagcgttcttatcactgcgtcttgacccgattccacccccaatagacccgccactagctgatatacattaatatcttaataatcactaatagaaaattattatgtcgatcgtgtatatagtgtagcttaacgtgtaccttagtataatttgtaacgtgtatatatataacatgtaaatgttttgttataacatgtatttttgcattagcctgtttttttatagagtttagtaaagcttttactatgcgtaagctattagaactattttaaatctaaactaatttgaaagtaagattatgaatatatttctttcaactacttttagttttgatacatattatatagtatggtttttgggttgccagaattttcaaatataaatccgtaaatagcagtagcaccatattactcttctcctgcgaaaatatatatacacaatcatagttgattacctttttgatattgaagtagacaaggtaagggatggttccgacataaccggtaaggccaacataagggatataatatgaagctaagagatagttgagtgagttggcgtaaggatcaaaccgcggattagatttgcgtccaaccgctctatccataaacactgcgaaattctctctcgtcagatttattagcggacgtggaattcctcccgtcatatccgtaatcgcccttcaatatcatcgtaacttattttaaaattttaaaggtcatgcacaacaactattgaaggaaaatttgaatttgattgttttacctaagatgaccgatttcttgataaccaaactcctcgatgattcgattagttataggatcaaggttggctttcttggcccctatcggcggtggtccgcctttagcaagtgtcgcgttataggcatcaagtccttttccggtagccccttttaagaagaactcggcctcggtgaactccaagttcatcgcgaaatgaactcgatcgacatcgctcgctgatatattcccggagcaactacaagaaccggacttagccggatttgcatctactgcaataaccaagacgagaacgagacagagtttaaacatgcttttcctttcgtctctctaataatttatgtctacaaagcatgtacgcaagaacttagcaatttatatagggttcaaattttattttcgtctaacaattcaacgatattaagttataatgttggttagaattgaattgtttaggacattacgtgaatactaagttgatagcttatttaggtatcaatggaatattaacaagtttttctatattgctaactaccatacaacatttgacatttgtcattacgtaaggtaattaacatgatatacctgattcagtgaaatatatattattatcacacgttactatatgcccttgactccttgttatgttatatgtttactctcaaccgatccaagtaggtgtatggaagataaggcaaaagaagaagaagacgtggtaacttatgatggtgactaaatgaaaatatcgataccgtaccttaataagttaagcgatatctgcattataacttgtggtcaatgaaattacaaccacctgtcaagaaagtaaaatcaagagtgtggtcatttataacaaccaatctatgtatgaatgtatctaacttactaactcaaatcaaacttatatttagtttatctatctaagaaaaatgtgtttgacagcatttcgacatgaaattgaaaactagagtcttttcctgaatgaaaaatatttcattggaaaaatataatttatgctttcgcatggtcaatgaactgtacttggtcctgatgattcaagaggtttttttaccttttagattgagggtaaatattatgatcgtatagtatatgattaacacctattaatattcttggtcgtatttgtacaacatttttgaataatattaaaatataaacagaaatcattacagttttatatacgtttttataagtacattattataaatttataattgattttcagacacattttgtatcgtacatatttcttttaaatctgcgttaacagactagcatgagaaactagtgggccttatcttggaatggactgcgtttctgatgctcatgggcctaatcttggagtggactttaatttagtcaatgaaggcttaatttgtgaccagaagataacatctcgattaaacataattgtttgttttgtttactaactaattctaaatcatcccaaagcccatgatgtatctggatttactctgtttaattttgtacggaacataaatctgaatatttgcgactagtaaaaacaatctcaaaaccgtttgaggtaacgcatgcggaagcgcatctggtgtagtggtatcatagtaccctcccacggtactgaccagggttcgattccctggatgcgcaaatttttattttaaaacttatcacttgccaaaacgagttatataattgagcatttgacttttgctggagatttgtaaccatgaatcatgtggcagctctccttttggaaagggtccactgtcttgtcttcaccaactttagtacaaagagatgaatccagaagtaaccacaaaactccactcactcttctcttctctttctttattattaattttttcaccaaaccaaatacattagttgggcttaggcttgcaattacaaaacagataaaattagggtaaacgtgaacacacactctttctctttcaatctactacatacaaattatcttagcatgaagcgaaaggggtaaaaactcttaatccaccaattagaatttttattccaaaaatgaaagattagttaacgtttataattacagaaatttggaaatgtatgtcggtcacacatcataaagactatacaatactgaaaagaagataaacttttagtcatctgtcacagatattgtcgctttttacgagtggaaaatggaatagaaaagatccacctatcactcactacttaaacagtccaagaacacgactaaacactaaacatgtcttgtaattaatcaaagacgaaaggaggaaacaaaaatgaaacctttctctcaatttttcgtatttgtggttaccgtttccgcgacaagctacattgatgccttcactagaaacgattttccaaatgatttcctcttcggagccgccacttctgcttaccaagttcgactctgtttctgtgttttgtattgattataaaattaagttttttttttggttctctgaatgatgttggtggaaatagtgggaaggagcttttgatgaagacggaaaatctcctagcgtctgggatacaacctcccactgtggtaagctttttttgtttcaattagtttaaaattctttgtatacgaaatatttatagatccttgttcaaaaattgcagatagtggaagtaataatggagatatagcatgtgatgggtatcacaaatacaaggttagtttcttttctttgccgtttacttgtctaacaagttatcgtaagtctctggccctgcattcatagatgttattgtccaggaagatgttatgttgatggcagaaatgggcttagaatcattcagattctctatctcctggtcaagacttatacctagtaacgcctattcttggtttcttaatttccaagtaactaataatgttgtctctgacctcttatattagaccctttttgtctgtgtcatgtttcagatggaagaggacgcattaacccaaaaggtctattgttttacaagaatctcatcaaagagctacgaagccatggtgaggtttttgtcttttactttatcgcaactaaaaccaattcatagcttttgggttctgatagacatattggtaaaccttttaacaggaattgaaccacaggttacactttaccattatgatcttcctcagtctctggaagatgagtatggaggatggatcaaccgcaaaatcatgtaaaaggacaattaaagattctgatataaaaaatatggctagaaaataaagaatatttgttatattgcagagaagacttcactgcttttgcagatgtatgcttcagagagtttggggaggatgtgaagttatggactaaaatcaacgaagctactttattcgccattggttcttatggcgacggaatgaggtatggacattgtcctcctatgaattactctaccgcaaatgtttgtacggaaacatatattgcaggccataacatgttgctagctcactcctctgcttcaaatttgtataaactgaagtacaaggtatacacatttatctctgtttcgctcttaaagccctaaacccatatgaacataaacagtatgatggtacagactaagcaaagaggatccgtaggccttagtatatatgcttatgggctatctccttatacggactccaaggacgatgaaaccgcaactgaaagagctgaagctttcctctttggctggtgagaaaaatgctttctttgtttcagtaacttgaggataaaatctgatgactaaattggtaatccaggatgttaaagcctttggtagttggggattatccggatataatgaagagaaccttggggtcgagattaccggttttctcagaagaagagtcaaaacaagtgaaaggatcatctgactttgtaggagttgtacactacaacacattctatgtcacaaaccgacccgcaccttctctcgttaccagcattaacaaactcttctttgcagacattggcgcatatctgatcggtaagcctagtttcttttcattcgatcgaactcttttagttgatatataactcttcttcattggacagccgctgggaatgcttcattattcgaggtaaggaccaataaatccgcagaacacacaatacatatattcaggccaaaagctctggtttgatccttcttgctttcttgaagtttgatgctgttccatggggtctggaaggtattcttcagcatataaagcagagctataacaatcctccaatctacattcttgaaaatggtacaaacttcattctcttttgtctacttgctctgtttttgatcttaagattcttcaattcacaccaaaaaaacacacaaaaaaaaaaacaggtaaaccgatgaaacatggttcaacgctacaagacacaccaagagctgaattcattcaagcttacattggtgctgtgcacaacgccatcacgtaaaagaactctccttcttcatcttcaagttcatcatactagcattgatcgactttattcctgacaaatattttgactgatcaggaatggatcggacacgagaggttactttgtatggtcgatgattgatttgtatgagttaataggtagatatatgaccagctatggaatgtactatgtgaatttcagtgatcctggtcgcaagaggtctccaaagctctctgcttcttggtacactggtttcctcaatggtactattgatgttgcttctcaagatactattcagttgcagagaaaatgctcaggctcttcgtccttgtaatctatttaactaaatcatcctagttttgtttggttttcatttcatctatcgtatgaaaaaaaactcagtggtttgataagatttggatatgaataatgaaactgtcttgtgatttttgtcggtcatcataagatttggatatgaatattgttttgttattttccgaaatttgtttttaaactacaaccgaaccattatgatgtgttacctatattggcaatttggcatgtaggtagagtcagtacatggcaaggattacacacttcaccaaaaaaaagatatttctatagtcgttttcagatgtttatttgtcgcgtattacgagtggaagataatagaaaagatatagactatagtcctcacaattcaccaaaatacacttcactcaatatatgtatttctttttaaatggtccaagaaaacgacagaaccggactcttcaattatttgttcatttggactcaaaccggaggaggaaaatcaaaaatgaaacatttcaatctgttatccattattctggttatcgttttggcgacaagctacattgatgccttcaccagaaacgattttccagaggatttcctcttcggagccggtacttctgcttatcaggttcgagtctgaccacatcaatggcaatcggggttttccatttttaattgttttgtctacaatttgagttttttgggggaatttgtggaaatagtgggaaggagctgctaatgaagacggaagaactcctagcgtctgggatacaacctcccactgttgtaagttgttttgttttattttcaactttgagtcatcattcggcgtttttgtgagaagattgtatagatcattgttcaaaaatcgcagataatggaagtaatggagatatagcatgtgatgggtatcacaaatacaaggtttgtctctcttctttgttgaagaagttatcgtaagtctctggctctgcattcatagatgttattgtccaggaagatgttaagttgatggcagaaatgggcttagaatcattcagattctctatctcctggtcaagacttatacctagtaacgcctattcttggtttcttaattcccaagtaactaataatgttgtctctgacctcttatattagaccctttttgtctgtgtcatttttcagatggaagaggacgcattaacccaaaaggtttattgttttacaagaatctcatcaaagagctacgaagccatggtaaggtttttgtctttttacttttaacggaactaaagccaattcatttgcttctcacaaaactattaaacaggaatcgaacctcacgttacactttaccactacgatcttcctcagtctcttgaagatgagtatggaggatggatcaaccacaaaatcatgtaaatgatcaaagaagattatgatctaacaaagtcacgttttaaaatatgaatagaaaaacaaaaatagaattaatgttgtttatttgttatattgcagagaagactttacagcttttgcagatgtatgcttcagagagtttggggaggatgtgaagttatggactacaatcaacgaagctacaatcttcgcctttgctttttatggcaaagacgttaggtatggaaattgtactacaggaaattattgtatggaaacatatattgcaggccataacatgttgctagctcatgcctctgcttcaaatttgtataaactaaagtacaaggtatacatttttatctctttttcgctcttaaaactctcaacccgtatgaacttaatccatatgacggtgcagagtaagcaaagaggatccataggccttagtatatttgcattggggttaactccttatacaaactccaaggacgatgaaatcgcaactcaaagagctaaagctttcctctatggatggtgagaaacaaaactttatttcttaacttgaggacaaaatctaaagactaaattgataataaaggatgttgaagcctttggtatttggggactatccggatgaaatgaagagaaccttgggatcgagattaccggttttctcagaggaagaatcagagcaagttaaaggatcatctgactttgtaggaattatacattacacgacagtttatgtcacaaaccagcccgcaccttatatctttcccagcagcactaacaaagacttctttacagacatgggcgcgtatattatctgtatgccaagtttattttcatcactattcaatcgatttttttttttgaaactctctttaatttataagtcttcttctttggacagccactgggaactcttcatcattcgtggtaaggtcctgcaattctgcagaaacatattgacatatgtacttatgccaaaaccttttgttctattttgaagtttgatgctgttccatggggtctggaaggtgttcttcagcatataaagcatcgctataacaatcctccaatctacattcttgaaaatggtacacttcattctcttttgtcttctggctctgtttttgtctacttgaaagcaaaccttcttgttcttaagattcttcaaatcgcacccgaaaacaaaaacaggttcaccgatgaaacacgattcgatgctacaagacacaccaagagttgaatacattcaagcttacattggtgctgtcctcaacgctatcaagtatggtcatcctttttcaaattttagtcctcacgttaatatatttgactgatcggtggtttagtttcggtttacttgactctctctttgtgacaaataatttgactgatcaggagtggatcggacacgagaggttacttcgtatggtcgctgatagatttgtttgaggtacaggttggatataaaagcagcttcggaatgtactatgtcaattttagcgatcctggtcgcaagaggtcgccaaagctctctgcttcttggtacactggttttctcaatggtacaattgatgttgcttctcaagatatgactcagttgcagagaaatttctctggctcttcttcactgtaatgttataatattaacgattctggtctagttgggatcctgatttggtttaatttcatcaattctatggaaaaaactcagtgaatttgcaaatgtatatggattctggacgtttagtaaaataataactttttacgtgtttggaatgaaacaaacatttaaaggctacttcatatgtttgataatcgattcgtatgacaattacgtaggaatatctgtttcttcttcattgtgtgatatacttataaatatatacgggtcttgaatcttgaattcttgatcccagtttgttttgagtttagtcatcttttttgaatactaaaaagcaaatatttcattaagaaacatcatgtattttacttcatcaaatatgtttgtaaactgtaaacgcaaacaacatttctgcgtttacatttaccaatttgttttgaataaaacaatgtaatagcaaacgcaaataaccaatgtagacccaacaaaaacttgatatcatagaaaacaaaaagacctagagagaatctttgagatcaatttgtggtgggagcaacggtcaagcctggagagactttaaggaaagccggacgagaacagagatcttcccaccacgccttgacattaggacggtcgttgatcaaaccggcatgaatcgtcttcatgaagtagtaagtgtaaggcacgtggtggagatcggcgagtgtgtaagtatctccggctaagtattttgtcttcccaagtctctcttcgtacacgtcaagtattttccctagattctccagattctcctccacgatggctgcattaggagactcaccttgaagcggcacgacgatgagctggtggatgacggcggagatcgcagggttgaagtggtgagcctccacttccgaccataacttcacaatcgctgcttctttagggtcttcgtgtcttgtcaaatccgttcctttgtctctatgcttctctgctatatatgcagtgattgccctcgactctgttttcagtagacaaatatttgttaaactaaactaaaatcattatgtaaaacaaatttatacgaaccaaaaagggtaagatcgtcatcttgtagagctggaactttgccaaagggctgcatcgaacagaacatatatggttagatactttcatacatacagatatgtgtgcatgatagtaatgtgttgagaaatatgcgcagcgcgtacgttcatggagagaaaagaagggagcttgtggtggcaagcaaagagattgacagggacaagctcgaactcagtgttcttctcatgaaggcagagaagaacacgtgccacgcacgctgacatctcatctccatatagcttcatcgccatttctgtttttgttctttttatcaaagaccgcgtcacactactcgtaacgcggaagagagagtgagggagatcacaacgcggtgcttctatatatatgacatatgctttgaatttcgtaaaacctagccagtatgtatgtggtcctgtttcttggactttttaataactatgtactgcaatatcgaacctaacattaggttatgtacgtactcgaatctttccagttttatacacattatttcagaaattggttattttgaggtcactgaaatttataggattcctttttctcgtgcctcgaaactctggtttacgagattcatctgccatcgttaatatctaattaatttgtgtgcacgaggcattcagtacacgtggccaaactaaataaagttgactgatcgatattacacaattggtttagtcaagttgtttggaagacacaaattgacgagccgtgaatcagttttggttagcgataaaaggttttacaaattataggacgacccatcattattatatacacaaaactatacaccatatctcaccgcttaagttgcagagagatataaagagagagaaggaacaaaagagtataagtagtaaagcttttagaaaactgaaggcggtttcagacagttgtggtactcaagctgagacatttcaccgccgttcaccggatcaaactggcatctgtagaagctgtttaagaacatcaaaggaacacaatccaactccggtcagatcaaatatgccatacacagaacaaatcatagagaattatgtttgtcaggttctcaattgcaatttcgtgattaaagtttgtcaatggaataatgtttgcttacctcccatccatgccaagaataacaacggtgttcttttgatggccaaaggcggctatgtactgagttccttcaaccaacctgaactgagccaccgaccactccgagctgaaatacctcggtaacactcctaaagagagtaaaagagttatatgcttaattatgtcaatgggagctttatgaggtgagtttctgatcaaatatgctgctaagttgtgaaagtaactgatttttggtttagtacctttgaataaagacagagacgacgatggggatgagggagtagcatcaggtgcaattcgggatgagtctttcacttgagatccggagttgactttgagaccaaagacatggaccgttcctttgtcacttgagacagctaaccactgagcatttgaagagaaggccaaactgtagatctctgctctatccgcaccctccttacctgtacagtcacatcaggttggtattatagtgccatggattccaaaatcatacagcattattataggggtcacagatatatttgagatttccttgatattagaatcacaatatttcatagcttatacatgatgagtgattacaaaatcttgaataagatgataagatagatacttgaaactttttctatggatgaaccgatgcaaagaggacttaattcagtgactaatgaaaattagactctgttcagccgtaatataaatcaaagtgtgttttgtcataactatggctcttgctgatggactcatcaagaacctgctaatgttttcaaaacattaccaggttaacctcagtaaggaaaagatgcatccttttcaacatgtctcaacctcagcagtctatcaaaggtaacatctaatctaagaacaggaatagaggtgaaaacgaaataaatcacagaggcacaaaactatcggcctctatcacacacatccagaaacagcaagaaaatcagctcaaagcaatcacgaggatataaaagagcacttttctgaatctctaagctaataatagaaatatagtcctactttctttcttttacctatttcatcctcagaagtgccagactacaagtcagagactaaacaaccaaatttgccagcattcttacatgaatcattagaaagtattcagctttctgtgaataaaaagcgtacctcttgacgcaaggtaccatcaacagtattgaagatccgaaccagagtacccttagagctagcagtggccaacaaatggccatcctgcgtgagagcgaagcaagctattctggaatcatgagccatgacgaatttggtccgtttagaagcgtagtgctcgatccgaacttgacctttctgcaaacctggacataccaaaaccatagaaccaacaccctgagaaacagcacacaaacccttagggttggcaatggtttcaatctgatgcatcagcttgaggtcagagaaattgtagacaaaaatcttctgctcaagaacgacaataatccgatccctcctaagccggacggatctaacatcggacctgaaagagagttctccgatacatcggccctggtgatcatcccaaatcataaccttattaggaggatattgaggatcaggtccgccaccaactagggctaatatattgcatctgaaaagcatctccacgactgcaacaccaccgccacgatcgaaatcacgccggaaaatctcgcgaaagggatcgcaattaaggatccggaagccacggtcagtgccgacagcgaagcaagcatgatcttggttaaaggaaagatgaagcacggacggaggaggcatcaccggtaaattgggcgtagggggagaaagaggcgattgattagaagtctgattaggttcgtcggagttaagactcatggaggagaaggaatcgagagagtcgggttcgtctacgcgatcgcggtgagagggaaaagtagaatcggaatctgaggcagacgtggaatcgggattagggttggggtttggccaggaggaagaagatacggtggccatggaagaatgatttgaaggaatcgtaagagagattgaggaagaagaagaagaagcgtggagaaggaggaatagaagaaataggaagaagatgacttcgtgctttgcttgttgcctgccgtcatatatctttcaggcggctactcgacttctttatttaacaaataattggataatatcaaattttacagggaatttttaactgattcttttttttttacagttcagaaatattatttctttgtgaataacaccagattttttatttttattaagacaatttttaaaaaaattagattctttgctttacgattcagataaactccagatatagatatcatagatcctactatagtgtataactataatatactattaccattaggttataaaatatatttgaatttttataaatgaaaatacaataaaaaaatgtgttatttcattaaaaatcattttttttttttcttcctattgtttattttgaaggataattaattgattgttacataaatctcgcatttatctatgccaactaaaaaaatgtagaaataatattatgaagaagatttttcaaaaataaaaaaaacgcaacaatttttattctttttccaaaaaggtttgttatatatattaaccaggtgcatcattcatcaatggtgaaccatttttggagagtacaagacagtacaaacatgatacagatagagcattttacaaaccaaaaacgtctaagtaaagaacgtaacaatttagggtgtgattttgttagaaagagagaaaaaaacacacaacaatttttatgttgagttcgaagaaaaagaacacacacacaagttgggggaattgatgacatcattagttaaataaaatcaacaaatctccaaaccgacgactaggcttccagacgttgacaatcaattaatatctgtaaggactcatcggtggatatagtcccggttgtgtcagcggcggagccaccgttgaataaccttctggtggacatgataagccaggaaatatagattgatacattgtgggtggacttcccggcatgttactcggcggatacaatccggggaagcataccggtggaagaatctcaggctgagcaagtggtggataaatcggtggctgacaaggaacgtggttgtaactaaacgatccaacacttggtagcaactgactcaacacgggtccgttcaactggctcaacacgggtccctgcaactgactcaacacgggaccattcaactgactcaacacgggaccgttcaactggctcaacacgggtccgttcaactgactcaacatgggtccgttcaaaacgggccggtaggtcgatacaggacgcaccggcgcttgagctgcgtaccgtgagcagccgccaccggtcgggacctccaccggacctgtgaacgaataagtgaaactaatatcggctttggatttcccgatttgatatgtgacgtatctttgaccggtcttatcgtttccaagatgatccagaagttctttcacctgaacatgaacctcgccgatgtctttatctactcctccacgttgctcgcacttgatcttgaaagtgatcacaaggcggttagcctctgctaagttttggtcgaggatgaacttcatgacatcattgctccatttggggctggttccaccgtctcttgccgcttgtgtccgctgctcacggtggtcagagcattttggatcaccggataacttcacggccacaaaaacatccatcttcgacactttcttaagcccttttgctgatgtcacatttatttctagagatctcgtccccattttgatattacccaatgaaaaagctggttctctctagacacattacatataggagttgcagagaagactaagtgaaagtcaatgacaactatttatagaggaccttttcattattccacccactgttctgtttttaatgtctctcgaataatgattttaatataactgtaggagtaattattaccattaaagaaggagtctgtgtttgacgagtagccaaaggcatattacaactcggtcaaaggtaatagacaaagcaaagacaaaaaaatccattgcaaaagcaaactgaatacgatcaaatgaagtttggcacacaagatacagaaatcttcaagaaacttttgtttattcttcgaaagatgcaaactttggagataggaggaaaatctcgactagtgatgagtatgagtcccatccccggtttcttcgcctttccttgatgcagctcttagtttacgttgttcttctttgtatatcctgtttcttcgttggaactagatcaaaatacacaaatatgcgctccttatcagttcatctaccataggcttatactaagcaaagaagaaagaaacaatattggagacaacaataataaagcttttgattccctcaaaagttcacacgcaagcctatacattcagtttcattcaaatttatgatttcaacacatagagaagagagacaatatcgttccatttgaaagatcaaacagagacaagagataaagagtaagtctcaacttccaaacttaacagctaaacaattcatggccatgaaactaaatctcagataagggaagtggtattatattaacctaatccctacaagcaacctagtgaaagcatccacatatatacttgggagattgcaattcaacttttctagtttcaagcaaaaagaaagcttatgtttttatacatgtagcaaacgaaacgaccagactgagagattgttccaacggatctaggaatgacttaaactcgtgatccagaaactatcgatgatcgtacagacgaccgataacaggacgaatcatcaatgaaacagatcaagcaatcaaaagcgtgaattgatgacacatacaacaacacaggaacgataattgaaagaaaccctaaaaaaaggaaaaaggcgaaacctaacctctttggaatggtgaagacactcgaggtagtcttcacgaagaagagtacagtctttgggctctctgcaatgagacatacattcgctgaaatccatccagaaatcgtaacacctccctttgtttcccgttatcccccaccccgacgccatttttccttcctctctctctaatcccaggagaaatttagtcgtcttcttcgcctgatttccgaggatccgatctattcaggttaatccaattagaacccgaaataaatgtgcctttatattatgggctttaacgtaaacacttcatgggcccaactttgagatatcaattcctgtaattacgttagtgtgaaggtaattattaccagaattttacccgttccttaacattaagcaggaattgttgttactttgttactaggcttttaatagtttaataaaatttagtctgctgtcgaaaaaaaaaaagtgcaaaagttcctttatgtttgacttgttggtggattagaatttcaaacccctgatttagcagttcttaatggccattacggactatatatgatagtaatttatatgtcatatataatgttatatattttatatataaaacatttaattaaatatgactttagtttttttttaaagaattatattaatttttggtaaagtttaattctagtatttttacggtattaaaaaatgtttgggttgttttttcaaatttaatagttaattttccacttttaaagaaaacaattgcttttcattgttttggagaaggtagttcacgcccatggctgtttctaagctagggaatcttttcttatgtgagagtgagaaaaggttgttcaaatattacccagagacagactacctttgttgcctctccagacttttgtgttataacttctttcgtcgaaaatttagtctcacttcgttccaggcccgactcaatattattttgggttctgtgctaaaaaaaaaaatatcccctttaaacctttaaatccaaaaaattttagtttacgtggcagtgtttactgtctcttgtaaacgtaatacacttgtagttctattcaaccattgtaattttatctagaaaaataaaaattcctataaattaggaccctaaaatttaagagagaaaataaggactctgtgccttggcactgctggcacaccctgcttcgttcacaaccaggatctgttcggaaaatcagcacttgtgggtaccaatatggacttagctatgtacaacctgaatgtcttccgaaaatcatcagcacatctccgcaccggtctcgaatatctaatatcgtgatggaattgctgttcccaaatattttgcttacctctactctagtgtctctaattatattcggttatcgttacaaatattctacttgaagcggttacttatctagctggttttgcttatgtctacatcttactatttaatatttattctgttaagcttttccataatctattaacatttaatctcgccttgtttctaataaacacaatgctttaaaacaaaaattagtcattacacagtatacatactacatagcatattgcttaagaaaaccagagacgagaagcattctatttctacaaacagatgagatatagcttaccttaacattctatctctacacttattatgcatcaaagatgatgatgtcgttatggcttcacaagacgataggctataaatttatcatctctaaagagcatctccgcgtcttgaggaagagttatctcggggttccatgggcgacaaactacatgttggccagttggtatactcaggtggccagttcccattatgagcttctttttctcactctcatctactacacatgatgatgtttcactaccatcgtttgtgggattctgaggcatccacgaagaacaagcagcaatgttcctcttgataccattggcagctggtgcattaagagtaataacgtttgtaggattgtgaggtataggcaaagaagaagaagcaatgttcatcttcataccatcagtagttagtgcactaagagtaccatcgtttgtaggattctcaggctcattcaaagcaacgttaatctccttagcattactggctggtgcatcatgaagatctggaaattctgcacagaatcaagactgtagagcatgagttttgaatgaattaaccatcttgaccatttagcattaaactgaaattggaatccatttcatgcagttaaagtaaggttggctttcttatttcatagctgtttcctacctatctcaggaaaatacgtccctctgattggaccacaagttataacaaagaaagagagtttttcctttaacaaacaaaccaacggattattcatgtagtgtagtattcaaagaaaactaaccatcttcattcactttaatcccctttgatggggtatcaggggtcatcaccaccttggaagaaggttgagaatggatctcttgtggactgctcttcacatttgaatttacatcttcttgtctctcactaggcaaagtaggcgatccggtctggttcgagttcccatttttgatactcatgaatgcaactttagcagcgctcatttcagccaactttttggttttcgcctcttctccactgaaaactttaccagcaaactcaacagttgaagtaaaagtaggcgcatgcgatggaccagatgtagcagttgcataaaatggtaacagagaactctctttctgtgcaatttcttgtaacaggttcttgtaggcaacatcaattccctgaaacaacaaaaatttgaaaatcaaaatttaaacaaatgttgaaaaagcacataacttgtagtccaaaaagagtgtgaggaactagcctctggactttgtggcgtcaaagaagcaactgcaatttttgcagcggcatgttcagccgattttagtgtcggaaagaattcagagctctggaaagtctgtccacagaatgtaacattacatctaaatctaggagcatgaggaggcccttctctctcattcgcatacactggtagctccagattatgttgcagggcatacgcttgcagttgacctttgtatacatgatccatctctatctaaactggcaggaattaaccaaacataaagagatcaacgtgtatcagaatttctcaaacataaatggcaaacgaagagacgaatttcagatttcagaattggtcaaccaaacataaagagatcaacatgacaacatgtatcagaatttctcaaacataaatggcaaacgaagagacgaatttcagaattggtcagactcaatgatctagggtttcgtacagatcgataacatcaaaacagcgaaaggaatctacgattataaacacaaaatcgtacctctttgaaatggtgaagacacttcgagggaggaagtgaacaatcagacaaagcattcgctgattgaaactcatcgagaaaccataataagtatacacatgtaaattgtctcaaggatacgaaagattcgggttaacccagcttgaacgggtatgatccgaaataatccattaatgggccaaaattgggcttattcatgaaagttgtaaaggcccaatgaaactcgaagttgatcagaaggttgtcggcgaccaaatttctaaatccaattttgggagggagacgacggcggaggttgaaaggggaaagagcagaaatggtgaccggagaagcgttgatcgcgtacagagcactgctcagggcaacaaagaaatcattcgccggagataccgagatgctaaaagcttcggcgtccgagatccgtaagaaattcgaagagaatcgcctcgtggcttctaactccgacatcactcgccttctagaagaggcgcgtgaagcgacgcagttcatttccaccatgatcgtccaggctaaactcaacgaacgcggcggatatggttcgttctgactctttttatcttgcgcaccatctgtttgttgaaatgcgtgagtgaaagctcatatctttggaaatttgatttttctgtgtcgtagagatgaaagcaagtcaggaacacgcgggagctactttggagcttccatcagaggagatgcttcggaaaaaatctgtatgagtgtaagtctgaaattggattacttctcccttactcgttttgtttgatcgggaaaggtggatcctttttatgcttctctgtttgttttctcttttcacggccaagttgaatcaataagaagctctttacatacatttttggatgagattcgtccatttcaaaacaagaattacagaattcacttacatccatggctaatattgattatgttgtatgttagactgtagacctcacttttctacttttcttagaagcattgtcttgtcgtagagacccatcttttgtgtcattctcaaatcttagaagccttgtcttgtcgtagagacccatcttttgtatcattttcaaatccatgtcacttttattgttagattgaaatataattatttcctacataagcttaggtttcgtcatctatctagatttccttgtccccgattgtttcacagagtctgatgggaagtttgaaatagagttgacgcgagaagattgaagccgtgatggtcactctagtttttcaaaccaataaaatagaacctatattgttgatacggggtccgagaagtatggttcattttccaatgaaaaccactacacaatctgtcaagatttacccccattcatgagtgtccacagcatttgctcagaagtccttttttatcatctccattcatgattttaagttcagagttctagctttctcttattagtgtctcagtcatcttctcgctggtgtgcaatccttagattcttgtgttgaagagcattgtttcataggaatcatgtgaatcgtcataaccacatatactttgttctctcaattcatgtgagtttgattcaattctttagctgtattcataaatgctcacgcattacgtgattatgttgtatataagaactcacgcacgtcctaaagaaagtagccatgtcgtgaataaagaaaaaggtaactaaaaaaatggattcgaaaagagatatggtcatgggcctcatggcgatgacaaaactacataatgtagctttttcgatgtaaggtaccaaaacctcattccgtacacaactagctcatcttccatttataaacagtttcatatataccatatattcgtagccattgatgaaataaatattatcatagaaggatttatactcactcttcttatcacttcgttgcataagagatgcgacaaattacgttttcaatctttgttaagtccgcctggtagagtaagaataagctcaatgattagcaaaacaataaataaataaatagatcgatcactagttttattaggttggagtagttgttgaaaatggtaaaaaaaataatgatatttctattcaacatagtaatcataatacgagataactaaaccaacgaattgttatcggcaaaacaacaaattaataaaatcgaacgaagtgttagaacgaaatgttgtgatcataactccgacacctacaaatggaccgccatactttttatactttcactttaaaacctaccaaaacccctaaattaaatttatacgtgtctatatatacgatctctcgtcgagacaccaattaattttgtataaagattacaattctcacaaaacatgaaaactcccatgagttcttctatcacgtttgcactcgtcttctttctcctttctctcaacccaacttcatcattaccgtccaaacgcgaaagctacgttcaaaacgcgtgtagtgttacacgctaccaagacctctgcgctaaaacgctattgccgtttgcatcagtcgccaagaacagtcccagcaaatgggcacgtgccggcgtttccgttgccataaccgacaacaaagacgtccttagacaccttctcaaaacgaggctttcaacgattgggaaacgagaccgaatcgctttgtcggattgtcgcgaacttctccaagactctcttgatagtctccacaagtccttggccgtcctccggacactcagagccagcgagtttcagcagcagatgagtgatcttgctacgtggcttagctcttccctcactgacaaggacacgtgtcttgatgggtttgaaaagacatcgacgaggtcatcatcaacggtcaggatgattcggaagagagtcacgacgtctatgtacttgtccagcaattctctcgcactcctcaacaagctagcggctaatggtttgtaatctcttaaatcataaacttttacaaaagctttaattttccatgaaagtgtaagatcatattattaataaggtggttcatggctgatcactacgataactgtatctctctcattataatggaattatttacaggcgaaataataatgggcctaatgtcctatattgggccaatgttattagtcaagtattgtcatttttattcgaccgtcacaagcccatgccacctaacgagtaacgaacctctctctcatcaagtcaaaacgtgagaagaagtcggtgataaaaacctaataaaaatcactcgaaagatatttttttcttggttaaacactcaaaaagattttgtctaactactataactcgttttagtcctttccataaaccattttaattccttttacgataataacttgaaattttcttactcttaacgccacaacattgctaaacgaatttcatacaaatatagcgcaattattactttgatagcatattattgttgcttcatatcatatgtttaggtagttgcaacttttgttttgtctacatgtatatatcaccgtgttaattatatattttgtttcatattgttaagatcagtatataactttttaaaacaagatgctttgattttgtcacttacatatacatagtttcatataagagatccttcctaacattgtagttagctagtcttattccattagttttaaatgggtataaaatttaattgttatttataagaaaacaaagaagttgattagagaaagaaaaaaacaattatttataagaaattcaattattagccatcgcgaatctaaaaagttaggcaagaaagtgaaggagatgtggggtgacataactagctaaccgccaggttagcatcacaagtcaacgtaaacataaaacaccaatgctcttccatttttcaaaaaaattgtattcacatccgagtctgaagtttttttgtgatttgtttagatcacaagttaggaattttgtagttttgcgcagggagggagacgccgagggaggtgtttagggagggagggaggtagacgccgtcgctacttagtgtaaattatcttttcagatcgtaaagctagtaaaatattgatagtataattcatatgtagctattaaaggtagatccaaaccatcatggtttaaccatgtgttattgtgtcgtaataagcaaaggctttatcttatataatcagaaacacttaaggacgtaactcaaaatatacaagtttcattaactataatcaaataattgtgtttgagcaaatgtttcaaatatatggttagtttcaatcaaaacgggttttcttttattctagaccattccatttttttctaaactacttagacaatcgtaatcactcggtaaaaaacactgttacaaaatggggtcgtagagatctaccactaattaaattggatttaccttttactctttggctcctttttgaaaaaatttgaagttaacaaaataaccaaataaaataagaataagtcgtcacatttaatctcataggcaatttttgaatctaatacaaatcacgtttttccaaccctgatggtcaaaagcgttatgaatgtgctttgtaaaaaactgtttagtttgttaggacatgcttttatattattacaaattttaaatatcatgtttatgctataattgaaaaatacgaacgtcgaaatcactcaaagctcacaccaatctggctttgagtgctaagttagggtttggcattgactttgtttacgtgagattaccatacctaacgaacctatcatttcattaattacaaattgagtattaaaaaaacatataatatgtgttttcgtgttgttgcaaataatggactaagtaacaatattcattggtccgattttgaaggaaagttcaatgaaataaataaaagggtaatctcgtaataagagtgaaaaacaagccttaacctgtaaacgcttacgctagttaaatacacaacaaagaccgattcgcttttcactctctcgttcaaggtccgactcagttcccggcgagttcgactcggtgattgattttttcctagaaaaataaaatttcttcttaacgattgatcgattttggttttctatctttcgattctagatctagaattcaatttgtgaggtttggagatggcgagcgagctgatcaatcggcgacacgagacggatcaaccaaccgccgatgcttattacccgaaaccaatcaaaccatggttcacggtgactcgtccgatgcgttacatgctccgtgaacagagacttatcttcgttctcgttggcattgcaatcgctactttggttttcacaattttccctcgctccacacaatcaaccccttactcggatcctttctccggttacggaatccgacccgacgaatcgtacgttccggctatacaagctcagaggaaacctagcctcgagtacctgaaccggatcggagcaacaggcgggaaaatcccactgggattgaaacgcaaagggctaagagtggttgtgaccggtggtgctggattcgttggatcgcatctcgtggatcgtttgatggctagaggagatactgtgattgttgttgataatttcttcactggaaggaaagagaacgttatgcaccatttcagtaaccctaactttgagatgatccgtcacgatgtggttgagccgattcttcttgaggttgatcagatctaccatttggcttgccctgcttctcctgttcattacaaattcaatcccgtcaagactatcatatcctttctttcttttttttcaattttcgattcgattttggaattgttgtttgtgtttgttccttgactttgattgatacaagacgaatgtggttggaacattgaacatgcttggtttggctaagcgagttggggctagatttcttctgacgagtaccagtgaggtttatggtgatcctctgcagcatcctcaggttgagacttactggggcaacgttaatcccattggtaataatcttccctcattagttattcaaattaaagtttgagtttttatgccttgtgtttggttgtgaattctctaatcggaatctgatgaaaaggaagcgttattgtttcccaatgtttattccaccgtcgcgtgacacgacgacgtgtatagagcttctatgtcttttgtgctttctatcattttctgtgtcggaaaatgcgcacgttaggagagagggattgttcaaaaaacaggtgttttttatggttcagatctggtcccctgtctctctaaggtcaaaccattgaagcgtaaataacgggtctttgtgatcgtgcggctctattatacgtgtctctaccttagacgcagcctccacatttactgctagcctaacatttcaattgccgactttcaaaattctagagcttacttgcttttaattctaattttactggcacggtaactattaccaacacgtgcatgttttcttgtgatttgattgatgactaattgggtttgttatgtaacaggtgttcgtagttgctacgatgaaggaaaacgtacggcagagacgttgaccatggactatcaccgaggtgccaatgttgaggttggttactcttttttcatttaacctccttttcaagccattttacggtttgtctagttgagtaacaagagtttattgttgattggccacaggtcagaattgctaggatcttcaacacctatggtccaagaatgtgtatagatgatgggcgtgttgttagtaacttcgttgcacaggttggttaataatctagtgggcacaaaactattaatgattaaagactggtttggtggagtaatgattgttttatattggcaataattgaacaggcactaaggaaagagccattgactgtttacggtgatgggaagcagacaaggagtttccaatttgtttctgatctggtaaggctttccttttcccccctcaaagaatagagtcctacaacttgccaacacaaatatttgtattctattgtttctttggtccctcaagagatattcttacattcttgtggaaaggaaacaaaaaaaaaagccaaatttggtaggtggtttgatgtcaaatcactagtatattcaacttcaacccttttaagtttagacctttaagttctttttgtatctagtggagactactttttagggtgacattctcaaaggaaaggattttacttctgtgtagatgcattccagtatcttttcatattttggggggtagaaagatttgagagaagggaaaaaatatgtgtttagtgagctcacatgttattgaataaactggtgggtatgtcgtgggatctgataacaaaagagaccccaatttgttatagatattaaatggtctccattttagcaatcttatgaagacggctgagtatcaataatcaatatcatgtgacaaaggaccaaatgggctctcaactttattgccctctttgtcctggttatttttagctgtcaatattgtatgatcaatctgatttcgtgtttttgtgatgcaaaaggttgaaggtttgatgagactgatggaaggagaacatgtcggcccattcaacctcggtaaccctggtgaattcacgatgctcgagctcgctaaggtctctctctctctctctctatacatacctttcgatttttatatatgaccctgggttctgataattgtgatttggttggtttttgtttgaaggtggtccaagagacaattgatccgaatgcaaacatagagttcagaccaaacacagaagacgaccctcacaagagaaagcctgacatcacaaaggccaaagagcttttaggttgggaaccaaaggtctctcttcgtcagggactgcctctcatggtcaaagatttccgtcaacgtgtctttggtgaccagaaggaaggctcctccgcagctgcaaccaccaccaagacaacttcagcttgagcaaatgcagaatctgagtagcagccactgcggctggtagtgggtttataacaaaattgcaagagcgtcgtttctttaaatttatttcgcttttgatttctgttttgataatcgtgtaaacgtagagtaagaatttggtacctttacttactactattcatggacctcactacagttttaaaagaaaaaagaacttctcttttgatattacaaagttcactggctgcgtttcaagtcaaagatagaagacaagtgaaaaatacaaggcaacactagtagatttaaggctcataatcaaaacatgttctcactgttgatgcaacaattaggatttgacaagaagaagcgagaattatcataagaagagcttctttcacttggggttcctgaggacgataatgactgagtctccacgcaggaacatcttgctgatgaatcgatctctgttaacaggaagagctttcttctttccttttccggttttcggaacctaaaaaaaaacacagagaacccatgtaagaaacagcacttgtctactagtaaaccacaggcagaaaacagatacaaaagatgttaacctcagtccacatttctctgacattttcaagaaccatgttgcagtgcctgtcaaaagccctaactcggccaaggagtttcctgttgttacggcaattgatcaacacctgagtgttattcttaacactcatcatcaaaacagagagtggtccagtgttgaactcctcctcctcagtctttccctgctaaagaatgacattcaaggaagagtattaaacaacaatgcatccaatacaagattgccttgttaagtactctcatccaaaactagcaacattcattcatatagccaaaactctagctgaccatctgtgatgaattctcaggacagtgttttctattcactaacacaactacttgaagatacagaaaccacatgacttgtaatggtacatattcatcaacaaattacataaaatgaaggatcaggcaacaaaagattccaggcactaaaaagctagagacatagacatggtacagatatcgaatttagggttctatgtttatgcttgatagatcgagaaatcagtaacgagaaagacggggagagttacttacgttggtatcctcttccattggtttactgaaatcgagaaaaaaaaaagtgttagagaagatctagaagaagaagaatgataaaaattagaagacgaagatgagaaaacctagaactagaattacctcatgttcacttgaagctcgatgaaattcggcgaaacggtggaagctgaaaaggaggaaaacgatgaatttagaaactatcaagagattttcatagaaacgcagatcgaagaaattagggttttacctgctatacgctaaatcccgctttcgttttccaaaaagatctctctcacacgaagaagaatgatgaggtgtactcgagaaatcaagtgtaaacaaactcagtggcggtttaagagggctgaattgaggcctatctaattattgggccttaagatactaaagcccattaaatatcctcatatgttttttgtttataaattaaggcctaattggaataaatttcagtttagttattattttcatagcccattcaaatattcacaggagtacagagattttgacttttcaaaatggtttcaccttttacatgaaataaaaatgctcagattcgtggtttagcctggtcagctcttctcattggatgggttgttcaaagtacaaggtccctttcgttacatttcttaagtagggtttgagcaatttgtaacttataaaatgaagtaacaacttccaggacaggtttgagctcaacgattagtaagacgtaactgattatgaagatgaccaaaacccgtccggtatgctttcctcatacgtttgctctttcgaaaatcttctagtacttgggtctacaagatatatatgtaactgttaataagaagaaatcccatgtttgaaaatatttaatcaatcattagaaaaacttgccttctgatattgctttctacagcggtttctcattcgaattctctcaggaaaataacgctcctgcttgacaacaaatggaaagagttaaacaggttttgttgctcaaatgatgatacagaggaggatgcttacacacactgcatggtcttcacttgagagatgcgtcctcaaatcttcaaggcttttgcaatcacaaagacacaacatgcaagaaaacattttggtagacggttcacccctttgactttgactgcacttgcgaagaacgtggtttcttgtctctgaaacagagagcgtaattatatagctcagaaacagagtcattagtggatgatgatgataaggagaggagaaaaaaacacctgcaacaagtaagcttttccaaagccactctgcagaagtgagcaggacagacattttgtaaggcctgtacgaataagccagaaaaaggttgtacttcgtctcttgtagtaagtcggcgattaaattttcgaacatcatcaccacaccatcggatatgagcatgattgtagccggaggaggattacgagctttccactgcttcatatttataaacatgcgactgtatatgacttctgtttcagacagtaacagaaaagcatttcagtagaaattccagagagatggatataattaaccgaatggactaaccgtcgatggaatgtgcaagatcgactccagtggaagagagctctcgcaggatgtgatcaggggttttgttgtggtcgccacatccggtgatggagacaggaccagagtagcctagtttcttgaacgccccttctaaactcggacggacctgacgagcatcataaccctctggaatcggacagtccttcatgtcccaccacaccactattggagctgtcgcgtactcaggcttcgcagtgtagttctttgcccacgtcctcgtcaaatagtcaagttctggatgtatacggtttgtaacctcctgcgagaatttatattttagagatcaaaatctatatttttattcaacattatagttgactgggtctagaggaggatgtttacttactttcactgcatgctttccactcgagacatgcctcctgaaaccctccacgctttggccctggtaagagcaagatttgcaataaaacatgggagatacctcacaactgctgctgcacttgtcctgaacaaattcccttttggtctcaagtaaatttctccagatccactctccacaaggtctcagtgccgaacctgcgaaaggctcagttgaataagccagaaaaaggttgtatttcgtgtgttgttgtagacgggacagatcccaagcgaagacatgctgccactgatcggatacgagcatcattgtagccggaggaggattaagatctcgccactccagcatactcgaatacatgagtgagcatctgctttctgttgaaattgacttgagatgttgttcaaatttaaaccaagctagcactaaattcattcaaagagatcgatagcaattggactaaccgggtatgatttgtgctacagcgactccggtggaagagagccctcgcaggatctgacaaggggtttctctttggtcaccatagccggtgatggagataggaccagagtagcctagttcattgaacgccgcttctatgctcggacggaccagacgagcatcataaccctctggaatcggacagtccttcatgtcccaccacacagctattttagctctcgcgtactcaggcttcgccgctcccggcgtatacatcctctcaacctaaactaaattcacagacacaagagtcaatgatttttacaaagaaacctaacttattcaacaagatatgtttcttgaagaaattagggttttacctgctaacgctaaatcccgctttcgtgatgaagaagggactcgagaaaatcaagtggtacaatggcggtttaagaggggtaaatttaagcccacttatttattgggcctgaggagactaaagcccattaaatattcatatataagtccagagattctcttccttcaaacatgtaaagaaagatcgtgtagctgttttgtgtttcgttacaacttacaagaagtctatgtattttagtttggacacgatggtggtttgatttaggaaaacgaatctgaagtacaaaataaaacagattcttctctgtttagtttatcattacatagaagatctatggaccaaacgacgtccaccaccatttaaaccacaaaggagactagcttgtggtcgtttagattttccttgaccgttactaacaccgtcaacgaccttttgaacattggaggtaaaatcatgtacgggagtgactgtcagagaagcggagtcgccggtacgagcatcaagccaattgacaatgtcagcaaaaacgaggtcaacgttagcatcaggctcaccagaagttaatccatgccacattcctgggtaaagtttaatggttttgtcgcgtgtgcttgccttctcgaacaaggctttgcttatctctggatcagtcacaatgtctgcttcaccgtgaaggacaaagaaaggcaatgtgatctcgtggagagtgtcttcaaggtccatgctcgttctaagcatttcaagtgcggttttaagtcttggcttgtcttgatatatcagcttgttgttccttatctacattttaggaaccaagttttttattagtacactttttagttatgtgttgactgattcgattaatatacctcttcgcgcttgaccggatccttgaaggcagcatcgataacatcttttgtaggaactatcttccattttggtataatatcttcaactctcgttagtagatttatgactactgggtgtggtttcaccttctctgatatctgcccacacacacaaaactaatgaaaatgttgataattaagttgtgtctaaaactaatagattttgtgtcttaacttgattaaatatagggtttcgatgatagagatgagaagaaacgtgaccttacacatgggagcaacgagaagagccccgttccaaaaagaaggatctttcttgtgaagcaacaaagcaactgcacctcccattgattctccatacaaaaatctacctttctctttgtattcttcttgtgctataacatcataaaagtaggaaattagtcttgttgaattgaaaaaagatgatgaaggaatagatattttcatgtgaatatataagtaccagagatggatgtgtaatagtcaaagcagtcatttactatattactgaatttttttatatagcaacgagcacccttggaccgaccatgcccctcgtagtccatcccaaacactgcatatcccgctgatgccagccgtattccgcattctgttggaaacattaaaaatttattattcaacaacttttgatgaatttcattgagacaatgtatcgacaatgtgattaagccgaattagttgtcaaagatcacaatcaattacggttcacgagtttctcgttgtgataaggaaaagagaaacataactaatacttatatccgtgaccgtggggactcttgtcttatattctgtcaatttcttagtattacatttctagttaggtacacacaatcacgttgataaattattcgagataattagacgtaccataactccacaactagttttaaatatcataattaatagtatgaatttaccaccgagttttttctgttaccatgaatagataaactcggccacaccggcatttagataaattagagcagaaaaatacgaaaaatgtgaagataaggatagtgtaacgtttccccaaaataaagataacaacaactaagccgaaagctacgaagcagacaaaagtgcaactaacaccaacttttgctataagattctttttccattcttataattaatctcctctgatttttttcctcaatataatatatctagttcttaaaaataaaacaaaacattaacacaagatccgcgattagatggcgagatcagggatcttcaatgaacatgtatatggtcgacgccacatacatagtttctgtaaattgaaggaacataataaattgcctattatgctcgaaaacagaaatcatggatcaccacaaaaaaaaatcatctcattcaataattactctatctaaagcacgtcgctataacaaaacactcaacattaatgctttttctctggtcagaccatacaaatggagtatatgcattatttcaataatgtttgacccaaatttagactatatatatactattatgttttgttaattagaggacataatattttagtttatactattatgtattggggcagaggagcattaaatacctctcatgaagctactgcactccattccataacctgcacattgaccaattcttattattattaggagatttttttgttttgtgaatcaagtaaatcagaaaaaagcaaataaaattggattaataaaacttctattagtatagttggtgttaccatggcagaggaagactagagctcggggagaagaagaaggaagccatctgcaagcgaacaactcaacgtctctcgagtttttgatgtattcctgtgttttacaatgttaagaacaggcctgatctatatatatcataggaattaggaacatagaagaagaagaaaaggcaactaaactaaaggatgggcagagagagagagagatggaaatcaagagagacagagacctcctcgtactggaacttgaacttcatcatgctgcttctgatgtctgattaagtgattattctcgccgagcagagggagagagatagatatggaagattgaaggctgttgttatatatatttgtagaatgagacacttattttttctctctttcttatttttcttttatattttatttggaataataataaaatggagttttaatcgtaattgaaaaatgatcccaaaatagaaaaacgttttgacatgacgtcatactgggcgtgtgaattcgaagcccattattcattggtacaatacaacccaatctaccattatcctaaagccagccttttatgctcgactctccattttctattcgctgtataatttcctatcatatgcaaatatcaatctctagaaaagctcaatttgcaggattccatttttgacgcatgtaatagtccccgcgtttgggcaataccatcactaaatgttcatttcaaaaagctgatccacctctgatgtttacacattattcatcaggccagattatatcggttgtaacgtaaaaaccacaataaagtaaggatttattttgcaaataaaagtttatatgtgaaattgataacaaaactgcataaaattctgaagagggtggtaacatccgaaagagcatagaaattaaaataaaacaaggtttcaaaatatcgctaaacaacaaaaccattatcatatgtttcatagcagagaacataaggtatgatgcctagttcattctctgggcagcctccttagcaataaccctctccttagctttggtcttggcttgagacttggatcccattatgccacctccccacttcttcctgtactcctcgtacttgtcgttgaagttagcctattcacaccaacaaaaaaacacgttaagagtatggtttgaagactacatgagagtatcatttcaaaactattccattgtcaaaagctgattcagctaattaccttgatggcctcgaggattttgctgaactcaagcttgtcctcgttcttgacagtggtcaagcacaaggcagcagcagtcttctggtgaacgacctggagagtagaagcaggaaatgaacataaattagggtgaaaacattaaagtaagaaaaactcttaatggaagtttacatccatggagtggtgaattatttaccgctccaagacgagattttcccttaacaatgcagtaagggacttccattttcctgcagagtgcaggtaaccagaccaccaactcgatagggtcaacatcgtgtgcaatgaccacaagctgtgccttgttctgctcgatgaggtaagtcacatggttgagaccatacttaacaacaatgggcttcttggattcagcaggctttccttctgcctcagcttgagccttgttcaaaaggcgttccttctttgcggctttgtcctctggcctatacttcagaagaatcttgaagaggctggtggctgcaattacatgacacacattaagcaactgatcatacaaacatatagatttctgaataaccataagaaaaagagactaaccgagattcttatcaagggtcttggtgaactggttaagagctggaggaaccttcaacctctgcttaaggatacgcttctgcctttgaagacggattgacttaggccatttgatgtaacgagaaagatccttcttaggaggcaaagcgccaccaataccgaattgctttgggcgtctctcaaacaatgggttggtaactttctcctaaaatacacacaacaacaaatctaatgagaaactccaccaagactaataataatactcagagaaaaacaaacaatgcttaaaggaaaagctaagagagcataccggcttcttctttgaagccactttaactcccttcttcggtgcctatgaatcaacaacaaacggcgataagcatcagaaacaagagtcacatatcaccatagcatcgatgcattcactatacaaactacgaaatcaaacaaagccagaatcctcagggacataagtataagccagattccaatatagatttgacgaaagaagctcaaattcgaggaaacaaagagctaatacagatcctaaacaaacgaaagtggcaatgaaagctgcaaaatggtgtaaaagcggcgtaccattgttgtcgtcgacttctggaggtaagacagacggctgagagcaagagcgactcttagggttttgtgttttcactatttataaagacactgaagcccaaatgatacaaatattttttttcctcagaagcccagatgagaaaattacgtttttggacacgtattgctctctcaatatagattttctgaatatcaagaaaataatttttcgtcaagaaaattatatattcatgatctttatatcttactttctatatttttttattaaatcaacgatattttttatagaaaaaaattacacaacgaacgatctgatagcttttagtattcaaaaaagcatatagaacaaaaagaatcatatcaaaaagagtgaaatacatttataaattttgaagtagaaaaatggtggattcgtgaataaactggctttcctaagaaacagcatggctattaacatacactttattaaaaatcagttttgatgttttaatttttctatgactatctctatcttgtaaataacattatacagtaataagcattgatgcaaatacggtttcgggttcgagggactttgtgtgtacatgatgactacagagagacaagaccaaaagtgtggtctatagaaaagaagaaccatccacgggttcagccaactaaataggatcgaaccggagagtcagtgtattgatcttcaagttccaattccatacagtttcttgaatggacttgtcaaagacctgcaagcttataagatagtttcaatatccggtgaatgtggctgcgacagacactcgcattattagcaaaattcagtgttctaaatatcaccttaattagtgttgtttgggttttctgtcctggtgcaattagccaaaacactaaaagcagagacgaggccagccatgccaacaacctgtgtccagtttcttgtgctaatggcaacagctgctcccgccacagctcctcctaccaaagcattcacccaatcattcttgcctcgatatcgttgaagcccacaatgtgtcatagtaaacacaccacttacaagacctgaaacaaaaatgaattcttgatgcatataccaaaatctaaagaagcaatcactacttgaagaatttagatctaagttaaagaagagcagagcaactaatccaaaaaaaattacaactaaaagaaatctgcattatatattattacatggcaagcaaaacagagaattatgatctttcaaaacaaaaaaaaagtatatgcagcattcttcttctagtgacaaagaagagaattatcttaagtccaaaattacagatttatacccaaattccatagtcattgaagattaatttgggtggaaaaacaatagaggaagcaaattaccgcattgaaatccgaatctgccaatggatttcgccacaaaggaagcctgagaaacgccgcttaaacctggcgaagcaaatcagcaacaaagcacagattaatgaattgaaaagtgtaaaaactctctaaatcaaagctaatttcaatacctattttacgagcgtcacgaggtccggcgcataacccatataatccaccggcctgagcttcaacaaaaatctcagacatctatctatacacacactaacacaaacatgaatttcaattggatactagtgattaccgtcgcgacacggagaactgactcgacggttagggaagagcacggcacggcggagagcaattcttcctccatctctgcaaaattgaattaggacaaaacccttttgttttgttacctctccgtccgtacattgattaagaaaccaaatattcatttaaataccggttcaattcggttttgtcaaaaccgtacttgatatttaaaatcgatttctgatacacttgttagattgagacaatgagcaagggggcggcaataatagcttatgcaaatcccatctttcatattcgacatctaaagcttgaatctttcttgtggaacatcatcattcgtgccattgttcacaatgtttcgtcgcctcaacgacattctccgatctcagtctacctccgtatgcgcaaccatcgcgtctctcccgattttcatacctttccgtttcttctcccttctttccacaatccgcttcatcttcctcttgggcaacgaactcatgctcagattcttctttttggacttgacaaagacccatttgtccgaacttcactgctcaacatgtattcttcctgtggcgacttgagatcagctcagcgagttttcgatgactcgggctcgaaggatttaccggcctggaactctgtggtcaatgcttatgccaaagctgggttgatcgatgatgcgcggaaactgttcgacgaaatgcctgaaagaaacgtgatttcctggagctgcttgattaacggctacgttatgtgtgggaaatacaaagaagcgcttgatttgttccgggagatgcaattacctaaaccaaacgaagcattcgtcagacccaacgagtttacaatgtcgactgtactctcggcttgtgggcgattgggtgcgctcgagcaagggaaatgggttcacgcttacatcgataagtaccacgttgagattgacattgtcttaggcacagctctcattgatatgtacgccaaatgtgggagcctcgagagggcgaaaagggttttcaatgccttgggatccaagaaagatgtcaaagcttacagtgctatgatatgttgcttagcaatgtacggtctcacagatgagtgcttccaactgttctctgagatgaccacgagtgacaacataaacccaaactctgtgacatttgtgggcattctcggtgcttgtgtacatcgaggtctaataaacgaaggaaaatcttactttaaaatgatgattgaggaatttggtatcacgccatcaatccagcattatggttgtatggttgatctctacggaagatctggtttgatcaaagaagcagagagctttatagcatctatgcctatggagcctgatgtacttatttgggggtctctcttaagcggatcaagaatgcttggggatatcaagacttgtgaaggtgccctcaagcgactcatcgagctagatcctatgaacagtggagcatatgtgcttctctctaacgtctatgccaaaacagggaggtggatggaagtcaagtgtatcagacacgaaatggaggcaatgcaaaactatttccctcttttccaactcttttcttaactgttgcacagtttctgaagtaaatacagattctctctacaggtaaagggcattaataaagttccgggatgtagctatgttgaagtagagggagtggttcacgagtttgttgtaggagacgaatctcaacaagagagcgaaaggatctatgctatgctcgatgagataatgcagaggctgagagaagctggatatgttacagacactaaggaggttttacttgatcttaacgagaaagataaagagatagctttgtcttaccacagtgagaaactggctattgcgttctgtttgatgaagacaaggcctggaactccagtgagaatcatcaagaacctcagaatctgtggagattgtcatcttgtaatgaagatgatctcgaagctttttagtagagaaattgttgtgagagattgtaatagatttcaccattttagagacgggtcttgctcttgcagagatttttggtgataacaattgcagcaatgtttgtgttggattgaataaacacattactgaattttggaggttttgaaataaaagaataaaataataaaagaactaaaatagccatatatatagtgtctgatcagaggacagtaaaattctctcactcatatatgttttttgtattaaagataatatccatcatttttgatggacaatgcacagtttatacatttagaaggcccttgaaatcagaggcggcatacatatatacatatagactcagtcgagaatttccagtcaaaaacataacatattgttttagcttacacgaaccaaagcctaattaagaactttgccggaagactgcacctgaaaatcagatcgagaagttaccagtgactaagaaagctcctccggcaaagcaagacggcaaaactctatttgtaacttttactttcttatctacaaaaaagacaacactgccaagagaaagagcaacaaaaggacatcagagttgagtttgagtaaatataagataacttcaacaaattaaaattgcaaaagaatagatgcaactttttcttacctcctaaaacttagaaagcctatcaccactacaggaaaagctactataactccaaatcttgtaatattattatatattttctttgtaataccctaaatggcttattttgaatgagaacagtttagaatctgcagacacacattcaaagtaggttagcacagacaaaacaagagcttgttgaaacaaaaagatattgaaattgatgtatcaattactgacctgatactgggggactatctgtcactgtcacgggatcgagaaatagaaattccggtaccagaagttacatcttggttgctctgtataatccatacatgtttcttggataattagatgggaaagtagcttgttataatgttgccattgtgaattgttcctttggtagaataaaagaagcatctgaaaaactcaaatgccaagttccttccttggtctaccagaaacctcgtcagggtggactctgtcaaatgaactcctcttgcttttgtacaaatgattacgggatccaaacaaaatcctgaaatgccgtctgtgaacggaaatggatccagagcagcaaggcaacagtgatctcttcactattataactttgcctcttctcagtttttgcaaataagttgcttcattgtttttttctgtttttcaccggttgttggccttcatagcaagcttcactaaacgtagcaatccctccatgtcttggaagttataatcaagggcgcttttaatagatattataccctctccttgttgttgggcctcccctgagttttcaatacaagctgttaatgccacacgtgatttcctcgaggcatccattgacagatttacgtcctgagcctacaaacagtagagagtagctgagattaatcaatggcctatgtttatgactttccattttaactgcatcacttcatcttccattcaattaacaaactttatatctaagtataattgtggggaatgaacttggaagaggcattaatacacttacaaattgaagcagacgtaagagattagaacggttttgtgcagaaatgacgtggttcccagcaactaaaggagaactgatgccccttgaggtaccaactctgtctactgctgctggatggttcacgttatcaacatccgaggcagatgaagaaggagattcacctaaaaggcagtgacaagaccattacaacgggaaagactcaaagacatggccaataaggaatttggctatcttcgactagcttacctggcggaaccatttgtagagaagtctgcaattcatttcgatatctattagcactggtgtaggaggaattaaccactctcatatacgcgacctccatgcatttgtaagccagggcagcagctcccatatctttagacttctcatactcatgggcacaaaatctatcacggaaaaaggtttcagtgcttacaaatggaaaagaaggaatgaacgacgtttttcctttatcctcacaaatgtaaattacccgcaaagattcgcagtgctactataaatcttcatagattggaccattgtttctccttgtctagcactctcgttgctactcatctccaaaagaaaagcaccgtgaagaaacttaaggcaagcttggaagtagagctcaatgtgctcaaggtttgatacagaattctgcagtaacaagaaacgtaagactatgagaagcaaatacaaaagagaaagagacattacacagcaactgaattatgagacaaaccttgagacggtcagctgtatgtttcaagtctttagcttcttttaaagtattatgggcggcctgcgcagatgttatttcctttcgcaaggggcttggagaaggctcgcttttccttcttatttgggctgttgcctttgtcacatcatcagcttggatattattatttccagctgatgtgctgcatttatcgactttcttacggacagaaagcatagaggaatccccttggacacctctagatggtggccgtgatggagaagctaaatctgctatattactcctctctggtattctttcggagtcgtgcggttttggaatgtttggtctcacgatcatatccgctctactgtcaggactaccatcatatatcttcttttcaatatgtctcggaccatcccgtgaatcagacctaatgctttggctcttttctttggaccgagaagatgaaccttttcctgacttctttgccagggaatcattgctacgtcgatgatgatcgctagactgttttccttcaccgagaatatgatccagtttccgcggtaaagtcttgtggccaccattttcaaaattggcatcgagagaaggatcagcgcgctctttcgctttcaaagatcctttattatcccaaatatcaagcacagaagactcatgggatccatgtttatccttcatctgactctgcgatctatcactcccaccatcatcttcaccttcaccatctgagaattttttcaaactacctgctgcaaagacgttagcatcataagattcttctttctttttactcacagatatacgtttctccgggttggaaagcctcataggtgaggaagacaccgactcaacaggagaacatttagcttcgcgggagctgtttctgggtttatgagaatcagaaatcttagaagaacttgaggttgccgcgattgagttctgaacatttgcatactctattttcgaatgacttctatttttcttttccaacttcccattgccttgtgaataactaggctccttctcttctttacgaactcgagctttctttcgttcatgattttcgttctcactgtaaatcctagaaccatggctttctctcagtttcctctttttaatccccccagtgctattgctatttccagtgtctgaagctcctccttcctcttttggcattttggaggagactcggggctttggctttatatctgctgacgtgatagggacaccactactcgaggtaggacgtccatttccatattcagattcatcaggaaacagaaaactttcgatcttcatttttttggccagcatagaactctctagatctgtttttcttttgttattcgccttcaagctcttcgactcatcagagaggtgatccactgcttttcctttctctttctgtttatgtatttgcctctcatcctcggccaagtcgccaagtccctgcgaattttgaataccatttcttgacgatgtttggatggtcttgttagtttctgcagttcgagcaccttctttatccattccattgtctatctttttgaaaccctttttcttcttctttgtgttgtcatctccctgggtaaactgaggcttagggccactgggattactctgcatcgaagcctggttctcagggacagggatctgatacattgcatacagtgctttcgttgtttcatcttcaggaacattgcaatagttcactccaggcctaaaacgcacattatcacaaataaaatcaatttctctttagttcctcatcccgaaaaaagtaggaccaataacacagagaaacaaacacacgttatgccaaccacctcatatagcacaccaacaaaataacaggaccaataatagagaagttgaaaagactcacagccaattaagcattgtgcacatccatttctcaggaaggtcttctgggaagacgccaaaaggaagaagccgccactttccacatttgtcacaagcaacccaatgttcttgtatgatcacgggatttgctttcggaagagaagcatcagaaccaagttttctcaacatgggttcaggaccaacgttctgaggttctactagcggcaagctcgatttttcaggcatatcttctaagggcggaagtcccttttctgaaatccgcaaatcttttacgtcttgttcctcttcttcttcagagtcccctatgtctccaaaaaagtctttgtaagtgtcctcggcttttttgctatcactttgtggtttcacggctaccacttccttcttctcagcttgaccattcagcttagtctcaaaaacaacagaggtttgctgttccttgaactttgatgaagacggtggctcctgttctatctggtcatacttctgctttctaagaggatgttctagctccactttatgaccacttttcgcctttgatgcactcgattcctttttgactgaatcagaagctttgctgcctttgtatttgccaactttccttgggtatcctgaagcctcattatcaccaagtttagcctttttatcttcacgaacacttccagcagaaatagtctttggattctcatgatgcgccccaagatctttatgacgagttagaccccacaaccttctgtcgacatcacccaccatttcgcccctaacagtgccattgtagttttccttggatgcatcaaataatttactactggctgtttctttctccgcaaatgtaggatataatgtgtttgtttccattgactccttggtaatggcatcagttgaatcaaacaggcccttcttactgcggacatttgtctcagcagaaaagctgctcctctccaccatcttttttttcttctctactgatggtttctctccagacttctgaggttccaaaccgtatgccatagcagaagaactcgcagtgaaaagcctggatggagatgtatacttatatcccttttcggatttttccctttcaatgaatcgaatcagatcctcagagagaggagataggaactgacaatgatccacaggaagtgaagtcattacctgcatataagaatatatcaactcgataagcatcttaaaacaaaggaaactgtttcagtattgtgaaacaaaacaaaggaaaatctcacattaagaatactggtgggagactccgttggagaataaccctgaggctcctcattcatcccttcactacctgaaagactattgttatctaaggacaaagaaggtgacacatcaagtccaaggccactgtatattgcagcagcattcttttcggtagataaaccatctggtaccatctttatccgaagcttcagagaattctgcttactgaagacacaaggtttcttagttgcagattccattctggcactggaactaggtttcttagatttcactgattttttggggtttccagaggaagcaagaccagattttgcctttttaggaacactagacgaagctgcattgccactctgggactgaaagaagaaaaaaggtaagagattaaacattacagcattgacaaagagaaaagtgtagacaatgagaaaaatatacctcccctagtaagttgtttggagatctagtccctgtagaactctgaggttttgctggtgtcttcgggtgagaccaaacaggagaacgttgataagttggcaagaaagagccatagccaccatatttcgcccctgtaatcaaattcaaaggactagtttcacactttgtggaccaaccaagaagaagagtttctgccacaacatcaacataccaagattctcagctgaaacaccgccctcaaagtctttctggaagtgtccaaggatgtgttgaagcttctcatccttcaaaataaacaagagaaaaatacagtcgataaacgaaacatagattacttctctgaaaacaacttctaggctcttaggtgaaaatgatttaacgaaacttgtttttcgatactacagaggcgaatccaaaaagccttttaaaatgtttacaaacacttttttcagtaaaactgttaccgataagatgaaacttgtccatacaatctctgtaaaaaaaccatcgaatcgaaactaaacacgcggcaatcggagaataaagagttccaaatggaaggtcgataagccttcaaataggataacaacttgaccaatctacgatgcgcaattaacatggtgttcggttgcacttaaatcataatgaaattacctaacaaaatcatctataacatttaaacacataccatataaactgcatacacatatacctaaaggtccaaaagtaaatatctatatatccctaccaaactgatgcaatctaatatcaaagagactgaagtaagacaacacagcaacatcaacacttgcacaattcaaaatccaattctcaaaaaagatagaaaactcgtagagcagctgagaaggaggtgctcacaatgtaagagagatcgttatcagggtctatgcttccagcgtattcgttagtaatattgtaagagcaagcctctccttcttcaagttcagactcctccataactatatattcgatcttaacctcaaaaccctagacttaaccctaggccctttctaacattgcaatcaacagaccctcaaaatcaatcaaggtacacaaatcctcctaaaaatcaaccccagcgatcaacggaacagtgaaacccaaccccaaatcgtttgatgtattagccctagcttgatcaaattagaaatcggatcagcgaatacaacagacaaagtaagaaacacagaaagtggaaaattgcaattgagtatcgacgaattcaattgaaggaaacaatccgatcgaatgaaagcagaattgagttttcccgatttcctccgccgaatgatcaaaaaatgtgtttcgatctctttcgatgggtaaatcaattaagtacaagccaccacccccaaagccaaaggcccaaaccaattaagaaatcgtacaatctcccgggttttggtatagggcagccgcggtttgtttgttttttaatttactttatccattttttcttctctacgtgtaagaaaaatgagggacaataataataaatgattttttcacctttaattttacttttatgaccgcgagataaatcgctataccttgcgtctcggtttcactagctttgcggtggtctgaactatacaaggtgcgtgatagagttatgatggcgcgtgttttaaactcagttttttctgttatttttttttatattttttctgttaatattttcatatacttgtcattcactacattagtagtaattaaaattttgtgagatgaaagactgctaccaatgtaacgaaattttataaagtaaatgtaaatgtacccacattctcattgatttcgacatcttaattccatttactatgcatttatgtgatataattacaagatattcaatattcatgtcaatctatatttattacggtatattatatttttttgattaaaaaaatgcaacaattttagttacatatcaaaaacacaaagaaattggttatatagcaactaattttgttaataccaactcaaaattaaaaaaaattagttgataatattatcataattataaagtatgtgtcgttaatatggcattatgagaaaatatattttcattttaaatagtagagagtgtctcagagagtaaaatggaacctaattcgtctttccatagttgccattatttttatttgtagacttagagcatcattatccatgggttctaagaaaaatttagataatttcttaaaatattagataaaataaaatatgaataaaaaataaaaaaaaaaggtttttagaagagtaaaattagttcttaaataagagatttttgatacactctgtcttccacttaaaaattccctaatatttaattattatattctacatcaaaaatgttaagaattttgtctaagaactcatcaataaggatgatcttaaagcatcattattggcagtagtcttaggatagttcttatgaatatatataattaattttaaaaattttgatgttaagagtttggttaaaagattaaaattttggtaataagcaatggtgggttcttaagaaaaaaaaaaatatatgcaatttccacattttctagcatgtgaatctctgcaagaatagttcgtttatgagagagcctaaaatcaacactcacaagtgtcttttgtatccaaatctggacagacaaaccaaaaaaaaaatgacatgcaaattgagatatatttaaacaaaataatttaagatgaaaaattaacaagaagatcatctcttaacagagaaaaataacgtataattaaaatgcgaattgacataaaatgaaacaaaatatctatggggaattgacaaaaatagcaccaaaaaaaaatatctttcaaaattagcacaacatttctaatttcacaaatagcactataaacttcaattaaacttaattaaaatataagatagaaaataaaaatgagagcaaatactaatctaatattaaattgaatcatttttttttaaatagtgaaaatatataaaaatattactacctaccttctttagaacaaagaggatctctaacaggaactttgactccataattgcccatggttaactgagagagagagtgaactggagaagaaaaatttagggttagcatcagggatgagagactctcattaattcagggttgccatatgttctcttatttattgttgttgtgaattatttactacattgtcatctgttttttgattgatgctgtgaaaatcataatgtttctcatgtcaaaaattctgctactaatgacaccaaagcttattatcttttgtgcctcttcaagactcttatgaaattctcagaactagttgttgcatacggttaaacaaagggcttgttctttgtacctctgcagttttcagattatggtcagattaggcttcagacttgcaggatgtttgcttagtgccaaactttgaattc

SEQ ID NO: 1381 - DNA, 83122 bp, Arabidopsis thaliana
aagcttattatcttttgtgcctcttcaagactcttatgaaattctcagaactagttgttgcatacggttaaacaaagggcttgttctttgtacctctgcagttttcagattatggtcagattaggcttcagacttgcaggatgtttgcttagtgccaaactttgaattccataaaaactgcagagaggattcgtctctgttttctttaagtttgactccatttcctttaacatttttttgcataacatctttatttaatttacaacattttgaaatagttgtcaaatgttttccgcaaaagtaataactctcaaaaatcttgttttttaaaaaggtttgaatatataaatatgaattggttgataaatatgtttttccagtatttcagtgtggctaactcggtttggccttggtcccatcaggtatgcccatcaatatttgctaaattgcattatcatatgcttagctatatatgaatgaataaaagtcttataattatgatgtgtgtacaactacaaagttttccttggagtatagtttgaggatttatccagaagtagcagaagaagcagctacagactcggagagttcttccatgagttccttttgctccaaagcagcacaagcctgcaataagaataatgcaaacattcttcaagattcacattaactaatacaaacgtaagaaaaagtttaaggtttagtgtttaggacctgcactgcgtcctctaaagcaccgtcaagaaatgttgtaagcgcaaagttcatctttagcctatgatcagtcactctactgtcctgtaattttcagacatcataagcaaaacagaatccatcaagttttcaaagcaaggctctggatccgtgtattaccttataattgtatgttcttatcttttctgaacgagctccagtcccaacctgtttccgcaagaatcgacatagagcagaataagatgaatatttgatgatgaccttgagtttagaaagactatggggataataaaatgaagtggacctgagatttcctttcattccttatcttctcttgttgttcccttacttttatttcatacctatatatagacatataatgtttcaacaaaaaaagactaaggtgggacttgatagaggagaagaagagtagagagtttgctccttgaatgttgcttacagttttgctcgcagaagctggaaagcacgcgccttattcctaatctgggtcctttcttctgtacagaaaatgcgaatacctgacggtttgtggaatagatctatagccgtctccaccttgttcacattttggcctgcaccaagacctcttttcagtattattagcaagtgaaatgtgagagaaacagaaagcgaatttctttagcataacctccagcgccgccagatcttgcagatgtaagttcaatgtcctttgggtcaatcaccacttccacttcatcagcctaaaatgacaaaaaaaacaaagcagagatgacagttttggactggttaccaattatcaatcagaatatcgaaaaatggaacatgcgaaagctagtttacctctggcatgatggctacagttgctgtagaagtgtgtacacgaccctgtgtttctgtttgaggaacacgctggactcgatgaacaccagattcatacttgagcttgctatagacacgatttcctttaatctccatcacacacgtcttgtaacctccatgttcagccttataaaagtaggaagattaaaaagctatactggtgagaacatgtctctaagttgttatgctctactgccattttcattacacactccttaaatgccaaaacaaaacacagagagcatctcacctctgagcatgaaaccattgaaaacttccaagagctgcgctcgctgtacctctgatacatccgcacctgcaagcaaaagaataatgcaaagcatactgattcatggtaggatctgaagtttttaattattgcacttgcttctcttagccatgaaatataggaacaataaaatttgaaagttttttaagaaataagactgaaacaaaacggtgaactatcggaaggcattaaaatcagatagaggatcagaagaaatcaaggaaagcatgtacctacaaggtcaccagtccaaattgcagcttcatcgccaccagttcctgctctaactgcggaaggaactaagatttcagactcgtccagaggtagataggtaaaacaatggcgggaagtccgagcaaaaggcagtttttcaagaaaaaaggccagtgtagacaaatgatactacttgtcgacatatagtttagtcagttaccttcaagcaaaatgtttctggcatcaagaggatcggaaggaagaagtaacacctgacacaagccaacacaatgttacgagttgagtatcagaatcaaatttttaaaatgagcaacattcgattttcagctgccgaataagtcagctatggaaccaaggctctaaaccttaagttgtttttcaagctcctcaatttctttagtgagcgagttgatttcacttcctatcatttcagccatatcttcatcatctccagcctctttcgccaaaactgaagcaataaaccaatcagtaaatcataaccagcttccgaggaacagaatcaaagcaaagtaaaagaaaggaggagacttgaagggacctttgctttctagtaactgcttctcacagtccttgaatcttctgaagactgttacaacctaaaattgaattcaatgttaagaaaccccgaaaaaagctgcaaattttgaacactaaaagaatgtgcaaatacctcgtcaagctccgacatggattgtgccagtttttggtattcagattgattcgaaacaacatctgggtcagctagtttcacctacaaatcattcaaaactcttaagaatgagattaagaaacaaaccttaaccattaatggaataagtgtaggaacaaaccgataactccttccatgtcttctcaacagactccattttcctaatgaggtaaggttcctaaatgtttcaacagacaaaatcatcgaacaattctgaaacttttgaaaaaaaaatccaacattgggagaactagaatcacttacggccatacaaacgagtcgtcgagtcctgcgagaccgagaaggcggccacgagactagacaaactccagacggtgactttctcgaacgtaaagtgaatggtgacgagtgaagatgaaggaaggctcgagccgttggactcgtcgtcatcgagctattcattgtctagactctagagagagaggtggaagaagacgagtggcgcgggagttgctggataaggaagcctagtttagatgatgagacgtgtttggctattaggacaaaactatcctcgccaattatagaagaaacccttttatttattgggcctttagcccatactaatttacattctcggttacacggtgtaacttacacctgctagtaactctatgggcctatggcccaatatatgtgaagtcaaaactgattcgtcgcgaagttgagtttttgttaaataataaatcaattgaatcgcggtactcaatttcttctcttcctccggcgacgatgtcgatttacaggatcgctagagctttacccttctccgggatcttaaggtttctccattgttttcttctcttcattgtattactgcgttactattgaagaattgactgataaaaagaattcaatttgtatccaatctagagctttttaggttggttaatgcttgcatcgtatttctccgtatgacaagagattacacaataaaagatttgttttttgtgtgtgtgtttatgttgaaattctaaggtttcattttgtacaggcagcttgagaaagaagctgaaactgtgatcaatgttctgcaacctggacctttgggaatcatagagcacaagttctcggctcaagagattcgggaagcaaaagctacagtttctagagctgttgatagttggcgaagacattctgaggtcgagcatgcaaatggccttttaaaagattacatttacaagtgaagaagttagtgaaaatctctacttttgtttgtttcttcttttctcatggctgatgataaataaaaggcctttcattttgttgaacaatctttaggtatcaatggaaaagcaaatctttctcttttattgcttattagtcttcttagcttatattggttgatttaacaagtatggtaactgagaatacaaagttcttgatcttaattagctctagagttgtgtaaactatagtgttgcacttgttgaaaacatatccgtgcatggtagatactcgaaaccccgaaaattaaagaagaagcaaaacaacgatatgtatcattctcatcttattctatcctagtttgcatttgactctcttgtcttctgttacacccatatggctccggctcttcttagcattgcggctagctggttcttgacctgaagagtcattacttggttagcaccaccgatgaattgttgccctatgaacacagctggtacactgggtttacaccccatctgtaccaatgccttctcgatctcctgaccgtttgagaattggtctagctcgtagaccgtcatctttgccccaaaccctgagatcagtgtttgaattgagtggctcatgcagcaagagcttttgctgaatatcaccactggtttgtcttcaactaaacttctaacgctttccatttctatgtatataaatgtgatacaaatgtagtgtgactatgtgagtgggaactcaaggatctttatgtttgtttttgctttgatgctatacaaattacaaagtaggcctatttatagagttggatacgtggaggatggtaacgttgcataaatcagatctttgtcactactttacttccatactagtgatgtgccctttggcgttctctaaaaactgcatgaacatcagaaccaagttgcatatacagttcatgtaaacttttcttttctaattacggaaatatccttgtcatatggtttgtaatgatccacggatccagggaggtatgcaacagtgtgatcatgtctactctatggtgcttttctttttttggcaaaatcttttgcttttgatgcatccactgaggtggagattggattatggtttatccagttagatgcttatcttttcaagcaacaatagattccccacaagtttcaggctctaaagaaacggaaagcaagaaaaacaaacaaaaagaggatcgtctttgagatacttttctgcttgtgtgacctggagtctagagagcaagtaagtgatccaacacagttcttactttagcttttacactttgtcaaaaccattttcaagtttttttatctaaatgtgagagttgttggtcttgactcttaagagtctttgtagttgttgttgcattgaacacgagaaagagaatccatgttcattgcattttcaactttccaaaaatacaaaattttagcagatttaaacaggaaagcatgattctgacaccagatttggaaatctacagaaatgaagaatctttggcagattcgtgataaggccatgtgtcaattgaattagcaaaatttatgggtgataataagcatagattcgtcatcattttcttcttttggtgctaaaatctcaagattcgggaggaacaacttgtgtttgttatattccctttcagatctctagaactgtctctgccaaattggctcgcgaaattgttcaaaggtcatatgtttcttcgtgtcatgttctccgtacaaattgctgctacattcttgttctgtaatgaaaaacctggaactgtgtagcaatagattatgcttcgccttgtaaccaaatgaaaaattgaagttacacattggttctctcaaatccaacaaacattaaagaagaaagaatttcagtaaacttttgatacaaaagcacttttcttaaagctttagataaagtccatcatccatcatccggtgatgttgttgacgagcaccactgagttataatgctccccgagcccaaaagcatgcctgtgatacgataacatgaggctcgagtcatcgccggatctatactctttgcccatctcaacatccggaaacgatcccgaatacacctttatgtgtttcctcaagcaatgtgttaatgctccaagctccaattgactgccccaagcagcggttgactcgacttctctgcagtatttctcaaaccgctcttctgcagatccactgttggagtcaccctcagtctctgacaagaaaaacgggagaaagtcggttttgtgctctctcatgtacgaagcagccatttctcttagattctggtatgtgtaaggagatgcaccgcccgagcggttggcaagctgattctcaacagcacggtaaaggcaatgtccgtctggtttaatctcactgactgttaatcccaatggtttaagcttcttctcaagcttggcgttctcaaccatacgatcacttttcacgtggctttgctcctctttaattctctgctctctgtctgcttcttccttagcccgtttctcgcgcctcttcacgctcttgctaggctttgagtgctcttgctgagcagtgactgagactccagctatagctctaactagagtgtcgatgtctccttttttctcagtcgtttcgtccttggcaatgttgttgctgctgctgctgctgaaaccttgagaggcgagttctttcaactgtttgtccttgagcttagtggagagtttggaaatgtcatcttcgacttgcttcttcttagctttttgttcagctttgctacctttggcagctgccttcttcatctctgtctctttgttttgaagttgtttaatctcttgcctacaataaacaacaacaacatcaacacttgtagtaaaaaaaaaaaaacacgaaatatatgatttagagtaaagaggtattgccaatttatccaattaagtattcaattccaacattaagaaagcttaatgatgctattacctgtggcgagcaagcatctcctcaactgtttcatgttgttgctcctgagaagcatccatgggagtttcttcggatacaataccttcagatgttttattgtctgccattaaatgaagctaaagaaatgtgtcaagacaagagaataccacaaacacaattatctaacacgtaatttggtttagacttcagacacattcaagtttaagttgggctttaagacagcaacacttgacataaatacaaaggacataacaactctagaaacaagaccaaacccccaattttccaatccagtattccaccaaattcactgatacgtatcactaaaagaaacccacaaccaaaaaaaattgagaaagcagatgacatacgattttctttcttcgttctaaaatctataagagaaatctacagcgccacaactcaagttgaatttacggattcgattatcaaataatgaagaaaaaaaacgcgagagaaaagttccgagttcatgatacctttgatccaacggagaagaatcgatgattagtgatttagggtttacgcttcactcgacaaaaccaataataaaattgaaaagaaggaaatgggctaatgtcatgaaagaatggaagtaaattggaattattgggccaaaaggccttatcaaagcgaatcttttgggctttcaaaataatccatcggaccctctatgtcagttagagggtttgtatattatcgcaatcatcgttattcgttactgtgatttaacttgtcgaagaatcagtgaggaacctaaatcttgggcaagtagagacgatatattattctgtcaacgctttggtcattaaaaagtaaaaaagaatctaatcgataaaatgaatctatggacggtcgatattgtgacctacaaaaataaatatcagaaacttatgtatgataatatgtaaaagtacataggtctatgcttacatgaggaggtaccgccacgtggtttcgacaatggcttaagaacttatctagcctatataggtgaagatatttctaagaatataaatcaagtaaacgaacaataaaatacgaaaataatattcatatgttttgtctaaacatcgatttgtggagtggggtcagatatggataaacttcttatctcagattttttttttccatgtcaaagatgacgcaacagtcactagccaccaccaccaaatctctgctctcttttttttttctctttgcatacacttaacttttgacattgaaaaactattttttgatttttagtttattttaagtgtaacaactatatatgaaacattaatgcatagaccttttattaattgtttagttattaatcattaatcatacacatttgatcatataacgaaattcatgcatctgtagattttttgtcgtccagatttgccaacatatacgagatgattttgtctagaaatggcttttatccttttcaggtaattagactttataatatagatacaataatgtcaactacattatgtccgaaatatatttattaacagcaaaacgcatcaacgatcccctttttgtttatgccacattacagcaaattattaaccttccacgtttccactatagaaaaaatggaaaattttataaatttataaaaattaatgttttgggtacgtgatgcagatgccagccacggaccgaaagtgatgtaactcatctctctattcgtttttgatataatatatgttgtaataatattacacttaatcccatctatagtatacatatatataactgaaatctaagtataaactatatataaaaaaaacaattaccaaaaataaataaataagagcaagtgtctccatcacacgaaatcatcaggctataagcatttttttcttatccaaatttatatcacaaagaacttagcttctttctaggaaattttgttcgtggggtacttcaatatataacaatataaatttagtgtggggtatatcatttatatatttatccataatatatttgtagaaagaaaaggctaaaataaaataatccaaaatctttcacaataaccattataaataacagcttatccaagcatatgttcaatacaacctaagccttgctcattacaaaaaaaacaacacttattgatcactaactttcttgaccatcgcaaatggagagaataagagatttgtcgtcgaagaaagcggcggtgatattcacaaagagctcatgttgtatgtgccatagcatcaagacgctattctacgaactaggcgctagtccggcgatccatgagctcgacaaagaccctgaaggccgtgaaatggaacgggccctacgtgccctcggctcatcgaacccggcggttccagctgttttcgttggaggaaggtacatcggatcagccaaagacatcatctcattccacgtggacgggtcactcaagcagatgcttaaagacgctaaggccatttggttatagcgtccgatcatcgtacatgtatgtgtatatatctatatatatatatatatatgtatgcacatgtaattgtgtcaataatcgatgtgctaagagcgcatagatgataaatataatcgggagggagcatagatgtattaaaatgctttgctttcttcggatggatcgtagttattggataataatttatatacatgtatagatgtatatatgtatgttgacttacgtacattgtacggatgaaaagacaagtgtacctttaagcactgttgtataacattactgttcgaattccacgtaaagagtaaactcaaatcttaaaatcgtcattcgctagaatacaatactgatcatgaattgagtttagtgtgtgtttttcttttccgtttgactagtaatgtattcattcctcttaacttttatgttctcttacaaagacatatatcatttggagcagcttaaacttagaggagaatatttttttttaataaaaaaaaacttagaggagattagtaatattatactaacgaatgaatatagagttaaaagcaaagtatggggatgatgatttaacagatcgacgacgtgacaagacaaatgatgtttatcaagaacgaatgatacacgtacgtgagtactataggttcccttatcttcggtgaatcgaaaaaagggagaatcttatacacttcaaaagcttccacccagaagtcatcggaacatggaacaacgctaacttaaacatgtggtcagcgtgaaaattcacgttgcattccagaataaattttatcgggtgagtgagatcaatttcaaaaatgtttatcatatttaaccatcatttagtaacgtaaaaatcgcccataaatatgtttcaacctctaaaatcattatgatggtgagtgcatatattatattacaaatacaaaacaaaattttgcatttagtttagtgtttgcgatacctagaatatggtcaagtaaacacattttgcagatatgaaattttctggatatgattcatactagcgatcggcctaccattctacacgtatgtagataagctccggtagagagaaggcaagaacagaatcaaacatgagtgtaagtgtgagatagacaacgaatatttgtctttaagcaagttggtggtagggggcaccgggcaaacaattaataagggaatactcacttcatattacatatagttgataaatatatgatcgccgaaagctcgaatccatatttattcattcttctttttagcctagggattcaataagtgagctataaggaaaatcgggctttgataatttgactagcccataccataacccatattgctaatttggctttaaaatcatgtctactatttgttggtatatctagctaatcaaagcagatttaaaaagagtctgactgatgttgttagtttaaagtgaaagtactcttaacattgtattagttttgtagtgcgtaccaattatatatccagcgaataaaatgaaaatcattcatatatctcgtgtctgccatttgacgttcatgtcgacgtaagcttgtatttagtgtaagggacacaaacatgcattcgccatatgcttttcgttgcttccttcaaaatcctctaatcgacaacatcaaaacaaacttacctaacttcttttctgcgtgcaaattcattatatacacagcttatgtgcaaactgcaaagtattcatgaaaacacacgcgtagcttcactcgcttgtcatgagattctgaaactgttcatttatctgagtgacacagagattcgaagtcgttgcaatgtataatctctcgaatcatatgcttgatttactgttatcgtaccattcttcgattttatagctgcaaaaaaaaattgattactttattacaacttgttcagccaaaacagaacattaacaaatggtctttttctcgcaaagccgctttaattcttcggagggaatctgaatatttctttaattacttcctgttcaaagaaaaacgaccagtccaaagactttcgtactgcttgccttcctataaatagccgaagcagatcatcgagtcttctaacgaacaaagaaacatacatcaaagctacatatactaaaagatatataatttctcgattgtcctgagccctcagaccaaaatctgaccatggacaaggttatgagaatgtcatcggagaaaggagtcgtgatcttcaccaaaagttcatgttgtctctgctacgccgtgcaaatccttttccgtgatcttagggttcaaccaacaatccacgagatcgacaacgatcctgactgccgtgagatcgagaaggccttagttcgtcttggctgcgccaacgcggttcctgctgtctttgtaagtggcaagctcgtgggttcgaccaacgatgtcatgtcgcttcacctaagtggctccctcgttcccttgatcaagccgtatcagtcatttcataactagaaaaacaatatcgatgcttaagaaagataattagtatatactattaattggacagtgagaataatgatggaattagataacacgtaaatgtgtatcaggttcttatttatagctagtgcttatatcttgtttagcttatgtctaagaaattgatgagctagctttgtatttccagcttaactaatcggtggatgtactgatgtgtactatctatttaatggaaaaattattgagcatatatgttatactgtctttcgttttaattagtttttgcctatataatactaatcgactattatcacatttctggatgagtttaataacattgatttgaaggtcgtttataatgatatcaaaatttaacaaatgaaaaaacaaagaaagtatataagaattactaacaataaatcaaaatttccatgtatttgagaagcatgtattggctcgaagatatttgtttaaaaagtttgtgaatacaatgtaaatacccaaataaagacaaaagaacgtctagaactaaagactgcaattccttttcttgatttagaatatgtattgtacttagtttagctggcgaaatgtgtctagtgagtattaagagatttagatattggtcacaagagagaccatgaatatttccaacccctagctcacaagtcacaaattaaaaatcttgagcggtccagtatcaaaaccctagaaatgtttattttttcatctacctcaacctcaaattaccacacaatatatgattgaatctgactacattatattcaattattcatttattctccatggtcactttatatcatgataatgaagcacacagttctctttcatctttctttttttaatctcttcgattttcataactactagtaagatagactttgaaaattgaattgctcttgcacaaaaataccagtaatttaaatcagagctcgacacaaatatatgaataacccagattaggtatatcaaccctatcgatcgagatgaacaaaaaaaagtaatgcataagtcttattttactttaaagtgagagatgattggtggcaaagaaaaggaaagggaaaaggaggaatttgcaagatgtgtggaatagcagctttacttaacttccgagttgtttgggatctttgggagaatccaattgtaattggtatgtaaggaaagtctttttataggacgtgtaacaactaccttcattcacttcctgtctctgtcggatccaaatattctctgactagcgcgtcgtaaaagcatacccaattctctcttcatctctcagatctcctaaacgtcccatttttacaaataatcgactgtctaattaaccttgtacaccacaattttaaagttgttcatgcaaaaacgtaacaacaaagtgagtattggataaaaaagaatccaatcagaacattattaactgccggctaaggaagggcatggtaaaaacgttaaaatccaataagaaatgtacacgtgtagtaatcagtttaggccgagtctgtaattaggttctcgcttaatagttaataatcgtgatgggaggaagtgctagtctccagtcagactcgatggaagcagcagcagcagcagattcttcgattcccagagacaaagactttggcaaattccaattcgggttcctctctttcccttggattcgatttcatctcttgatttctgggaactatctctctgatttcttcaacgattctgtgtaacagatgcgagcactacaagagacgatgtaaaatcagagctccttgctgcaatctcatcttctcatgccgccattgccacaacgactctgcggttcgttctctcctcctaatcagagctccccttgcttgctctctctctctttgcttgtctaaaacaacattgctgctttcttcttgtttcagaattctcttcctgatcctaaagaacgtcatgatttggtccgccaaaacgtcaaacaggtttgcttaaaacctgtgtttcaatcttaactcttaaggtttgtatttaaggaaattggattctctatgttttcaggttgtttgttcaatttgtcaaactgagcaagaggtacgttgatcatttttagttactctttatctgcaagttatgtttcatatttttgggtaatcatttctgttaaaaacaatttaggttgctaaagtctgctcgaattgtggcgtcaatatgggagaatacttttgcgatatctgcaaattctttgacgacgatgtgagccttttgatcctttcattctatatggttttctttctctatgcgagattatgtttcactttcttcgttcctgaaagtatcacgccgttgttatgtttgcagatttcgaaagaacagtttcattgtgatgactgtggaatttgtaggtgagttgtttctgatatttgactacttgtgctacataacaatcatatttttgtagcttaatcttgtggttttattatttttcagagttggtgggcgtgacaaattctttcattgccagaactgtggtatgtagttttattatgtgcttttatcaacttgcatgtgttggattctgttttgcctctttaaagcatgttctagatacattggtggtgtctaagattgcgagttgtctctatcaaatgtgctttaggaacataagaatctattcgacaagtgacatttgtagtgtaaagtaaaatctttgaatttgttgcacatacagctttgatcctgatggagctgtattgtagctaagtactgtaactagtttaatagttacaaaattcttttttctaactacactgtcttgtgtggatagttattatacaagagtttttgttacgaaattcccctgtaaatattgcaggagcttgctacggaatgggcttgcgcgataaacactcgtgcattgagaactctacaaaaaattcttgtcctgtctgttatgaggtttgttagaatggaatcaattttggttggtcttttcttccatattgttagtgattaaattcatattgttttttggatcaacctggcagtatctatttgattcggtaaaggccgcacatgtgatgaaatgtggtcatacaatgcatatggattgctttgaacaaatgatcaatgaaaaccagtaaattctccattaattttactcgttcgtcacaatatcaaaattggatttcttatgattaatcaccaatgttctctctctcaggtaccgatgcccaatttgtgccaagtcaatggtggatatgtctccttcgtggcacctattagatttcgaggtaagaatcaaatttttgatttggtgaatttattgaggtaaagaccaaccaacattctttgtacagataagcgcaacagagatgcctgttgagtacaagtttgaggtaaatgtctaaaaatccaacgttgtgccacctcttggtttgttttccttgtgctcatggttttacatccgccaagaaaatgtctgcaggtttcaattctctgcaatgactgcaacaaggggagtaaagctatgttccacattttgggacacaagtgcagtgattgcggttcatacaacactcggagaatctcaacgccacaagatccagtgagtgaaacagagtgatcattttctgaagccaactcttcttcattgaattttcccgtcattggtccaaccatagagcgatagggctgtgttctgcttatttatttttgttcttggcctaaaaacacttgaaacggaaaatatcgtactgttatataaatggtattactgtgtttagtcatcatgtaaactgaaaatttgaaaaagcttgtttttcatatgaaaaacaacagttcaattacattgtgtcctatcacacgtttgacgatgatgctattccaagacctttacacagagcaagattctcttgtttctaattatggtgataaagagagtgtagggacctgagacgaaactaggtgctgttccaaaaccgaaaaggctgcaaacagttcattaagcggacaaaggaaatggcaaagacaaagagagagagagatagaaaacatttaaaaggataaaagagtccaaacaaaacaagtagaacagttacatttttgacattgtcttttaaaaaaatctcttatcctcttaagaaaaataccccaccaggatctctcagtgtaagtagccaaataaacatacaacaatcaataattcttacataaataaaacaaagctctcttagatctctctttctctctctccacttattcattgctcatgagcttgatggttatatgaagcagccgagattcaaattattggcgaccgagctctctcatgttcctaaaccggaacacgattatatgggatgatgaacaaggattaatgaaaaatgtacctcgtttctttgtcttataatccgttagtagtaatgatttgcctggaaaacctcattgttgagtcttggtccatgttccagacgaagccaggcatgtcaaatcgaggaccagccactgttcggtatatgaagactctctcaacagggcagctctctggtctcgagtccggtgcaccccgttcatcgatgacttccacattcagctttggcatcttctgtcctagtaacttgcaggctccaaaactcacggaacaagaagacatccaaagggatcgcattgtctccagctttgaagcattggccaaaagcgccttgtctccaaacgggcagtcccttatctctagtttcctcaagctatcgcacccggacaaaacatgatgcatgcctaagtcactgtctcctgcaaatgccactgagagcatttccatcttcttggcatatgtcccaatgtattcaaaaaccttgtcggtcaagaggccagatagagagaggcgacggagatccttgcagtgctctactatggctccaaatccaatatccagtggctctagagtcagatagtctggggcttttggctcaatgatgcacaaacggaagcgagtcatgttgggacggttcctagcaatggttatcaatgcagcattggtcatttgacggcagaagtagagaaccgactcgagttttggacagcccatggagacggagacaagcccctgttccgtcaatgccacatttggttccatgacaaaaggctcggacggaaacactctcagctcgcgtaggtccttgcaggttgaagcaagcacctcaagaccagcatcctcgatgtagtcaagcacctgtagtcaataataagttagagcacagttacaaaaagaaaaaggctttaatgcttataattcagatatattgctctatatcattcaaattttttaagaaaactatgaacataagctttctcataccatacagtaaaatgacctattccaaattcatgtgttaatgtatgttaaaatggactcacccagaggcgctgcagtttagggcattgacaaagaagcttgacaagatcatagctctggactgttgcataactcagattcaaagttgtaagccgactgcaaaccgaataaactgctggaagataggcaggaacagcatcccaaaatccagataagcacctcaattccttgcacccagagagcgctacagataaaccagagtaaacatctggtcgcacttctgcagtgtacccaccagtgcccaattcctccaattgaggtgctctttgaagtaaagtagccaatttttcaagtggaacagctcggttaagcttgagagacttgagattgggacacctagtcaccagcctttccagagcagagaaactgacctcagatgctaagcaagatatattgagtgataccaaagaagtgtatgtatctgggaaatggctaagccagtggccactaacgtcgtcaacatcactctctcgtaagtcaagctctttcagattcctgcataagaaatcacataattagcatcgagtgacccacattatacaacttcgagaacataaacattgcctacaatacatgagcataattgtcattaatttgtccaaagttgtatttgatacaatgtagaaagatcactttgggaaactatctaagcatagaacaataacaaattactaaatttatcacgtggaagcaatgtgagagatgctaaaacagagctaaagcgagtaaagaaggggaatccgaaaacagatctaagtttcccaacaaggtaaaaaaagaaaattgaaagtcccctacaaaaagaaaagtaacacacacaaagccaaattgattagatttcccacctcaggagattcactgagagcgaataatccaggaataaatagatacaccaccgttaaataagacccaccagaaagaaaaagagagtggctataataagaatcttcagaaacgtgattaaaacatatatcttttagatacgcaaaatcttgaccaaaccaaaaaaaagctcacaaagaccagagtaacatcagcaggaacaacgcagcaaaacctatatgcccagatcaaataacaagtacatgaatttgctataattgagactttatgtagtataatgaatatacaaatcacacaccaataagtttaatacaaacaaaagcttcttcctagagacacaagggagtcttcttgatgaaacaaaaaacattcagaaaaagaatacctgcaagtggcagcgatagcagcgagaccatcggtggagaagccttcgcaggaagaaagcacaagaaccttaaaattcttaaaagacttggctatgagctccaagcaatcgtcggtgaccaccatcctcttcagccttatctcttcaagccacgtgtaagacgaagacatggcctcaatccatggatacacgtaacctccccatccgtcaggtaccaaattaaagtcagcaaagtgaggttttcctttaagctccacggatctcactttcgggaacctcctaatcaccgtcgctggactcacggcgtagcagttcccgatgaagactttcctcctgcaccaccgctcgatctcgtaccatgacttgcacaccagagagactgagttcctatccttatccagctgaataaacgagaacacatgctctagtacctcttctggaaacgacaaggctattcgcttctgcattgcggccaaataacctcgagatctcgatgatcgaaccagaggaagaagttggacagcgttcgaagaagagttgaacaagtatatatatataactcccaaggttagatctgaggcgccattaacggagataatctagtttcaaaggagaagctgaaacaaagatgaagaagatagatagagagagagagagagtgggaagagaagagaaaaggatagggggaaggagaaggaggtcaagttaaaaaagccaaccatggttgggttaaaagttaaccgtggtcaaacatatccatgtgagccttttcggtgattgtgattgtcgattctgatgatgacacgtgtcttataagcttcaaataccagccgtccgattgaatgaaagcgggagattatcttatcgactgtgcagagaagggcagccgcagaaaacgggacgagatattggagagggggggtcggcttatcgcggcttctatcaaaatagcgcgagaaggagatcaatgatagggtgtggtaaggtgtaggagaagagggaatctaatgatacgcgatgcacggctggatatgaggggaagccccgtaaattgcggggaccacaacagaatgttaaaaaaaatactagactactaatgatctgacggtaacaaaacaataaaaaaagaagctattactgttatttatgatgacatcacaaccgtccaatcatgttttgatgtggaatctgagcatctatctcctcctattattagttttgcatgttcatttatttacccaccacttggattcataaataaaccatcaagactaatcacagtttcattttctattttctagtaatatatagtattgataaatttgattaactaaagtgtatcctttctcatagcattaaagtgaagtaaatagagttgaatgatgaattaacataacaagaatcagtgttttcgtgtgagattggattaaaacattatttgtatgtttttgaagattgctgaataatttaaattaaaattgaaaggattgcacaaaaaagagtaaatgtgagggaagtatccaataatttaaagtgaacaacttttatgagtagagaaagaaaaaaagagagagaaagaatggatactgaaaaatttgaataaagtagagaagaaagaaagaaagaaagtgcagcgtcgcattttaatcacgaccgtcagatctgggacccctttttaacagtgtacggacatacatacatacacaatcgtgacttttaaaattaataattacttcttaattaatttacctcgtctgggtgtaataaacgtataaaaactacaattatttcgggctctgtcgcaagtacaacggcttagaggaaaataaatgggtattgaattgacgagaatgcccttcttctcgaaacagtgtatgatgggctttgcagagtctgagcatggagttgataggtctgtcctgccctaactaaaaaaacttgtcacattatcaaactgttctatatcatcttcgtattacataccatcctgaccgtttatccacttaaactactatttaaaatatcgcacctttctagttttctttttgaatgtactgttgattagttcttaaaccaaaaataaaatctaaaaattataatgacatacatacaaatacgaagattttaaaaaaaaaaaatgtagcaagcaagtgctcagaaattgaggtagtaacgaagaaagagataattaggaaaaaacaaagagagggctgagtatagtcagatgggagaagtgtggagctgagttgtcttgcacgtaatacgcttaagtttttttaaaattataagttttaatgtcgtcagaaaaagggattaacttacactgatataataagaggtcattgattatgaattttttaaggaaatgattagaataataatcccacgcatggctcccccgcgaatctctcttatttctttctcctagtctcgggtttcgtactcaaaactagcttgctctttgctgtctattatcccttaattatctccctaattatttttttaattatctcttcagcgatattagatccaactctgaatgaattataaattgtgtacctaaaagccgagaatattacagactgcattatactactactgtttatgtgagatagaaatatgtgtacgcatgtgtggacggacatatataaaagaataacatagtactatagtatttacataatactactgtttatatataagatagatgatgagtgatatatataatgcgattgatgaagaggtggtgtacaagtacaagtaaagtggcacgtgatttataaagctaatttggattatgtcttgattataatgaccttccccattagtggaagccatccttttttccatttttattcatattgttctcttctctatatcgttatatgatttgtcaaattctgaccaattatatttcttatatcttcgctttcttatttcgtgtccctcccaatcacgattttactagtaacttttttccgcatttatttttagccattttcctatgttattttattctccaatcccatattgcaaatatacgtcacgcaactatacctttttcattattagcttttttaattgatattggatggttcatggttacgcatgaaaaccacatcattctaagtaggtaatactttggtcaacgcattattattatgagtataatttatttagttaaaagttagaatgataaatggaaaaactttgaaaaattatcgacaaactgataaaaagaagccgaattaaagagaatgtacggtaattatatgttctcattagttagaaaggcccaatgggccgagctagtgggagccatgaaagtagggtgggggtgagtaggtggggtggacgtcgagtcttctatattgccgttcatgttttgcccaatcacatcttttgtctgctttatcaaataaaattattctatggtctaactctaatagtgtgtgaacgttcgatgggtttgcaatagtagaaatcttggaactaaatagtcaaaacagaacaaatttgcctttggatcattggaattagctaaccctttatatatcatctattacatcttttttttttgccattgcacgataagaagagtagtcaactaagaataattgaacaagagagtcattaaatgaaacttaagttaaaaataaatagtgaatttaaatttccgatatactatcatttgtcttctttttttggttggtccaatgttcagtctctcctctttatccgatggagtaagcgtgttaaaaactcattggtcagttcctttgacggacacttttcgcaatcataacttactttaaacaaaaactaaataagcatgtctaatcatttatattacacgtgtctccacaaagcacaaaatttcttaattatcaccacaccggctctctcagtatctacagtgttctcttctatatttcacgttaagtagtatctacagtgttctcttctatgttaatgtgcgatccaattcacatttcgtacacttttctgaaattttaaagctgattgttattgtctttagaaaattttaattaaaaaacaggttgtgactttaattaaagaacaaaaaaaaacaaaaaaacttccccactttaaatttgaatacaggcgtagtctcataatcggaaattaatatattgtgacgacatgccatgagataaacatgtttttttggatattcaacgaaccagacataattttattaaagattaaaaattgaaagagtattggtttggtgggagtgtaagtttcatgaaattttttggattccactaaatgacatcaacctgtttacaaaattaataaaccatatttacaaatctatcttcttacatgcaaaacgtttacaatgaacagcttgcgtttgccgacgtggtcatattagaattaacttgtaagttatatattataatcatgtaaaatgaaaatttgatatgaattcgcatatcattaggaaaattttaaataaaataaaaattgtgactcaaaccatataaattaggtatttctcacacatacattgttgttccaaaaaaaaaaaaaacttaaaacacacacacgcaaaaaaaataaaaattgattctttattgattgtgatctatgagcaaggtcatctactactataaatgttgatgggctacatggtcacagtcttattttataactttattatcattatgaatcctatcataaaagaaaaaaaaatatttttaatacttaaattatatatttattatcgttttagatttagaaaacattgaaatctattgtattaatacatggggaccatatatatcataatatcaatcaaaatacatgttgaatccattgcaataatatttttttggatattatatcaaaagtaatactaacatctaatagttatgagtgaaatttatttattgtcaattgatttattattaaaaagatccataaattatatatactagctattgaaactctatttgttcaatcaaagtgaaatagtcaaatatgatttactaccggtctaaatataagatctgactcaaaatagtttgataaaataatcatttcttgatgaatttaaaagttaaaaaccaagaaacttgacacatttctttaatcttctaacataatcttatttataaatgatatggtcgatggaaaccatgaaacttgacccctttcttgaaattttcgttaatgtattgattcaataattctcgctttcacatgtactatacgaacgcaacttatattaggtgtttgatacgtgccggtgagccacgtataccggcatatacgtatacagtacatacgtttctatggaataaggatcaatggaagtcgactatttaactggagaacacttgaaatatagcagacttcaaactacccaaaatgagtatagggtggggaaacagataaggaagcagagtatatctgagaacaaacacaacataacaataaaaaattgaagttgcacgatcatgcgtttaccatacatctaaatgccaggggaatagatgaaattaaacacaacataacactaatttgaaccaaaaaaaaacataacataacataaaatttgaagttacacgaaatgcatttaccacgtttgctacagcgtaaatgaagggggaaatataaaaattcaggatcactaatcacgttgatacgacatgaagagtatgaaatacctataaaccatacataatttgattgcatcattgcatggtttggaagattatcaaggagcaaagagagcaacagcatttgccattattgtaaagttttatgggaccagttttatctatgttttttttttcttcatacttttgctgctactgaactatcaatttcgtttggaaaatattatacagtagtagctttaagcatttaattttgaaatatatttgtctgaataattatatagatttgattcaataaatggcgtgatcgaggaatgtggtcctccaagagacacacactatgtaattttctcagcctttcctttttggaccatttaatttttcatgtaaattggaccactcatctcgtatcatccccatctattctagtatcatatcacttcacgtattacctaattagctctcttcgattttgtgtcatctgtctattacaatgatagtttccttcctatgtattataacacgggcctcatgaaagcccgttagggtttgcgtgtaaagcataagcccagtgataaaaaaaaaactttacgaaaagattggactttttcaaaattggtagcttctccaattttctccgcatagccgttaactaccaaatcacaattgtcgggttcgtgtataggctcacaatgtaacgcttgtaatttatgcatgcacgtaaagtatgtttgtattattaaataaatgaatggattggattatgtggtttatgataacctgatgagtggtgctacattattatggcatgagacaagctaacactcatatcttcgacacttggacgtacctaaatgatgtttggtcattcactctttatgcaatcaaataaacaataaaagcaaacccaattttaagaagaatgttggatcattgttttgttaggaatactagttaataaaaacctgaaaatactattcaaattgctaagataactttcaagtatatatgcctatgatcattttaattttaatatatattagattaatttggttatccgaatgggttaacaaaatataagaccatagagcatgaaataacaaaatttaacattaccaatcttattctaatgttttcactttccattattatgatttactatataactagtaactaataaagtaataaaccattactatttatataaaaattcacaccttctagaatgcgaattccacataagttgcatacaatctctctgtctttttggattatattataattaaatataatttctttattaaagctcccaagaaatctgatttagcaacgttatctcttctcatgtatatatacatgtaaaagagagatttatttgcgttttgtgcttgtgtttttttttttatcattttccaggaaacaaaaaaacatcaaataatgaacatgacaaagaacaacgtcgttgaagtgtcaacatttttgttcttcgaagcatctgcagattccgagacgacccatcaggaacgtggacacgatggcgatgatgtgaaaggttgtgacgattgcggtgaagatgctgagtcatgcaggtgcgagatgtcaacgagtcagaggatgagtaggtcaacggattttgacacggttgaagaagtagctgacgtcgccggagaaaatgaaggtcacgttgacgaagatggagaggtgaatagttatcggaagtggccagagaggagagacggcgaaaatctgacagttgattcatcttcgacgggaaatgacgagaggttgatgagtgagattgaaaaaaatcgaatgttttgggaagcttgtttggcttcttaatagtctattttatgttcggaacaaaaatgatattattattttctatgttattctacattaagttataatcgattatgtgtttgaatgtattgattaaaattcctctgttattatatgtatgtaatttctcgacttatagagcatattgatgtttgtggtcatcagatttgaaaagttgttgataagggccatcgttcactgtataatatagtccggtagtacactagtagtactagtttccggctaaaatttaaaagacaagaaaagcaatcgaccatattagtaaaagcccattatagctaagtgggtcaccgtttactctcgcttcactaaacgtcaccgtttgggcaatcatcgtccctttagtttttttttttttgttttggtgtcttctggggcttatcgattcttccttaaactgggaaactactttgttcgaatctcagagctttttcgtttcccatcggaagaagaaactcatatataccttccaaaaaatccatacgtcaagtatttgttctctatcctctctttgttgtcttataaattcttcaagcaggtttcgagatttcctcgaatctgttttgttcttgttcctcaaaaatgctgggtttttgaacgaacgaggatgacgatgctcagagtccgaagcagagatggattggagagagtgagtgtagatggacctcatatcacagtctcccaactcaaaaccctaatccaagatcagcttcagatccctatccacaaccaaaccttatccaccaatagaaaccttctcctcgctaagagcccttctgatttcctagcgttcaccgacatggccgatcctaacctccgaatctcgtctctcaatctagctcacggctctatggtctaccttgcttacgaaggtgagcgtacgattcgtggtggtcctgctgtaacgcctgctggttccttcgggaggaagatgaccgtcgaagatctaatcgctcgacagatgcgcgtcggtcgccaggagaaggctcactgcgattccgtctcgttcgatcgcgattgcgccaatgcgtttcagcatttcgtcaacgagtcgcttgccttcgctgtcaaacgcggtggattcatgtacgggaacgtctctgaggatggtcaggttgaggtgaatttcatctacgagccaccgcagcaagggatggaggataatctgattctgatgagagactctgaggaagagaaacgtgttgatgctattgctttagggttagggatgaggagagttgggtttatattcaaccagactgtgactcaggacaagaaggagtacactttgtctaacgttgaggtgttgcttgcggctcagcttcacgctgagagcgaattgaaggagtgggtcactgctgttgtgaagcttgagatcaatgaggatggtggtgctgatgttcactttgagccgtttcagatgagtgatatgtgcgttaggttgtttaaggaaggatggttcgagactgagattggacctgaggatgatcccaagctctccaagttgaagaaagaggttgttgttggagtcaaggatgttaaagaagtcgataatgatttcttccttgttctcgtcaagatcttggatcatcaggttcgtttttgtacccttttagcttatggaaccattactcttttacaatttaggagggaatcgtttaatagattaggatcagaacattggcgactgattgattgaggaactagtgataggaatcaaaggatgataagttgtgagtttttcggtctctgctattttctgtatgaatgaagagcttgagtagccttagctaggaagaacaagtgttatttacatttgaatcttatgaatatagatgattgttttgatgtataattgtgtatttggttgccagggaccgttgtcgtgtaccttcccgatagagaacaggaacactcaaacaacaatgcgggctttgaaaacgcatatggagcgagcaaggagcctcccattcgtgaagaggatctctgattttcatctgcttctctttgtggctcagtttctagacgtatcatccgacgtccctgcgttggctgaatgcgtccgtctacagtctcatgtccctgagggatatgagttgctcatcgactccatggccaatacttcttaagttttacaagtctgtgtgttcatattctctcctttagatttgtgtacagctgttacttcttcctttaaattatctttgcatatggaagaataaaaagaagaaatatttcagagaagttaaggtcttaaatgatagtttttattggattatcctgttcaagttcaatgaaacatttactagtaccactcgcagataagttgtaagttgtaagttggtgtattaaaaacaaaagtggtggagatgcgggggatcgaaccccgtgcctctcgcatgcaaagcgagcgctctaccatttgagctacatcccctcttgaaatttgttggcgtggaacttaaggaatcttaaaaatacagaattctacaaccttaaaataaaaactaagttaaaaagcaaattggagatgcgggggatcgaaccccgtgcctctcgcatgcaaagcgagcgctctaccatttgagctacatccccatttgttatgatcttgtcgggttcaatagatataactcaggtaataataaaagctggattgttgcagcttctgtcttaaagaaagcccaaagctttcgatgttggacggctgcttttcaggaccaaaaaacgacaaattaagagcggacagcaaacaaaatactttttgtcgtcttctttcacttttgaaaatttatcccaaaaaacattataaaaatgaaaattcaaacacattagtggggaagatttggggttaagagctcgtttaaacacatcaatctgtccatttcaaattttttgaaattatttttgtaagggaactagagataagcatatcttcattgaattatcatgcttacaattctgatagtattgggaaaagtgattaattgtacattggttttctacatcttcatacttttttatatacgattatgtatttgtaaccccatttaattctttattttcagattcaaaacctcaatacgagcggttttcaaaaaatatatattgacttgtcgaatataagtgtttcttccaaagcctgattaaccgagttcggtattatttcgcttcccaaacgatagtggaagaaaacaattaatgtgcgaaagttttattcaaagtaaggagtggaaaatgtgagcacacgcaccaaaaagacaaaatagatgacgacaaaattaggaaagcctcatatagacacgcgaatcatataccttagcgtgttctccttttgatcccctttcttttcttttttggggttgatttgcattagttaaaacaagaaatacaaatattaattcaacaaattaatcaacatcgccacgttacgataagaaaatatcttcttcttttttgttagaaggtttaccataacaatatcttgtcatcatgtaactttagactaactgtgacaatgaaatgttgtttgttacttataagcaaatcagcaattaatggtcaggtcttttaaaatatcctgtgagaaaaaatacaaaacaagagagacgtgtcaaaataaaaagcaagtattcatttcatattaatttgtccgtctatagagttagaggatgttattttatcataaacatactttcattcaaattacgacaaattcatttcgttatatgtttttttccgttaaagataaacgctttattctacttttgtaggtattacatgagaaacacaaaatactatagctttaaagtttttatgtccaatgaactcctacgactgtaaaataaaaaacacaagttgtatggggacaaaacaacggctgatatctactgttttggtcccatcatcgaaagattcatggttctgatttgttaaatccaagagatagaccaaaaggtaacattatacgacctttttgtttcggccagaaggtaacatactaacattataggacctatcttgtaaaattaacatcgttttttttttggtttctcagctcatccatcatcaaagtaggacccgttcctcatttccctaacgttttaaccttgactttttctttttaatttactagtagtagttgattaatatttcggattttaacacccgcaaaaaccctcgttgaaccgtctgttaaaaaactccactaatttaattattataagtttaattttgtcaatattgcggtactatgtgttgaatctactgggggatgtccaaatgcattgaatagtaggggtaatttattatgctagagagataaggaagagagaatagcggaccttcgggtagactcagaagtgttatctttcgacagagcgttactggtgtgtgacagccacgcgcttttgacacaacacgacaaaatgctaaagcccattcccacattctacctaatgggcccgttttgatattagaaaaaataaacaagtcaaaggatttgatttggagcggctgatttacatatttttcctagccatattttcttccaaaagaagatttaaaataacaaaacaattaacttttttgcaaattgaagtatacaaaaaccatacatgtatatatctagagtgaatgttcatttaaagaaaataaatacagtaacaaaaaaaaaacgacacaacaaaagagttaatagaatcgtaaaaagcagttgaaaaatgagtaaatgacagaaaacgatcaaacataagtagtacaaaataggtaaaattaaataatctacagacacattacttatcatatgataagtaaagtcgtacgttcaatgatattatattatgggtttgttcttttcactttatcaaaaaaaaaaaacatattggaatttgttattataattatttagaaaggaaataaaaaaaatactaaaaagaaatgaaaatccaaggttgaaagagagggtccctgactggaaggcatgatgtcatccgctcaaaatagaacacgtttagccagtagtggcaatgactcgtaaatattgcatagagtatgagggtactttcgggataccacatgtggttttaattaagcaaaagaaaacaacacaacccttttgtcgccacatgccatggcgttggtcgcacgctggatagcctttttttttttttcgtttggttaggattgtcacgttccttccttgctctaatttgatttatagtattacaatttgcattcacattagtactatataataaaacaaaccaaaaaccaaaacgaaaaccaaaagaagctctctctgtctttcacccatcctaagtcacaaccatcatttatataaaaaacaagatctaaaactttatgatacaaaaatttgctctttatctttttaaaagttgtccttaccataactttcttttttgttttgtattatatatcattagatgatgaatgatctttttgatagactttctttttttcttttcttttttctattgtatacgtgcttaaaattcgtttcatatcacatggaaccaattgacaaatgaaattagtaaaaaattatgaagaatagcattgaaagaagaatacatcacaaaatgctaaagatttagatggaattattgtatttatatatgattgtagagaacaaaactaaaagaaaaaggagaaaataataattgagaattaaatggaaagtcacaaaatgacaaaattgtataatttgattttaagaaatgacatagccacataatattattagtgccaaataataaaaagtgatccaattaaacgtgagaaaatagaaaagaaaaagggggggaggtggtcaaaaggagcactaatgagagaggagggagcgtgtcagaactggcgtgcccattagccaatcgcaaattgcattcccttctctctctctatatatacacatgacaccgtggccttctccctctcttttttttaataatatttttcttttaaaaatcatatttctttattcgaatatcatttctaaatgtttcttttaaaaaataaaaatttaaacagccgactgaaatcatcaattttaccttatcgacaaaatttatcaaaaataaaataaaatggatatgtagaagagtgggacccacagattgaaacagtgaaaaagaaagaggggccaaattagtcaccaccgtccgattggtctttcttcatttcataataatctctctctctctctctcacctttgactctctctctctctcgtttctctgtacttgtttgccttgctatcttcttttctttctccagctctctctcttttatatcttcttttctgggtttctttcaaatcctcttcttccatctccactgcttcctaattccccggaattcttcacaacccataaagggaagagagagttattcactggtatgagttcgtcgtttcattgagattatacacaaaacaagattataacttttttgctgggttttggagactatggctggtggtaacgaagtcaaccttaacgaatgcaaggtaaactctctctcccttttttttttagattcatttgctcaacttttgtttttctcttaaaattgaagatcatatagattcacccgtacggctcaattttgttttacttccaaaaaaaaaagaagaagaggaaatctaagacgtcccatcatatccctctctaatgttttgctctctctctctctctctctctctctctctgtagagaattgtcccactcaacacatgggtcctcatttccaatttcaagcttgcttacaaagtcctccgtcgccctgacggttctttcaaccgcgacctcgccgagttccttgaccgtaaagttcccgccaactctttccccctcgacggcgttttctccttcgaccacgtcgactcaacaactaaccttctcaccagaatctaccaacctgcgtctctccttcatcagacccgtcacggaaccctcgagctaaccaaacctctcagtactacagagatcgtccctgttctcattttcttccatggaggcagcttcactcattcctccgccaatagtgctatctacgacactttctgccgacgccttgtcaccatttgcggtgttgttgttgtctctgttgattaccggagatcccctgagcatcgctacccttgtgcttacgacgatggatggaacgctctcaactgggtcaagtccagagtctggcttcagagtggtaaagactccaatgtttatgtttatttggctggagatagctctggaggcaacattgctcacaatgtcgctgtcagagctaccaatgaaggagtcaaagtgttggggaacattcttcttcatccaatgtttggtggacaggagaggactcagtctgagaagacccttgatggcaaatactttgtgactatacaagatcgagattggtattggagggcttatctaccggaaggtgaagatagagatcatccagcatgtaatccctttggcccgagaggtcaaagccttaaaggagtcaactttccaaagagtcttgttgttgtcgctggtttagatcttgttcaagattggcaattagcctatgtggatgggcttaagaagactggtcttgaagtcaatcttttgtatttgaaacaagctaccattggcttttacttcttgcctaacaatgatcactttcattgtcttatggaagagttgaataagtttgtgcactccatagaggattctcaaagcaagtcaagtcctgtgcttcttactccttagcaacgacaatgtctggtcatgttgctgatatataccacatgaagagtagaagaagaagactagaggatcggtttgttttgcctatctatgattgggttgtgtacagtttccacaagtggtgtctagtgttcaatagcgtttcttttgtgttccttggtctccggaagcataataagtctgtctttctgtgaggtcttggttgcgcctggcgagagaccacttcggttatcggcatctatcgttttagggctataccggggaatggtactttgtttgcgtactagtatgggtaggctttagttggttctagcttagagtacagagggtaaattacaagacaactaacttgtcttcaacatgttgtgaaaaaaactaatccttggtgaggatttgtatgtttatattaacttttgctttctcatgctattaatagagtatgtctttgtggttgtagtttctcacttccttcttgttttagttcatgcattaaaaagtttttggctaccagaagacaaatcttttataacccttttttttccttgttaagtctcgcaacttcgaactctccaaggaattgctctatcttttctccaattgtgaaagaaacataaaacaaaaaaagaaatatctaaaggtctaagtgaaaaccctagggagacatgtggcaatggcgttggagtgaagtataaagaaagaaagaagaggaaataagtgtgaaagaagagaaaagacaagtgttgtgtgtgcatttgtggcaaaagcttcacaatgccaaaaccaatcccccatccacccaaatgagaaaaaagcttacacaaccaaaattaatatattaaataatgattggacaaaaatgtcaaaatcatctatcatttttctttatattccattattaatagtttttgtttttccttggcatcttttgccttattgcctcttttatgtgcatgtattttatttagtatttttggagtttccttgtagtggttatgaactttgggaggatcaacatggaccccctcttagagaaaacaatctcttttgtctacatatgtttgtttctatatattttctacatttctttataaatagtaatttttttattatatacttattcttgtgatgccaagtggtagggacattaaggtttggagaaaaaaaggaaaagcgttttttttttcttttctctcttttgtttagttggtgctcttctttaaaataatgatagaagatacaaataacattttatatacaggtaacttcttactttgaatataatttttttccccgattaacatttgacttttctagtcctaacatcttgcaaaattttgtagtactttaattttttaaaattttgtcaaagtatttatgaccaaacttttggctcattgatgcgtgcgtgaaaacgactctcgtttgtcttgtaatgaaattgtcttggcaattactcggggaaagtgtctttcttttaatttatttgtgtgaatattgtctaattatttgggcaattatgttccgtgtttggaaaatatattgcatttgtgtaacaaaggatcgctctcatatagttttgtggtctttaattctgacaaaaaaaatcttaaatatgtttggtgatttatcaacatcttctgatttctccataattcattaatttgtcgtttacactaagattctttcttttgtcaatggattggctttgtcgtttgtagactatattcaatgctttagatccaaaattacaaatttattaaatagtcatcatctaactaacatttttgagcttaaaggtttggtttgaggaatctttaatttataatttcaaaagggtatcaatagcttatgggtgttacttttttttctctggttcacattagatgttacaggctgcggtgcgtttggtagtgaattcgactaacatatcctatgtaaggaggtgtcgatcgtgtatgtgggagaggaaacgaaattaaagaagagcagtctttattttttatatataatctccaaattagtggtaatttttttgataaacatttacaaatattagtacatacaaagagagataaatgtatacacagatatgtatatattctaatatatttaaatcaatcaaaccataataactcaacccatatcgaatgatagtttatttttgtttttttgtcggtacatcataaagaaatactagaacataagaaaaataaaatattaccaaattaagaaaataaatccaatccacacttgacaacaaaataacctgatcatagaagagaaaatcaaagaggtaaaggggaaataacgagactataaaatatgggaagaagttaaagagtagagctactccgaatggaaagtgtattagatgtgcagagattcatagaaatggaagaaaaatagaaaaagaaaacgaaagagaagaaaagtaaagaagagacaaaagcattgaacaacgatgcttttgtctttattagcctattaacctaaacccctagagattcagacacgaaccttattcatctcgaatatctcaaaccctaaagaccattaaacatcatcgctctcttatcactttcgcattcatcatcaactcgtcatcatatgtatgttttcattcacatggagttagtccagaataatagactgcatgccgtttaacggtctaaacaaagacaacttgtagtaacgtgttttcttacaaaatgacatagcaaaattagcatgcatggctcaggagttatcacatatcgttaaaacattttgggtttgcttttagcgattgccatttgtcgagtgtctcaaaagattcttgtggcccgtataatgggctttagaatatcgttctataagcccatcaaattaatgaactgagtattatttccgggaaagaaataacgttttatgcaattacgacccaattaactttatagttttttaaaactgatggggaatgacccaattcaatgttttcaccctctcaattgcagccattagttaatactgtagtaatgtttagaaactagtttcaaaattttcgtagaaaaattcatgtaatatttttaaaaatcattcgatgtgctgcatgcgtatttcccaaaaattaaagttaatatgatttaagattttgttcacaattactgccaccagaaaaaggacggtgagattaatattttacaggtgaaaagatttttccaagacaaggtttaatttgaccatgcggaccaatttacttacaaggtgtcatggtttacaaaagcccgttaaatgagtaaatcctgatctgtttgccacgctggcaaaacctctcgcagaggccccaccaaatactataaatcattaaatctcgtttaaggcccaaaaaatgatgcagagttgcgatcgtagagagtagagaacagggaaggacgagcggttatgttaatcatgacgtcatcctctacgattctcaccggagatatagatgaagaacaccgcacgtcgtcaatggcagaggaagacacgcctacgcattcccatcgacggcgctggagcactcctgttgattccggcggcgaacctcttcaaagcttatccgtgagcagatctctagagataaaatcagaccacgagaatcccgacgacgagtgcagggaacatagaggtgtgtgtggagttattcttgacgaatatttctcgtgttcttcgaaaaataacagttacagtttctatctaggagggaagatatcgccgtggggaccgtatggaccgccgctgctgacggagtcgagatcaaaggcgccgtcgccgcggagaggaagaagcgtgacgaggaagcgagatctgccaccatttttgacgacactggattgtaacggacggccgagatttcatcacaggagagtgagaagcgaaggacggttagagattgccagcgtggcagtagattcaccggagatcgttagtgttcgtgggagagaaggactaagaatcggaacagtgagaatcagtcaacaaaacgacgtagtagaagatgataatgaagataaacagaatcactgatcttcctcttagaattttgatattttcagctaattttccggggggaaaaaacgacattgtagtccgatgatccgttagaaacaagataagaaaagggaattatgggctttacttatgaatattaggcccataataatattttgttgcaaaacaaacctgggcctgaagcccaaataattcgctcaagccgacgtgttaatttatgatttgtccgtcacagtgatacattaaagcacaggctgtgcggttatcacactgttcgcaggaagacttatttgagagagttttacttttgggggacacaaagatttggagaaaaagtttactaaaaaagaatctggggaagtaagtgagatgaaggaagaggaggagatcggaaaaccagcgaaaccaaaagccaaggtagtcccacaatgacttacatatatttcgctttccattttctaggttccgttctttgcgtttttcttctctttattgtgttagatgcgaaccttcttataattccggtcaaagtgcatgcgtttttcgtgttcttactgtctttggagatctcagatcccgtattagtagttactattgatggaggaagttatacaaggcatagaattctaggttatcagttttggggttcacgattttttggtgcttggaagtaaattgttggtagttaactttgaaatctttggtcttgcaaactttgagtcagtctcgtgatgtgtcgttgctttcagttattgctctaagaaagccttggttcttttctttaacgcttgctggagtagtgtcgctccttattcttgccttacattatatatttcttctacgctcacaagtcttgtgtggggttgtttcactgagacttaatggcagaaagatgttgctcctgggaggttgattgatacctatgctgcacagtgcgataactgtcacaagtggagggtgattgatagccaggaggaatatgaagatatcagaagtaaaatgctcgaggatccttttaactgtcagaagaaacagggcatgtcttgtgaagagcctgctgatattgactacgattcttctcggacttgggtcattgacaagcctggtctccccaaaacgcctaaaggtttcaagagaagcttagttctcagaaaagattactctaagatggatacctactactttactcctaccgggaagaagctcaggagtcgcaatgaaatcgctgccttcgttgaagccaatccggaattcaggaacgcaccacttggagacttcaatttcactgtccccaaggtcatggaagatactgttccccctgatccgaagcttggctctccttttccaagcactactaccactacttcagagaagagcagtgtcaagcagagccataactaatatgttctcttctaccttctttctgctccctaaagcaatgcgttttgagtctttatagatttgatgttctctaaaactgttatgatattaacatctctaagcaaaaaaatatgatcttttgtctcttctttaaccggaactcaaatgttaaatattcttttaatttggattcttacaccaaagaaacacacttattccttacaagtcccctcgtaaaacattaagtagaggctacaactccgggaattctctcatggcaaatcctcatgcaccttatagtgagcggttcctcttgaagaatactgcacgatgtctcacagacttcctcgttggacatgaagcatccggatatgcattttttataggcctccggttcggtgtaagacaggcattttctgttgcattttgtctgcaaaccctcattagcaacaccttctcctcctatgaccatcatctctggtttggacttggtgcgagggcaaacggccatgcaatgttgaaagagtccttcaaaggggttgcaaaatgcctcacagaagggattgtgttcttcttcttgtcgtccacttgtctctttctctatctccatcatcaacagttcattgcacttatcttcacactctttcttcttgttgtggatatcatgtttacagttgtgcttgcactgttccaccaccaaatcttctactgcacttgacactgttgcactttccaacaccagaatagcccaaatcagtgagatgactactacctttgcttttgttggtatcatgcctctagtcatgttttatagatgtaataggttatgatgataatttttgtgttatactatatagaggggttggttagtgacatgcaagattctacaggtgttacgggtacgtgtaggtcaagattctcctatcatccacttggacatcatgctttagcctgtgcatagacgtgtccaaatccaacataaggaaactccaaaaaaataaaaagaagagaggagacaagttccaatgacttcaattgatccttgcattgaatttgagatggtttaaggcaggtgtctttttctcttcatttgtctaatgggttcattcacacacaaaatagtttcagtggttttgcaagctatatgtataatctcaaattaggcaaggaataaacttatcatgtcatggataatgtaatgagaggaataattttcctctcatatctgttataatttccttagcatgatttgattcccaatctgcttataaatcatggtaagtgcacaacgaacctatacatcactttacgtgtcttagctttgaaaagaggttcttgataatcacataaattttgatattatacaataaaaaaaatatatttcagaatacaaattatacattcatgtaacatgaagaatggaggaagtatgtgtatcgtaaaattgaattgatgaaaaagctagataggagtctttaagacatatatgaggtgaagaaagaaaagagtcaaaacagagaggtcatacactcatcatgcatttggctacaagccttttcgcatcttctcgagtctactctgaatgaaagcatgtgatttagtgtttatatcattcaaaagaggcttcggctgtgtcacaccaccagctccagtttgagctactgatcgcctaacgtttagctcactcgctaagttcttctttgagccgttactaccattaaccagcatgatcaccctatctttctccgagcttcttgagatattgatgggattagcgttgttatcctcggactcttctctttgcttgaaataaattgtgatatcagactttgattctttcttgatcagtttctttgtcacagacttatcttccttgtgacccgcacccgccatgagtttaacgaacaccaactttaaaagccgccgaaaaaaccctctcttgttgtcatcatcatttgctctctgcatcgtctatttgtttacatgaatgtctgattatggtgttggtttattattatatgaaaaaattagtgggattatggatttctttttccgattgctttgctttgattctacgctttggggggaaatgtgattgtctttgtcttttctatatctaaggaaaacagaatttatctagtttcttctttcataatactctttttttgttttttggtcgcttttttaactaaaaagaaatttgcttttgtgcaagtttttcttccgttggagctggagattcgcttctttattgaaagatgaagctcccttatcactgtaaatttcggttgagtggacgaaaacttgtaaagattctttatacacttacaagacttgttgatctatctataaaagtacttctcacttatgtttttcacttttgttattgtcacgtttcaattcgcgtgaatcacgtgttttgatgatagctgttgactttaattttgacaaaattctctcgacgaaagaaaaagttgcttgtcattgaaacgtaagccccgttcagttagtccatagaggaagaggtgaataactgtcgaacggccatgatatcatcggcggagagaccacataagctccacacacgcgtctcagcaatttgaatctctccaccgcaagattctctcgttaccgaggccgcatctctgcggataagtggcccggggactttcctgggtcggaacttggacaagcccatatgacccattcacttcgtccagtgacaattgtgtttggttttactttgcagatgtatatatagatacgtcatattattcttattaccgatgtgggatgttaacctaaaacgtttcatagtattattaactttcgttttttctgggttgatgaagtgagggatttaattttaactagagaaaaattggactttgaattttgatgggttgagccaggcccgtgcaatgatttttatttgttttctagtcctgaacgtttctaaaatagcaaaatacatcctatattctttcttattagcgaaataaacccagatctagtataatgttgtaaaaaccatacctctttttttttttttggtttcaatgtgaagagcatacagatcacacagagatcaagtacatggccatctctgcttgtattatctgagctgttctcatgttgagtttccaatcctggtgagacatttttgtaagcaaatcaattccaagcgtatgcagaaaaaggattcacatgttaatacctccagttactagttcggctctcttagcagctgcatcagcaactctgcaacaaatagctcaacacttaatttggaatgactatctatttgcaagtatatggctttggttaatatatgacattaccttttccgtaacaatcgcccccgccttctctctacaatatactgaatcacatgcttggaaatcagaatcacaccaacaacagttaaacctatggagacatatttgaacctcctgccaaagagatccttttagactttttcaatctcagttttcgaggaagacaatagccatactgagaagagaaacaaccttgaccacttttccaacggaaagatgatcttatcgagcggtacaggtgagacaaagaaaagtccattctcggggttttgaatcctgaaaccacggacaccgtccttaacaacctgatgacatggtaagaaacaatacaaatgagatgtagaacgtatattggtagtaatataagaagattttggaaccggtgacagataaaaggcgtacctcaccaacaactgtaaccggtgtgccaattgagaggacaagctcacctcactatatatgaaattttatgtatggattatggaactcatttgctgtttgcaacatatcgccattgttatagtcatagaaacagaggggaagatgtaataaaaccaaatgttattgtttcaatttctttttatacttcaccaaattaatggccaacatttcgcaataaaacaaaccagatacaataaaattctaatgatctatgactatgagtgtgtagtgtaccaaaattatctatgagtgtgtagtgtaccaaaattatctaaacccaaactagacaaatcggtgatagatagaaagatcttctcacgatccacaatcagcctgcaactactactagtgagctccacatctcataggagaaatctaactgagattttcctcttgtggtttgcatatggcccaagagacctaattccacgtggacatcgccaccaccattggattagatcacacttccgtcactgttgtcgtcgtcttctccattgtcttcttcctccgatgaaagcggaatcagccagcaagtgccgtgcaagtgaccgttcacgcacacgaagaactctaacccaccttcacgtgatcccagccgccgcgccgcactcttcgggacgagacgcgccgccgtcatgctccacacgcgccctccgcaatacggacacctaaccttctcctccagcgccgcttgtcttctcacgagacactccctcgtctttgacctcataaattcccgaaatacccctctgaaaacccctaaatgctcatctccacccaccgcctgatgctcgcacggatcgctcatgtataggagatcacggcggcaattctttggcaggaagaatctcccggatgtcttggagaatctggactcgcaggcgaagtgacccgacgtcggttgactcagattgaaataccgagtcgactcacccccgccgcagaagaacatgagtttcgctaacgcgtgccagccgccgtcgattcgaccgctgggatcttcgccggacaatgccgccaccatccctggcgcacggttcacacagagccgccgccacagaattcgtctggcgattgcgcagaatctgcggctgagggaggcgattgtgcatagcgtgtggatgtcccagctaatggactcgaagacaagaaccaggactcgctcattctctatacctgacttacccgagttgggtaatcgactcggttggttaaatttgagccgtctattcgtgttcatctggacgacggagaatcttccctctagaagcatttgagtttttgcggtctaaacacgcgcgtcgtgatctatcgtatttatatcagttggtccggtgctcgagaataacacacgtggctttatgctagaataaaagatccatggagctccccgacgctaaatgtgtcgagctatcattggtagttgtgacgcgtgtccattggtgattgcgtgcgctgcaacagagaatcggaggtataaactgacgtctcgattggtattaaaggaaaaaattaaggaatgggagtgccacgtgtcgagcgagagacggaaacgcgaatccgaaacgtacttttctggaaccaaaaatatctcccggaacacgtgtcacgttcaattgcagtcgagaaacgtggcaaatacgaagtaatcttccaaactaagaagagccacaaagcagtcgcatgaaaggcagcataagctcccaaaaggtccgtccaacaggaagatttttttagtggtcaacgtcttggtcgagtttttcaagatcgggaactgatgctttttgctttttgtagtggtcaacacatgacaactacaaactactacgaaaatgtttgatggattggataacgaggttaagctaataatgggctgaatggactttattaaagcccatacattccgtttcaaatagaatgggcttagaggagtggttgaatcacgtggatttgttttttcttttttttaactctgatcgacgttttgtacataccagtcagattcgctcttttaaccttttaaaggaaataaagttaacctacgcgtgtaaggcgcacgttagacatcgcctttggaaattggcaaaccctacaccgaccgaacaaacgattaacaaaaatatacatactcctcatatcgagagcagcttccttttcattttcttctccctctcctgggtttcgtgtgtgaatgtttctcttccacaaaagcgatagaatccaccagaaatcttcgattgtctctctccctcatctcaattagggtttacgggaccgattttcttctgtcttgcgtgcctacatccgtcgattgggttgggaattttcaatgcctgcgagttctttagcggaatctgtctccgaaaaccctaggcactgccgagctgctaattttcgcctgtggttctggcttaacttcgagagttagaatccttaccttttccttttctgattttcgttgtttttttttcttctgaattccgatggctccgagccgcaagagagggggtggtagggctgcggcggcatcatccgctcgccgagagtggaaggttggcgatctcgttcttgccaaagtcaaaggatttcctgcttggcctgccgtggtatgtgcatctatggctttgctttttctgctatttcttctcttttctgtttggttctgcaagaattgcttattagattcatgatttagtttccagttgacggtagaaatagctataaatttagggtttgaagttgcatgtatgtgcatctgtatataattcagatgaaagttcctctctgggattagcaactgcctaagggatatggatattttcagaggggttggtgaccttatctagtttttggcagattgcaggaatacccgtgattagttgttgtagttgttagtagattaccactgatccagactttcgtttagcaactttataggccattttacatcttctaagttttggatatatgatgattattccctataatatcccatttgccactttccagaccagtttgaatttgattttttggatcacttgctcctgtgctaattgctgggagtgatttcaggttgacgaaccggaaaaatggggccactcagccgattcgaagaaagtaactgttcacttttttggcactcaacagatgtgagttctcaggcctttagtatcaccctcatatattttgttttgctttctggtcatacttcccaaatgcttacattttcagtgcgagttcctatttgtcatcctacacttattttaggtccttaaattttgtgtccccgtttgagttgattaattcattttattatgattcttattcgaggagataaacttcggttcttgtctcactagattaggacgtagaagctggtaccttggttatggctgtagattttaacctttcctgttccggcaggatcaatttgctgtgatgtatgttctctaacagacaccactaagctctaattttacttggtttagaatctgaatcattcctggtttgaacttctgtgttcacttgagttaatgataattgagtcgattttcttctttccagatgtttcgcaatagtgcttctttgttgaacttatcgttagcaattttgtgtagagcttccatatctgttggatggtgacttttgttatcatttatcttaaagccttttgcatgttgaattctctgaaaactctttaatcatttactttgcagattagcatcagcatttagcgaatgttctttttgttgcttcattcattcccacggttaagtggatactgatgtataattattatgacgaagcattttagcacaactgtctgcttttcaaatttaattggtttttaaggaatcagtccaaggttgtagtaaactatgctcactgtctcttccctctagatcagttaaatgttatttattttagggtatgcagttagtaatattttctggtgtatgtgcagagctttttgcaatcatggtgatgttgaatcatttactgaggagaagaagcaatcacttttgacaagacggcacgccaaaggttcagattttgtccgtgctgtcaaggagatcacagagagttacgagaagctgaagcagcaggaccaagctagtgggcctaaatatgctgaagaaacaactgctggaagttctgggaacacttcacagctgcctcaggcctgtgaaaatctaattggttcaagacttgacactcaaatagagtcaagttctagtcatggtagagatgagttgactcttctcagcgaagatgcttcagctgctgaacaaatgctagccctgcgtcataacactctagctcataatggtgcctgtgatagtgcagcagctaaagatctatgtgagatagctacatattcctcaaggagaagaaatgaaagggtgcgggctctaaagtatgctccacagagtataatattaccggttgagcactctaaaatctcatcaaggttggaattggatagagttcaaaggtccatgcttcaatgcagtgatggtggtccaagtgtcaatagtataaatggcaaagctataagaaggagaaaaagaatccgtacgtcaggtcaatctgaatcagatgacgtggtttcatcagatctaaatctgcacggatctgatgaggacaacgcatctgaaattgctacagttgaatctaacaataatagtaggaatgaaggcaatggtgtggattctggttccaaagttgagtattctgatgccgttggtgagggttgtgacggaggtcatgagcttaacaaagggcttgattttcatattagcaccatggttaagaggaagaagaggaaacccaccagaaaacgtgaaaccagtgacattattgaccctcctgctaaagttgaagcagaaggtcttgggcccaatgcatgtgatagctgccagagatctcaaaattctcatgaaaggctgaatgagaggccctgtgaagagaatggtgatgaacatttgcctctggtaaagcgagccagagttcgaatgagtagagctttttatgctgatgaaaaggtcaatgcctcttcacaggtggaagagagatcgtcgaaagacaccctactaagtgcagctttgcagacaagcccttctgtgaatcatgaaaatggtattggttctggtcatgatacttctgcagccgaagaatttaacagctttgagttgtctgctaagctttcaggtgttatggttgatgtagtgccttctcatatggagaaaccttcagacagaatgtctccttctgtggcctgtgttcagactgtaggagatagacaaacggctgtgaatttccatgagaacgagtttaccatgacactagatgatgaagtaactcgagcacaatctaaccaacttagcagtttggtagaaacagaagctcgtgttcctgaagtagttcagggatgttctgaggaatcgcaaactgggaactgtctaattagtgagactgatcctattgatatacaatgctcacatcaaagtgagaaacatgaaacccctttgaatcctgatatcgttgattcatctgcaaataagtcccccggtttatgctcgagtttggatatgacaacaacagtggtacctgctcaatctcctcaccaacacaaaatccaggagtatgattctagtgaccattcattggtcattgttggagattctcttaatggaaaatgtgagaaaattgattactgtatgactcaggttgttcagtcccaagccttagaaccgccgcctccattgttctgttcagtggtcaattatcaggaggttgaaaacctgcaggagactgaaaatactctttggaaagaaaaccaaggaagtcccggtaaagaacttgatagtgacaaacaagctcacatgatacagaatccagtactctctgctactgaaagtgaaatgatcgtagatgatgcggaacctcagtatgaaactgtatatagtcactgtgcagatgctgtggagaacagagagctggaaaagaggtgagtctactgattttgtctctactcctatactaacctctgattctatgttgtttccttttttgattttccttattagaaaaacttttctaattacaatcatgtgttcaatttctaaccacattggaatattttatgcatggagtcctcataggcagattgatgtagaacatgactaggaatctatctattcactttttgacataaaattccatttctttgttatttctttctttctttgtaatttgcattttccttttacagttgaagattcccagttcctatttaaattttctcttgctttgaaagtctatgtagaggatatgcatattgagtttaagcaaaacatcaattagattaagtttcttcagactttatcttggtcaagtttttccaattcacggaactggttgactaacagtatggtatgtctgtgtgcattggcagttgtgaggttgatgagcagaaggagcagatgcaagccaccaattctatctcagtatctgagaacttttcacgtgaaaaattgaattcatctcctgcaaggggtactccaaattgcaactcagtatgccgaatttctaccgcagaaagtgaaaatgctatgcagaacaacagttattacagcaccaatgttcagtatggtgagaacaaatcattaaatgttgacactgtcaaagaagaaagcaaagttgaaacaggcacaactcaggtgaagaaagttgttagttctgatgtgcaatgcactgttgagtcttttgagactgcacttgactcattggtgaggacaaaggagaccattggccgagcaactcgcttggctatggacttggcgaaatttggcgtttcagcaaaggtatgaaacgttctctctgcttgtgatcttgtcttatctgtttgtggatgccacatgttaattagaggtggaatccaatcggagacaaatttcttcttatagattgttaaaacattgtacctggatctgtcccatgctatatacctatttgcatttatcaaatagttaattgcgagaacatgtcaaattgtcaataccaactttatgtattactacgaattagagaaacaccttatatatattgttttgtctactgattttaggatgctgtaggcatccagccactcttttcaagcaaaggactagggcaatccttattatcttatcttaccgttttaatgtggaaagggactttttgcacggtgcttttgtgtaatttataaaacactattttgcagacttttgtctaatgttgttaatgatgctctaagaatctctatgtctaaaattaggcgatggaaattctggcccacactttggaaagtgagtcaaatttacaaaggagggtggatttatttttccttgtggattctattgctcagtgctccaaaggtttgaatggtgagtatgctgtttttgcttagttgcatcattgatgttctcaatggcgagttaactttgtgaatactacctttctattcaggtgatgctggtggtgtttatctttcatccattcaggctatgctacctcgcctattaactgctgctgtcccagctggagctaccacacaagaaaaccgaaaacagtgcttgaaggtatgcgattttagttagatattctttttcttatgaatactaactctcaccctttctgctcttatataggttttgaggctttggcttgaaagacggatccttcctgaatctatagttcgtcaccatataagagaacttgattcgcttagtaatgttcctgcttgcctctattctcggcgatccgctcgaacagaaagggcgctggatgaccctgttagagatatggagggtatactggtggatgaatatggaaggtgagagttgagtctaatcagttttgggatcttgatttctttatctctagggtcataacttttttcacctttttgtttcagtaattcaactctccagcttcatggattctgcatacctccaatacttagggatgaagacgaaggaagtgactcggatgggggtgattttgagtctgtcacccctgaacacgagtcaagaagccttgaagaacatgtcacaccgtccattaccgaaaggcatacccgtatactggaagatgttgatggtgagcttgaaatggaagacgtggctccaccttgggaaggtggaagcagtgctagtgcgatcacagatcaagctgataatagagagtctgcaaattgtctgcttgtccctggaacttcacatcagaatgttacctcgtcatctccaccagctcgcccttcgcagaatgctcagttggcaatgtctaattcctactcaaatggctttgactaccgcagaaatcccagcatgcaggtgcgtcctttttcttcttttagaatcttttgcagttaacaaagtgaggattcagacatagttaataacttaatttgtggttaatattcaagggcgactatcatgccggtcctccaaggatgaatcccccaatgcattacggaagtcctgaaccatcttatagttcccgagtatctttgtcaaaaagcatgccacgtggggagggttctaacttccagcataggccatatccatcttctcatcccccacctcctccgccatcacatcattattcatatatggagccggaccaccatataaagtcgcggagagaaggtctatcataccctcacagatctcattacacactggaatttgacgaaaggaattatcaagacagctatgagagaatgaggcctgaaccatgcgagaatcgagacaattggagatatcatccgccctcttctcatggtggactccgataccttttttttttttttccttataattctcatgcatgctaataggcatatatgaatgcatatatgaatgcatatctgcgcacacaagcacttgctcatggatgctaataggcgtgaatgcttttcttttttttatattgcaggtccacgatatcatgacagacacaaaggacctcatcaatcgagctcatacagtgggcatcaccgtgactcaggaaggttgcagaacaataggtggagtgattctccgcgtgcatataacaatagacactcttatcactataagcagcattcggaaggtcctgttccagtaggaatgagaggtaatatggaaattcatacttgttccacgtcatgaatcagagccttttcttatactggaattgtttcctaggtttagaaactctgacattttcttttgactggggattttatatcattaggtctctgagattcgagattgttttgcttgtcctgtgggtatatcttgaatataaaaatgaacttggagtatgtttgtggatatgcagatccagggacgtggcatcaaaggtgagtgggagacaagagatgaagaagggcaaaggtgcagtctgctctaaatgaaagacatttgggctatagtcatggaaaagaagaaatagggagaaacaagtgtaggttggaaagacctgggccacttgagagagatgttaatatacaaaagaaaaaaggcacagttggtgtgtgtacatatgaccaaaaacgtcgtggagaaggctaaagaaacagtcgtgaaaagccatttgttgtagtagagagagagagatttgagttaggcaatactgtcactgatttaggcatttgatattttgtaaacaaaattttttggtttatttttggggagtggtggtaatacacactaatatgcatttctgtcacctggagagatgagatgtctctaaaaaatggtcaaagaggcgattaattagttaaatagcaaatggaaaaaacaattagggatgggtttgtttgttaccaaggaattaacataacagctgtaatgctgctgcgagataaaatgaacaatgaagaagcggagacctgttgacttcaaataattttaattagtttcttctgtgcgatagagatcgatcgagagatgggtgcttcatcatcatcatctgtgtcggagaaatcaatccatcaattcaccgtcaaggttttctaatttatgaatcccttttcttcattgtttgtttatctgatgaatgaatgcgtttctgacttgtttgtctgatctatcggaaattaggatagctccggcaaggaggttgacctaagcgtgtatcaagggaaagtgctgctcgtcgtcaacgtcgcttctaaatggtccgtcagatcctccgatcatcttctctctagttaattattatttcttgattctaaattttttgttaacaaacaatttggggaacagcggattcacggagtccaattacacccagctgacggaactttaccggaaatataaagatcaaggtcagaccatacaagaatattagaataggaatgtatatattcctttctaataaagaagactcttcttcttttgctttcccttgttacttcatcgtttatgtaagattttttgttttggtttcctttggatcatcatcaggttttgtggtattggcgtttccttgcaaccagtttctgtcccaagagcctggcaccagcgaagaggctcatcaatttgcttgtactcgctttaaggctgaataccctgttttccaaaaggtacctcaacaaacaagacacttttcttcttcatatgcctttaataggtagctgattttgtaagtttataactaagcatgaatgatcatgatcatctatgtgtgtgtgtaggtgcgtgtaaatggacaaaacgctgcaccagtctacaaattcctcaaatctaagaaaccctcttttcttggaagtcgtatcaaatggaacttcaccaagttcttggtcggcaaagatggtcaagtcattgatcgttatggcacaactgtttcacctctatccatccaggtctctaactctcttgttcttcatattctattataaaatcatatcactcttttatggcttacttcatgtttgttttctgcataacagaaagacatcgagaaagcccttgcacaagaattgtgaacacgcacagagatatttgactcctttggaagaaacttctctcatactctcggtcatgcagtcaagtttctacatttcccattgcaccttccatatgggccttgtattcatcttatgtgtaactctactagccatttcttttgtgaaatttgatcaaaggtgattccaataagttgatttgaacccataaaaaaaagaaaaaaaaaaactaattccaacaaatacaaaccaccagctaagctaaagattagacgaaatcagcaagatcaaaataaaacatcaatgattttcactcaagagaacgcctataacaacgtcttaggataccaaaagacattttagtctatctatcactctcaccatttactttttatggtgcaaattactcagtttcgacgataattaatgtttaaatctgtctcatgtgttcaatgagaacttctttccatctgtaatgtatcgattataagtggcgtatcactctcacgtgcgctgtttgtgaaacgtggcagacaattgaagaaatagagagtacaaaggagaaaaaaggagtacttaaaaggagaccttgaccactctttcatgcatccatccttcttctttcttgtcttatcagtttcttttgcttttgttagagattagtcaaactactgatattattaacattaaccatttttatggctttattttgtgaacaaacgacccacctatcccataatcactaattagacattacaactagtgtactgtcttttccattttattttttctctgtgtattatatttacattttttcttcttcttcgattagcactgggtatcccgtcaagagttttcaaaaccgaagatagggaccaataccaactactcccgaaagtgagcaagccccgagctttcctccatgagtctacgtgacccgaacaaagctacttagtttggagatttgtgtagagccccgtcctttaggttctggctcaactaccattgcactgccttttatttgcatcgtttttgctatggtgcttaatacattcaagggctttggtgtagccatttcggtgctttagttgaggcatagtgagaaatttagggaaattatacaatgaaagcatacaattttcttctttaacaacacaatgaaattagaaacggaaaccctcttaattaatagtttaactgataccaatttggatcaattccaaagcttatagtcaatggcatgaaatgagtgatgtggtgggatgaacgtaacattcatgctaaactcgtaagcaaatccataattaagaagttgatcgtgatttatttaattacatttcctaactaccaaattagagatatttaatcattccattcgcacctaacacacagcaagacataaagacccacaaaccacaggctccatcattaagactcatgtgtgcatgaacagaagttttctgttcaaacaatatcctcaccgcaaaatcaaatttgaaaacatgataagctttttcgaaaaaaggaaaaaaaaaatgataccaaattgtttcgaacatttaatcaatgatagaaactaaacataaggttttagttcaaaagcgaagctaatggtgaaagcatcatgccttttcttcacacttagaaacatgtaggtcctccatattattcagttcaataatgtatcttaattttatcctatatttgcattttagattatatctaccaaattatctctacactatgtgccaaattatttgaatcgagttcgagtcagcatgtatactagtatataagcaatctatctctctagcagccaaacacacacacacgaatagtttactttgaaaatttctcgatatataggatctcaatggcagggacagtagtattgagatgctgcactagtgtaaccaaggttaggacatggaaaagatgttcgaagcagataaaggagcaaagggctcgtctttacatcatctggaaatgtgctgtctttcttctctcctcccatgattgatccatatacatatgatataatcaatcaccaaattcctttcttcttggttatgtattagttcagttccaaactaattaactagctatttaattaaacgtatataccataatgtaaatttttaattgtaatcatcgaaaatatcgatacctactgtcatttggtcatcaatcggaagttctgttttgtaaatagagatactaataagaacaaaaaagaccacaatatggtgttgtcttcttgattggtgctaaaaacatttgccttgataaacaaaaagttcaaaaacgatgcgcgtggtttaaacttgctcttaacacgcgtggtgatcttgtagttctggtctttcagggtttaaaggcatatttctttctcacgctccggcgaaaaaccctaatttctgctaagatcaaatcaggaatggtgctcagaaacttaaccatttcttacgaaatcatcaaatctctgaaacatgccaaagaacatagtttagggattcaaatccgatggatctcgagcctgaaagtggtatggaagaaagacacgaggctagacgaagccatcgagcaggacaagcgttacaagctctgtgctcgggttgtgaaagaagtcctgaacgagccaggtcaagtcattcctctcagatacctcgaaaaacggcgcgagaggctacgtctcactttcaaagctaagagctttgttgaaatgaacccttccctgttcgagatctactacgatcggatcaaacccaagtccgatcccgtccaattcctccgccccacgcctcgtctcagagctttcctcgacgaagagcagaggatttactctgagaatgagcctttacttgtttccaagctctgccaattgctgatgatggctaaagataaggttatcagtgcagataaactggttcatgtgaagagagatttcggatttccgaacgattttctgatgaaattggttcagaaataccctaattacttcaggctaaccggtttacctgaagaaggtaagtcctttcttgagctagtctcttggaaccctgatttcgccaaatcgaagattgagctgagagcagaagacgagacccttaaaaccggtgtccggattcgacccaattacaatgtgaaattgccgtctggttttttcctaaggaaggagatgagagagtggactagggattggttagagcaagactacatatcaccatatgaggatgtgtctcatttagaccaagcttctaaggaaatggagaaacgaactgttggtgttgtgcacgaattgctttctctgtcactgttgaaaagagtccctgtgcctacacttggcaagttctgcgatgagttccggttttccaacgcgttctcgagtgttttcactcgtcattcaggtatattctacttgtcgttaaaaggagggatcaagactgcagtgttgagagaagcttataaagacgatgagcttgttgatagagatcctttgcttgctattaaggataagttcctgaggttattagaggaaggatggcaagaaaggaaagatagactgaagctgcagagggaacaagttcagaaagacagggagatgatgttagcagcgaaaagcaatgaaccgatagagcgtctctgtgattaactttacaatcaagactctgtttatgtcctctgttttttctctaggcatagttcttggcctggtttggtctttagggtggatggttaagtttgtaagtttttggctaataagagataaataatcaaatgttaatcacctctctcagttgcaatcttgaattcacttgttttctccatctcagggagttgattctagttagaacggtttcagcgactaaatgttacatattcacatacagttcttcgttttgtgagatgctgtgtagacttgtttgagtatatgatctttacagatcttaaagcaggaatcatcttgtagattaggatcaatcaacgcttaacgcttaaatctttatcttcttctcatgtgttttcttttgatcaatccaagttttaaattacatttctttggtcacgcatttggagttgcagctattaattgtagttttagtcatttaattggttgtggaatttggaacaagacttgttgttataccaatgtgaaacactctcctgaaagaaagctctacaaacaacctaacaccaaggtcacgcaaatgaaatggataacgcaatatcacctaaaatccttctgcagccctctttgtgccttcctcgactttgaatatataaagagacacacctaagatatctcttcacacacacactctctccatggatacactttttattgcagtaactctggctctcgctctctcctctttcacaagaggccagagagtgatacagattccaccaccacgtccactatgcgcgtctcaatacgccctagctaactacgcctgctcacgtctcccaatgcacactgtcccaccacctgcccccattaccccacctcctgctcccatcgctcccccgcctcctgaacatgaccaccacgaccacgaccatgaccatgaccacgaccacgaccacgacgatgaccacgatgatgatgatgaccatgaccacgatgatgaccacgatcacgaccatgacgatgatcacgaccatgacgacgatgaccgtgaccgtgaccgtgaccgtgaccgcgaccgtgaccgtgaccgcgatcatgaccgtgctcacgatgaccatgaccataaccatgaccatgacaatgatcacaatgacaacaatcacgaccataatcatgacgccgaccaccacaacaatgacgacaacagccacgatcaacaccgccgtcgacaccaccgccaccaccaccgccaccatcatcgacacagagaagagacgtttgcgcaacaagagtgctgcaagtggttgaagcaaatggacaacgagtgcgtgtgcgaccttctggtccggcttccgccattgctagccaaaccaattcataactatacagtctttgtggatgagtcatgtatcgtcactttcgtctgtggaggcagactcattagctgattctctttcctttctaatactatactgccatgtcttctcttcttcttcgagaatcaagacccctttgtctatcttctcttcttagttgttgtcataaagttttttattcacgctgtttagtttaattgttgtacttgtacgttcacattacatatacaggtcaaaaagtcaaaccaaaccattcgtgtgagcttccatatgggccgaaattcatagggttttgagatgattgcaggcccattatttattacagatggcaattttctaaattagttagtttcaagcccgtttattgtattaataacaccacagtgggtgggaggactcggaagtatataagagcgatcctgtggtgagtttaaggacgtttgctatttctacgttgacataaattaatcgaatccattctataacgcaatttcaattcacaaaaaacgaatatatagtactaacaaacagaaccaaaaaaaaaaactaagagatgatggtacattaaacaagggaagatggagattctggaatcttactttctgtaataaaaaaaaagtcgcgttgatgggaccaatgtatagaatttaaattttcgggttatgctaaaaagatgtgattcttttactcgaacttctttttttttgttggcaagttgttatttgtcttcttgcactttgttccttatatcttataggttcaaaatctacgtcaagatcatatatatacgcaaatattcacacctacataagtttccaaattccaatacatggtaccaggccaagaagaccaaagtatacatatagaagttagaaggaggatataagtgatcaattttattttattttggtaaaagaaaatgagtgatcaattttgtttgttacggaacatatttttataattatgacaagagcaatgagatagcaaactgtaataaaacaaaccaaaaaaaggtggccactagcgtcgagagacgccaatcgcacacgggcttagtagagagaataaaaaaaatggatgggttccaattaagaacgcattaagaaaactaagattgatatgtgtgtgtgtgtgtgggcactcacatgatgaatcgaataatttgcacatatttgtcaacgggcttctctgtacggcttctggcgcattctactgtttcttactgtacggtcatttgctaattgctgctactcatttttaaagtataattaattaataactactactattattcttctctttaccaaaaaaaaatatatattaaatcttctttttcttcgttttgttccgactcaaactggttaatatttttgaacggattctatacctaaaaagttgctgctatatattatcaaactttgtggatcgtatcatatttgtgttttttttttactttttgttggtacaagaaattgaaggaaaaatcgtatcatttatttgagtggttatagtaattttatttgtttagcttcttttttttgttttttaaatcagcaaaaactaagatgaaaaaacaattgatgtataatttttatgattatttttcttttttggaagagaaaaaatcattggcttagaaatttgtgtccttaatagcttctttaacaaaaatttttttgtctatatatagctagctactaaatgtttctttttttgttccagagtatcttgatcataatttatggttataaacttatatacataagtgggtcagcagtcaagatttcccctttaatattggttaatattctcctgtttagaaataacaaattgtattattaatcatgagatagaaacttatataaatcgtaccaactttaagccccactcagcttactcgtcgttatattattgaaatcaaatagttacaaaaggcgggtaagtcttcattttccaaatatagcattccactcacagtctcacttacatccaaaaaagtagatgataatactgaataaccgttatgccaaaattttcagtatctgacaatactatatacgataatacgatatgcatatatatcatattttatttttgtagcttatttttttatatttttccaccactcatcgtagcctcgtatattttgatcggatcattgccccgtcaccatcaccaataagtaccattggcgtaaattaaccacatttcttcagaatccacccttatcttttacgtggttacaactgatcacgccactagacaccgcgacaactcgcgttccatggcggccgcaaccgctgttgaagcttccacgagcggtcgtcggctggcaatgtccagcagaaaccgcgacacagtatctgtgcttggtccagccacgagcctctcccaggccacgttagcatccatcttggaccttcgctttgtaaagactggagtcgcatccactctctgaatagaccacttcttcacttttctcaaccgttcgatcttttctctctgcctacaagctaactcaaatgtattcctctttatttcttccaacactttacttaacagttcttctctgtcttccacattcaagaactgctcgttcctgaaaaacctgtcaaactccggaaatccgattgctttcttgatccctcttgagtaatcagagttcgaaaagtcgaaaaattctctgacttcctcaaccattccactctccaccatcttgtcaactctctcagacacgaacccgtgcaaaacgggaagtgccacgtccacccatagaaaacaacagtcgtatctcgacctgaacttgttttctttgtcatccactagagcctccacgtaagagttggaacctccaacgatgattggaagctttccacggtttaggacggattcaatggagagattcgccatgtgacagtaattcgcggcggttaagtcggcttcaggcggcaagacgccgaggagatggtgcggtaccccgcagctctcctcgctcgtgatcttgttggttacaatgtctagaccttggtggacttgtatcttgtctgagtttatgatctcagcccgaaaacgtgtggctatatccacggagagtcgtgacttgcctgtcccggtagcacccatgatgaccacaactttgtcctttggaccgtatgggtttagagttagcatattgggaccaaatctcgctggagggaagtctaaagtcggcgaaggaggcaatggttgtttgcacatagccatagatatcttcatgatcatgatgaaacgctttgcaatataaacttgctggtgtttaaaatatgttttgttatgtttggtaggcttgtatatcttcttatatatgaaatgttcaggtgactttgcatgaaggatatgatttatatatatagggtcacacacttagtaaatggccactgtacgaatgatatacgacaagttggctcgccccttttttaattaattggtcaaacctgttgttttattttactttattctcctctaattctatttagactggccaaatatttgatccgcgtgcaatgcagatgatatatattgataatgtcacaatcaaacgtaaacttctattacgtttgatgtgaagttaagatacgattttttttctaggaaaataacgattatatgcgaggcagaaagttttaagaagcatttctcttctttttaataaaaatatatatgggttatttttttttgatgggttattgtctaagctcatagtatatttgtttttaatagattttatcatgttattagagcagtcgcaatgaaaaactcggcaattaccttggatggattgacattatttaactaaaaacatttaagaaattaggttatgatgcttcctcctcatgatcggtctatcaaatattatatgtatatagatattctgtattccctaatttcataagaaaaagttatgcagatgtgattctatctcatattttgatattatcatagagttgtttatatttgtagaataatataaaggttctattggaccgtccattaatgaaacggagaggcaaaattgtttgtcgacctgcaatggccaaagacccccgggaacgtctcttattactctccccacttacatataaatctgaagacgaaaaaaaacacaaagaaaacttttgttttttattacattataattattcacatgagataagaaatataatggtccgagaaagggcctttaaaaagattattcttacagcgacaagtcatagctattggaatgtaatttggcttgcgagcttggtaatgtactgtgcatgctcctacacgtccatgtacgtatctgattcctccattcctatgtactaaaaataatacggaatatcacatatacatcatacatgtatatatccctcaaagagtcaagatttaatttaacaaaactttacacatctggtattttcaactataatttttttctaaagctagctctggttaaattttagccactctgcactttgcataaacttgtatacggtataccaagatatttgtctgagtgaattatttaattgcgataagttttaatcaaattggtggactaaaccggccaactagcttatgcgtttcttgttaaatctagcttttttcttgtcttatcagttgattagtacaatttcagaaattttctttatatttttagaaaagaaagtgtcattcgattactcaagttatatcacacagctccaaataaagaatgaatacatcaacctaaaatcaataaaatggtacagcttaaatcaaaaataaaataaaaccttctacattaatataatcgttattgacttattgttatactttaatcatttaaatttgcatattaaaccttttacatactaaatcaaaagaaaacccttagatatattccctcgcttgtttccctctaacaataaatttcaattacaaatttaggtgacatacttagagcatttccaaatctgtattttctctctaaaatatctttatttaggagttgagtttttttcttcctaaatctactatattttgaagttaaaaataaagatataaattgaaaatccaaatctccaaatagagatttctattatagagttggaaaggatatatatgggttagataaatgtttatttcaaactctattttgaagattaatatgaagacgaatattgtataactagcgttcgcttgaactcttggcaaaaactttttcacttatttaatttataaagtgttcatgatagatacgaagaaaataaaataaattgggataagaagcttaatgattgattgatgttaacccaacacccacgttgaagatatatatattataatcgatcgtgtgatgaaaaaaaaaagtaaataatacgaccaataaggcagtcacgcctattcctttgcgcattaactttctttttatccctctctttcagtaatcgtttgggatttggccattcattgattttgtttttgttttcggaaactgttgtatattgcaagtaaagagttatgtataacgacaaaatagaatttgcatatggaaaattagcgtagctatcaaattttaggataaacttttaacggttttatctcactcaaattaaaaattttaagcaaacaaaaaacttcatgcctacttcgaacgtctctattcatataaacaagcattttctacaaaggtaagtagattagtgaatccagaaaaaccaaaaccttaataactaaccaaccacctaaatgtttttctttttattccattttttccaagtaaatttttttagttttcgaaaatagatttcttttaacattcaaaattaaaaccaagcctgcgcctttaggatttaagcacacgatcagtatatttttgttttatgtaaaaacataatattattacgtttgtgtcaaacttaatacaaaatatttttgtgtcatcctccttcaagtcattccccattccatcgagttggtttcttattttacatgatgaccaagagatgtttttacaccgatcacaaatattttgtttatatatggtaaatctgtttttgtctcgttttgatttctgtatacagcagactcgtgttcttaaactggaacccaaatgttgtacttgtgccgaatgtgcgagaaaggtgaaacgagccatgctaaacgttgaaggtgattgattatgcatatatttactaccgtttctgatatatataattagcaatggtggatttatgattaggagtgcattccatcaaggttaatgcaaacgaagggacgatagaagtgaacactgatattaaccggcaaaagagccgagcttttgtgggaacctgaaccagagtctcctgatgacatttctatggcaactccgctcgccatgccatcaacttgccgacgtcaggtccatgtcagcacctttgaccagaccgtacacctacaggacttgcttgacaaaaacgctagtgggatcaaacacatgaaagattaccgacaagagggtcatcagtataacgtttaaggagtcacatgatgatcccaggggctaccactcacgggactcactatctccaatcgcaccaccgtcctctgaccctaagaatagcaatggcggtggtggttcaggtgcttgtggtaatgttgaggctcctgctactgctgcttaaccaccgcccaagattaacgatactccttgtaatggcaaagcagcagagcctcctgtcgctaatgtgaaatgcagcagcagatggaatagttgcggtttgatgtaaagtagagatctatttagtagtttaaccagtatcaaggaaactatattatagcaacttcttaaagaatgagttggtagaaattttcagattttctactacacacaattgtcacaaacaatcaatcatgcaaaagaatcatcactactaaaacacaaaataatcctatcttacccttgccgatcagcgtgctgtggtttgagagcagagtgagtcgggtgtcctcttctgccaagtctctttgttggctcggcatgcttcttttatgggccactcgatctggaagccgtctctgttctgcttttctaactgacaacagtgtgtgtgaaacgtctgaggatctacctgaagcttgaagtcaagggtaaacaacaactccatctccaatctgtttaactctctcgtagtcacacctcccactcttgcgtagtatgcattgttgaaatacctgcacaacaccagagatcaatgaatctatgattgaagacttatttgcgtgttgaatttgataccaggtttagtgagtaacatacctatcatcgaagactttagcagctaacatgacagttgtaatgataaggcggtggacattaaggggtttgagaagggctcgggtcttatggagaaagtgatcaatgtagatatgcgcaatgacgaagcaggagggactgcagcaagagtacttgaaaatgcgatccaagtagtgtgcaatactgatctcagggggagatctcccgtcaaacacggtaacagagtctggcgatccaagcagaatcttgtcatcatgattgagtaacagagatctctccagagaagaagagaggcgtgagagaacagtcggtggctttttcaatcgtttgccctcaataataagtcctaacctgaggtatacatccgaatcaatgaaagctggatcggttgcgagagagtccatttctccaacgaatctgcaatgaagatgatgatgtgcataaaaatggtaactttgaatagggttttgaaatagaagacgtatgtagagtaaatttcaagcaggtgaactaattcctaatcaagaacctaaaccctctctatatgtctccctacctaccaagtaccaagaatcttgagagtcaagaattaggaataaagtggaagaagcttacgagaataaagtggaagaagttggttcgtgaactagagaaggtccggagaatggaagaaagcagatctatctccggcgcttctccattgttttttttttgctgctctgaagcttagaagctaaaagaagccgcgaagaattgtgaagaagaaggaaagtttccattattgccttttattttattttatttaataatttaagggtttttgattttaaaatgaataataataataaatacaaaaaagaaaggacagaaggaaggagtgatgtgtggtagagagagacagttcaccgtcggcgagtccagctggcggtggtgggagcccaccgtgtcaccttaatcatcgctgcgctgccctgtcttttttccattattaatttttagcaagaagaagactgggctttctaaattagttattaatgggctttgggctttcgtggttagggttgtgtaggggcttaatcgtcatttcggagatagaataaaccctaatctccatggatgggctctccgatgtttgtctttttgatttttgaaatttgattttcaaaaataaactaaagcatcattgcctcccattatcgtcacgcacgcagatcaatgattctctcactctgcttctcattcacgcttcttctttgaattcacttttctattcctttctttttctccgtccgagagagtatagagagacccatttcttcgatccatccgctgagaaaaaaaaggtaccgtcgtattgttctctcatgtttctgggtttctttttgtttcgaaatatattcttctcgtttgcagtgtgattttgagggtttccttgtctaaaaaatgcagtttttaattaatggatttacaatagaaatgtagttagattcttcgacaccatcttcgttttcgattggatctacatgttatgctctctctttttccttggaatactatgtcagattgagtaatggttgtccttgtattgaattacagaagaaaaccaagcagtagtagaatggatcattcagcgaaaaccacacagaaccgtgttttgtcagtgaagatgtggccaccgagtaagagtacccgtctcatgcttgttgagcggatgaccaagaacattaccaccccttccatcttctccaggaagtacggtcttttgtctgttgaagaggctgagcaagacgccaagcgcattgaagatttggcctttgctactgccaacaaacacttccagaacgagcctgatggtgatggcacttctgctgttcacgtctatgctaaagaatccagcaagctcatgcttgatgtcatcaaacgtggtccacaggaagaatccgaggttgaggtgagcaaggatggtgatgtcttttttgatatatctggtgggagcagagcttttattgaagaagaggaggcacgcgaccttttgaggcctctggctgacccgcgtaactcctataccaaaatccgttttagcaacaggagttttgggtctgaagcagccaaatttgctgcgagcgttttgtcttccatcaaggatcagctgacggaagtggatctctcggattttgttgcaggaagaccagaggctgaagcgcttgaagtcatgaatatgttttcatctgctttagagggttctaagcttaggtatctgaatctctcggacaatgctttgggagaaaagggaattagggcatttgcttctctcatcaattctcagcatgacttggaggagctctatctgatgaatgatggcatttccgaggatgctgcacgtgcagttcgtgagcttctcccttctactgacaaaatcagggttcttcagtttcataacaacatgacaggagatgaaggagcaactgccattgcagagattgtcagggagtgtccatctttggaagatttccggtgttcatctacaaggattggttcagaaggtggtgttgcactagctgaagcacttgaacactgtagccacttgaagaaacttgatcttcgtgacaacatgtttggagtcgaaggtggaattgccctggccaagactttatcagtcttgactcatttaaccgagatctatatgagttacctgaacttggaggatgagggaacagaggcactttctgaagctctacttaagtccgccccttctcttgaagttctagaattggctggtaacgacattactgtaaaatccactggaaatttggcagcttgcatcgcctccaaacagtctcttgcaaagctgaatttatctgagaatgaactcaaagacgaagggactatcttaattgcaaaggcagttgaaggtcatgatcagttagttgaagttgacctgagcaccaacatgatcagaagagctggggcaagggccttggcacaaactgttgtgaagaaaaatactttcaagcttctgaacatcaatggaaacttcatatctgaggaaggtattgacgaggtaaatgacatgtttaaggactgtctggacaagcttgttcctttggacgacaatgaccctgaaggagaagattttgaagatgaagacgaagaggaggaaggcgaagatggcaatgaattggaatcaaagcttggaagtctgaaaatcaagcaaggggaggaatgatgtgatgcttttgttgctatgtaggtaggttcagtgttatctctctttctggattcggtaaacatagttaagtaggtatctaaggatctaagattgtcttcagatttatttccttgaagcgaaattgttatcttcgtgtaaaccagaattgttgttggtcttttggttatgaatatttaaatgatcttttagctgaaatcatgttcatctcatatgagccgtgggaaatgaaagagcacagtgtagcataagaagttacaaatgaagaacaaactttatggcgtatttgatcaagcggccactggagttttgagggcttcgagtatcttatcgtctaactcaaacttaatctctttcttgtctctgccaatcttcacatactcttcgaatctctccttgagatcttcaggcagattcgttttactctcccaccctaataagtccttagcggctcttggctctgcgtagaaatgctgcgaccatacaaagacaagtttgtaaagctactaatgaatgaagtaggagaagagcttctacagggtttcgtttaccatgtttctgaatagaaaagccttcttggcgtcaaccccaatggctttagggtcataatgaacgatctcaacagttttgccagcagcggcagcacagagcttggccataccgtcaagagtaacggctctgtcgctaacgcagttgaagatgttgccggaagcagcctctgggttggcaacggcagaagtaagcatggaagacaagtccctcacgtgggatatgttggttagctgcaatcctgatcctgggattggcactgctctgtccctcacaatccctgggaacacatttcaaccattacgtgtttttgtctttgtattgaaatctttgggtgtgtgagagacttacggtcgaagaaccattcttcgcagtctttgttgttgccagagccgatcatgtactgcggtcgaaaggaggcccagttcccgaatgtttcggctaagtacttctccaccaccacgtgaccagcgtcggctttaactgcgtcctgcaacattggagaagaaggagacataagtagtgagaatttagagatcagtattaagaatttataccccttcaacgtgaggaggttgttcggtggacttgtagatcccggcgctacttatgaacaagaattgcttgacgccggagcttttagcccaatccaccactggcctatgtccgaaaaatccaaaaggatataagatcatcatcaattctcatccatggagattctaaaagaaagaaaccatggctctctaagttaaataagcagacctaacagtatccaaatccttgccattgttgtcaaggacaacgtcaaatgtttcacctccgaccacattggcaacattggccgggttcccccacaccgtctttcctccgccgctaacaatttcctgtcgacagatacaaaggttcggtctgaatcggattcaaaaactcaaaacccgggtggaaatttgtaaatcttacggagaatcggttgaaaggaggtttcttcatcttttcggaagattcatcgccgacggtcaagatggtgacggcgtggccggcggagagaagctctttggcgaagtaaaacccgatcacggcgtgaccgccactgttggtgttgactataagtacattcttcttctcaccgacggagctggccttaacggtaaatttttgaggagataaccttcgagaagtcctcagagagaatgtcaagagagaagaagaagaagaagaagaagaagagagagaggaaaaggaggaagatgaagagggtagagagaagcggtggagagatggcgggatcaggagattgctgatcggagaagttgtcttggaagagaaaaacagagaggaggatgataaagccgccattttttgttggtaatgattacctcactctgttctgacttgtggtggtttgatcctcagagaaccagaagaattttgtaaggctcttgtacaagataacaacatccaacggtcgccttttatttatgtgatcttcgtttcactaccattttctagattggcccaaatttattaaaatgggcccatttatgctaatacatgagtctgttttttccccgtcgtttaatttaattctcatgaagatttggatttgtctacatctaatcctatttgtgtcttcttcataaagatctgtggttgatcccaaaaaaaggaaagaaatatgattttttttttcttgataaaatggtatatcatcaatgaaaaaaagaaacaaagaataagaaagattcctcgaagatgagaaaaaaatccaacccacacacataataattgtatctaaaaactccaaaattcaggtgtgacggagcggagatttgaagccatcaacgagggttacctttattctatacaaagcagatgaatcgctaaagaaaaacatcaagtgttttattactaagttttttttgggggcaaaaagcttcaagcattcttccttgcggaataagcacggtaagctgctaatccggcaaacccaacagctgtacccactgcaatttaatagtaaagctttggatgatttaatggttttgctcaagaaaaaaggaaatgcatagatcttgtgaagaagaagaaagaacctgagacaaatagaagtgagctattcacgagttggcggatattcctgcttcttcttcctgactctgtctctggaatgctcatgtgagggttctctgctgtactcacgattcttgagaagagactatttggctccccaagtttcatgcttaatgacacagggatgtctatccccaattccatgcaaacctgttgtcatccgataatagaatcatcaatcataccaagagcagcatctcatcaaatcatattaggcttaagtgatgcatttaccctatcagactcctgcactgacattggatatggatccaaatcatctttggccgcaaccagaagacaaggggtcccgtaacctctctcttctcccctccttgctacctccatcagtatttccctcgcctttctccatgagtatacgtccgaactggaaaacatcattttttcttgctaagtctgtcatcttattatccacacataccaggtgcaaataatttctgagctaacctgtcatagacaaccacagcaacatcacatgctgccaacgattccttgtttgtcagaaactttttaactctgtcctctggtatttcccgcaatatgagggttttcttagaaccctgaaaaatgcgtccaacaattaggaaaacaaaacaaaaaaaaccacataaaccatatccacatgtgacaaagaacataagagttcagacttttgctactaaccccaggctgatcaatgacatttgctgcatatcgttcacccattgttgccttatagctgtttgaaaatttcctggagttgaaacacagattataaaatataacacgagtagaccacagaaacaatcaaagcactgaagatgacacagaatatggatacttcgaaatgttaaaactagcataccttcctaagaaagaatcgaggagtgcagactttccagattttttagggccaaatacaaagcactgaaacacattcctttctgttcgctgtttcttacgatccactgatcttttcctagtaacagaaaatgttgaagctgggtcgtgaccataaccgatatatgtcaggtttgccaaactttttcgaggatctagaagtgtcattagagcccactgcatcaacacatataacagagcaaaattaacaatggtaaaaaatattgaatttgataagatcatgatgacaatgaaagcttgattctaattcagcgtcaacataacatcaagaatacaaacctcagacagaaacccattgattgtcaaacttccgcctggcgttttctctgcagcttctttataaggatcctcaagccaaggactgaaatcgtaaagcagattgtacgtgtaaagaaacatattccggaaataataaacgtattcatgtacaagagcattgaagaaattggcaagaaaattcaaaagaaagaaggttaactcactaaacaatcattggaagaacagatgataaccactgattacagaggaaagaatagcaatgaattaaaaaaaaaaaaaatcaccagcaaattacctatctggagctgtttgaaataaatcatctagctcagctggctgtaacgctccatcctaaatagtagcaaaacgaagagcattagagaactactactgctccttgaaggtgaaataagcttttaggtgatagagaacaacagaatcattgttggataattgaagaaacgatcatacacacattatcaaggtcatataactggaagattccactcagaaagtccatagcttcgtttgttagctcgatgctctgcaagtgaaatacaggaatagagtgcaaacattatttaaaagcaaccagccagtttctcatatcctttaataacataacaatttagagatattgtcgtagttaagtacactatctaaaacaacacacacctgatcaggagactgcttagctggaacgggtagtaactcagcatggagttctaaagaatcattgtaaccacatttccgtaggatagcccatgctgtctcagggcgacctctctcgatgaatagagagaaaagaaaaaggaaacccggaagtgtaagaccaaggtcagttactccatctggttgcctttcttgtaccactttcttaactcccataagttcaacagggtcaagtggggcaccaaaacaatttacctgttaaccaaatttgcagcatcatatttatagaaggattaggaatgcaataatcagtgtctagcagagaaagcgaacctggaaatcattcaactctgcgtcattaagggcaccatccaaatcatgatcacaaaggttgaatattctttgaactgccctgcggaggcggggtttcaaacattgtttttcttgatcaaacaagggaaatgttggatgaaggaccgcttttgatgcaaaatagaaaacatcagggacctgaaagaaaagaatccagatattttagtggcatacaataaggatcactctaggcatggttcagttttgcttggtctttcagcattatctgttctaaaggttcctagtatctatacggaacattttctctcttagccaaaagataatctttaaactgtagcagaagatatttcggtcagagaacaaaagcaagaagatacctgtataagggtcaatgcagaacactcaatgcaggtttctatctctcggtactccttcatgattggtgacataatatcctctagtctggcgggagatcgttcatcacgtaaatcaagcttgcagcccaccacaatcacaggtgctttgatctagatacattacatacatatataattataacttgaaaacatacttgtaggagaatgcgaagatacgatatttcagcaataaataaataagaaacctctaaacgccggagctcagggagccaataagaactcaagcgatcaagagttgaaggctgatcacaagcataagtgagaaggaccacatcagccttcctgaattcttcaatgagcttaatccgattgtcaatactaatagcagataaacatgacatatatcaggagatgagagaatcatgcgtacagattcacacaaggttttttttaacaagaaagaatatacagatatacagatagagaagagaaaagaagaaagaagaccttgagggagtatcgacgatggtgataggtatatagtcagggaaagcgtcggcagggagagtaatcggaggaaggacgcgagggacattatccgggaaagtctcggaggcgacggcagagatcaggctggatttaccggttcctttgtcgccagcgacggcgactctaaggcttgtacggcctccggcggaggactttccaccgagcatcatcggagagatttagagaggaaggaaattggcggttattgtttcggagatgagattgatcgatctaccaacgatgtaacttgccggccgaggatggatgctccatatatctaaccgggttgacccgacacgtgatccgcaaagctcttattattactgtagtatctctatcttcgccatcacggatttctcataattgggccttcctattttcagtttctagaacccaccacaagtgattatgtagctcagtagcttttcattctacgccgtcgtttttagttttagaattttaatagatgaatgacaattttccttaccatttttaaaaaaatcagttttctcattatgctaatatgatcttttattgccatttatctccatattttatattgatagattacacactggcttgtagatattgaggaacataaataattaagcagagcataaacaatggagctcaatttggcctgtgttactaaactggtaacttcatttaaacttccttcaacgactttgtttattctttgcgcttgggaattagccagccaaatttatgtttccttattattttttaaattttcgttttcttttcatctttcttgtggtcaataatttactttttattctttacacacaatattatttatatattttcttataattaccacataaattaaacaagtgccaatcagtatataacattctatagaaaatgatttactgttacaggttagaaacttttaataataagatcgaatattaaactgatacgaccaacaacaactaacacgaaatgactcataaaagaagaattttttttaatcaagatttatttattaccaacaaaacccaagacaaacaagaaaataaaaaccaattacatcgtatctctcattgattttattatccttgtcgggattttatttgaaaggggggataaattaaaaaaggacatcatcaaagcagtacgtaaaagtccgaacgatattacaaaaagaaacacaagatttgctaataaaatgagcttcaacacacgtgtctcccgcagaggctttgttaaattctcactcaccatattcaggcgcccgacgggggagggacggtggcatcgtcggaatcggatttgtccttggaggagctcagcttcttgaacaatggcttaaacacgagctctatcgccagccatcccaccgccaacactcccacaacaaccgtcgctgtctgtttcttgcctgttggtttctccaattttgggaaattgacttctcctcctgacttctccaccattgctgctgcttcttcttcttccttatttttcttcttcacttacacaccgtttgtcttcagactgaattatcttcaactactttaaaagaaactaaaaacagcgatacatttcaaaatatctcgactggtcacgttatagaccgtcgatggaataattgacggtcaaattttggtgagaacctttcctaaatttgggcctaatatgggctgaattgggtttcttactagaaaacaaatcttggtgtcgtgaataagacaagtttggatgattccttctaatatctaaatgaatctcaatcgaccaaggaagataagacgcaaatatagtggacctctcatcatgacacacacatcctttaattggattttgattaaaatattctattcattcatctccccaatatttttccagaaaaaaaaaagcaacgggggcctttctataaaatgagcaaaagaaagcccaaatagatcctgtccggaatagtaaaacgaggaaagcccaaacatagcatgtccggaagaatcgaggtcacgtgcaatacacgtgtcaattaaagcaggagttattgtcgctgaatcatatcaatggcgtgtgaagtgtttatcaatatgcctaggaagaagaaagagtgtaacaaacaaacaaaaaagttagtgaactactaaacaacactcacaccaaaaagacgacgatggtttcgtttcgcttccctttctcgttttctcagcccccgcgtgccaccacgtcattctccggattctccatttccgctgtcgctgtctccgtcaccgttggcgccgcagccgccggagctgcgatcgcggcgtcccggaatcccagccatccgattctagagtgggccttctcctctcaccgttcgtctctttcaccatggggatctataactctagcagacgaatccgttgtcgaacctaagaccggtttctcgtttcccgcttcaatcggagattcccggcgattactcggcgtcggcctgaggaagaagagcttactgggattgaagaacatcgatgtctacgccttcggtaactttttaatccatttccgaaactcatgttagttgaattgtccttgtccgtcataagcttgcaaattgtcggattggttggtctttaattggaattggtgaatagatttttagttgtcggaagtctaagtaacagatctcactttttgtcattacgaagtgctatcaacagtttacggcattaaaggataggactggagtgaaaaagtagttggttttgatattttagcaatagaaaaaagttatgctttggaaccattcaattgattgattcagcttttctggcattggccaggcgtgtatgctgattgtgatgatgtgaagaaacttgtgggagacaagtacgcaaatcttccagcttcagagatcaggggaaacaagtcattcatggatgatctcatggaagccgatattaagatgacgataaggctacagattgtctacggcaaactcaacatccgatccgtgcgtaatgctttccaagagtctgttggaaacagactcaagaagttcggtggctcagacaatgacgagttgcttcaaaggtactcacttacatttcagcttcggcttgatcgttggacttcacatctgattctgtatttggctgcttaataagtttactttgatatcacttgcagcttcactagcctcttcaaagatgagtataagattccaagaaactccaccattgatttgacaaaagatccgggccatgtactcagcgttgcaagtaagattctacctatctttcacctttctggattaaattgtttccgatagattcttaaactcttccttatcttttattattgtcagttgaggggaaccatgtcgggagtgtgaagagccatctcttgtgtagatcaatcttagacttgtacattggtgaagaaccgtttgataagaatgcaagagaagattttctagacaatgcagcttctctagccttcgacaactagttcacaacaaaatgttgctttctttctttcttaacggattctctatatatacggcataatgttgaggaatgtatttgaaataaattgcttggggaattgggttttgttagtctaaatatctacactagagtctaccagaccaatcataatgatagaacaatcgaccccataacataaaacaatttagataccgatccaaagcgttcactccctagagaagaggtactttcactaaccattagggtattacctcatctaggaatagcctaaattcgaagctagacactgcaaaaatggtggcttcatacgtctgcttcgatggaactagtacttaagctcggacagatgaccagggcacgaagttataatcggtggcacggtccttccacaaacgggagagtttttttgggtcgacccggaagctggattctctgtgtgttcctgtgacaaaggaacaggtgataatagcaaggctttgctattgctgaccttagagttcgctggtttgccatgtgaagcagacccagtgactgaaggagaagagccaccagatctcccctgtttcccctgagaaggctgcggatttgttggtgctgcaaaagaaatctgtgtctgtccgtgtgttctgatctgctgctgcgactggaactgcttgaggtttaaggaagtacacgacgtgagtgatgatgaggttgcagggtttttccactgggatgacgtggcagaaacagagtcagcctgcgaatgagtcatcatcattttactccgaccagattgctgctgcctctgcgtgagatgctgcgtaaacactgaagggtctccgtttattgctgttgctgcaggaggaggccaagtaccagaaacaaagttgagggttctcgatggattgtcaaaaaccagcgtatgtccattcatcatcccttgaggcttcccttgaagattctttttcgggtcttcggcattgcttgaacagcttccacctccagtctttgcctcacttgattgatggtttttctggtgagcaacaccaggaggtgtagagatgtgatagccattggaggaaaaattcagagttgcagggggagcactgctggcgatagacgcaaacgacatggaaaagttttgtggctgaacaggggctgccatgatctggccaaatgggcctcctttctgagtgtggctaccccttgaatcagtgttaactccagctacctcaaacttttgtgacatttgacggtgttgctgaacattagcttggcttgaaagactattcacactaacttgcggttgcctgtgggaagatgaggaacagcttgatgcctttgactccctctgggcttgactctgtctctgcagaggctgaggaggttgttggaacatctgaggcgagtaaaaagacccattgtagaaaggcaccgcctggcttggagtcccacctctgatggttgatgacagttgaaaggaatatgcattgtttggaataactgttaagtatggagaagaaacttcgctggctgatgaacttggatggctgaagttagcagatgctaaaccaacagccaaatgggggctcttggttgggcgagatgatttagaaggtaccatgactggttgcaaatggtggtttgcggggtagataaaagctggagcaggctgtgttaagagagaaagatgattttattcaggagagcagttttgcagtttcaataaaaatctaatgcgataaacacaaattcatgataagataaaaagccaacgaagtacataccactacactaattgatgcagggggtggttgaggtttattctgtctggttgaggcaaaatgaccactttcagaggctttaacattaggcgcagaaatattatctccgtttctaacgtgtggttgggagtttaaactgagaataggagagcttccatgcaaggatgggtttccagcggttggcctcaagtcaccacctttcagataaacagaacctttgtttggtgtagggagatggtttgttttgaggaaatgctgatgtagctgaatgttccgagctatgaaaaagtgtgtggcacaccttttaggcctaggctgagaggcagaaattggagcaccctgaatttgttaacaaatcatggtcctaaccagtagaagaaacaatgatcatcatattgaagaacaaatgtaattagaacagaatatacctgcactaatttagaagatccattgctttcatccacaggtttaccggtctggatcagggctacatgtctgccaatgttttttccttttagggtctgaccattaagctgtaagcacaagataacctaagagagattagggctttcagaactcacccctgaggaggaaccccgctaggccagctggctacagctactggcaaaggtaagactgaactgtgcggagctgagaatgatgtagacataggtcagacaaggtaaatctgtgtatcctagaaaaatcatcaacttaaacaaccagaacttggttggtattcataatcatattaccagatttagcctgctgaggttggctccaatccaaattctgtaatcttaaattagagtctctgtcggtctcttgattcggcccctctatatcaagattcagccagtaacgtttatcaaccttcttttgtttgacttcttctggattcatctcattcttgacagtaatcttctctttgctctttagagcactatctcgctgcataaagcaagacagaaacagtcttagaaaaccaaataggggcatcctaaacaaagcaagctatttaaatcaacacttgccttgcaataatcagaaacgagtgggagaagagaaactctccctgaagaggaaggcaatgttggaggaacctaatgacaggacaaggatctttactacattagcagcattcacactgtttattgctaaaatctagaagggacagatttctcaccatgagatgaatatcgagcttactaatacaatgactctcatctttgttgttttccaattgtggaccctctgataccctggagacccaaaaatagaaaaacagatatcagattcccaaacacagaatatatctaattgttgatctatttacccttttggcacctccgaaacttgccttggttctttctcatccacaatatctgaggcgactactaacgaagttttagctccgttggtcgatttatcaatgttggctgagtcgaatctcgctttacaagtgaataaaccgcaaatctctacacctgcaggtaactgcttaatacctttaacctccgatgatttttgagaattctccgaatcgtctcctctctttgagctatgaggctgctttttcaatccggagagaacctctgctatttcgatctccaagtcgtcctcaaccgtgccggaggatttcggtggtttgggtatccgggatttggatccgtttacaatctgggcaaatcggaacaaaatgatattagacggaaatcatttctatgttgatgatgaagaagtgaatggacccacctttctctctttgacggaaagagttgaagaagacggtgaaacgacttcgcagctatggcttcccgacgaagtccggcagtcatgcgacctctttaaacatgctgcaaccgccagaaacagaataatccggtgataaagagatctcgaaaatgcgagttataaaacagaaagaatcaactgaactcaaacctgagcgagcctttctcgggacaggtacgccgatcatttcatcggcgaccatcaaagacgccgcatgcctggggattcgacccgacgagaagctcttcctctgatgataatcgtcgtctccttgactctcatccgagctatcttcttccacatctctctcgttcctcggcgcgaacctctcgcttcttctcctcttactccgattgaacgattccggatctcgctctttcttccccggtcgatctctcaccgtcgccacctcctgatgcatctgctcacgactgttttctgaaacccatgaacataacaaaaactcgtcagaaaatagaaactaatcaaggaagaagaaaaagaaaaggagaaggaagcaatacctgagattctctgcctccgtttagtaactccgtttgatgcagccatgtttgtcgttgatcttcgagcttccctgggtttatccattaatgcaagctagaaagactaagctcccatcaactgagtaaaatcagattccactccttcaaagttttgaagctt

SEQ ID NO: 1382 - DNA, 75106 bp, Arabidopsis thaliana
gaattcttcaatgagcttaatccgattgtcaatactaatagcagataaacatgacatatatcaggagatgagagaatcatgcgtacagattcacacaaggttttttttaacaagaaagaatatacagatatacagatagagaagagaaaagaagaaagaagaccttgagggagtatcgacgatggtgataggtatatagtcagggaaagcgtcggcagggagagtaatcggaggaaggacgcgagggacattatccgggaaagtctcggaggcgacggcagagatcaggctggatttaccggttcctttgtcgccagcgacggcgactctaaggcttgtacggcctccggcggaggactttccaccgagcatcatcggagagatttagagaggaaggaaattggcggttattgtttcggagatgagattgatcgatctaccaacgatgtaacttgccggccgaggatggatgctccatatatctaaccgggttgacccgacacgtgatccgcaaagctcttattattactgtagtatctctatcttcgccatcacggatttctcataattgggccttcctattttcagtttctagaacccaccacaagtgattatgtagctcagtagcttttcattctacgccgtcgtttttagttttagaattttaatagatgaatgacaattttccttaccatttttaaaaaaatcagttttctcattatgctaatatgatcttttattgccatttatctccatattttatattgatagattacacactggcttgtagatattgaggaacataaataattaagcagagcataaacaatggagctcaatttggcctgtgttactaaactggtaacttcatttaaacttccttcaacgactttgtttattctttgcgcttgggaattagccagccaaatttatgtttccttattattttttaaattttcgttttcttttcatctttcttgtggtcaataatttactttttattctttacacacaatattatttatatattttcttataattaccacataaattaaacaagtgccaatcagtatataacattctatagaaaatgatttactgttacaggttagaaacttttaataataagatcgaatattaaactgatacgaccaacaacaactaacacgaaatgactcataaaagaagaattttttttaatcaagatttatttattaccaacaaaacccaagacaaacaagaaaataaaaaccaattacatcgtatctctcattgattttattatccttgtcgggattttatttgaaaggggggataaattaaaaaaggacatcatcaaagcagtacgtaaaagtccgaacgatattacaaaaagaaacacaagatttgctaataaaatgagcttcaacacacgtgtctcccgcagaggctttgttaaattctcactcaccatattcaggcgcccgacgggggagggacggtggcatcgtcggaatcggatttgtccttggaggagctcagcttcttgaacaatggcttaaacacgagctctatcgccagccatcccaccgccaacactcccacaacaaccgtcgctgtctgtttcttgcctgttggtttctccaattttgggaaattgacttctcctcctgacttctccaccattgctgctgcttcttcttcttccttatttttcttcttcacttacacaccgtttgtcttcagactgaattatcttcaactactttaaaagaaactaaaaacagcgatacatttcaaaatatctcgactggtcacgttatagaccgtcgatggaataattgacggtcaaattttggtgagaacctttcctaaatttgggcctaatatgggctgaattgggtttcttactagaaaacaaatcttggtgtcgtgaataagacaagtttggatgattccttctaatatctaaatgaatctcaatcgaccaaggaagataagacgcaaatatagtggacctctcatcatgacacacacatcctttaattggattttgattaaaatattctattcattcatctccccaatatttttccagaaaaaaaaaagcaacgggggcctttctataaaatgagcaaaagaaagcccaaatagatcctgtccggaatagtaaaacgaggaaagcccaaacatagcatgtccggaagaatcgaggtcacgtgcaatacacgtgtcaattaaagcaggagttattgtcgctgaatcatatcaatggcgtgtgaagtgtttatcaatatgcctaggaagaagaaagagtgtaacaaacaaacaaaaaagttagtgaactactaaacaacactcacaccaaaaagacgacgatggtttcgtttcgcttccctttctcgttttctcagcccccgcgtgccaccacgtcattctccggattctccatttccgctgtcgctgtctccgtcaccgttggcgccgcagccgccggagctgcgatcgcggcgtcccggaatcccagccatccgattctagagtgggccttctcctctcaccgttcgtctctttcaccatggggatctataactctagcagacgaatccgttgtcgaacctaagaccggtttctcgtttcccgcttcaatcggagattcccggcgattactcggcgtcggcctgaggaagaagagcttactgggattgaagaacatcgatgtctacgccttcggtaactttttaatccatttccgaaactcatgttagttgaattgtccttgtccgtcataagcttgcaaattgtcggattggttggtctttaattggaattggtgaatagatttttagttgtcggaagtctaagtaacagatctcactttttgtcattacgaagtgctatcaacagtttacggcattaaaggataggactggagtgaaaaagtagttggttttgatattttagcaatagaaaaaagttatgctttggaaccattcaattgattgattcagcttttctggcattggccaggcgtgtatgctgattgtgatgatgtgaagaaacttgtgggagacaagtacgcaaatcttccagcttcagagatcaggggaaacaagtcattcatggatgatctcatggaagccgatattaagatgacgataaggctacagattgtctacggcaaactcaacatccgatccgtgcgtaatgctttccaagagtctgttggaaacagactcaagaagttcggtggctcagacaatgacgagttgcttcaaaggtactcacttacatttcagcttcggcttgatcgttggacttcacatctgattctgtatttggctgcttaataagtttactttgatatcacttgcagcttcactagcctcttcaaagatgagtataagattccaagaaactccaccattgatttgacaaaagatccgggccatgtactcagcgttgcaagtaagattctacctatctttcacctttctggattaaattgtttccgatagattcttaaactcttccttatcttttattattgtcagttgaggggaaccatgtcgggagtgtgaagagccatctcttgtgtagatcaatcttagacttgtacattggtgaagaaccgtttgataagaatgcaagagaagattttctagacaatgcagcttctctagccttcgacaactagttcacaacaaaatgttgctttctttctttcttaacggattctctatatatacggcataatgttgaggaatgtatttgaaataaattgcttggggaattgggttttgttagtctaaatatctacactagagtctaccagaccaatcataatgatagaacaatcgaccccataacataaaacaatttagataccgatccaaagcgttcactccctagagaagaggtactttcactaaccattagggtattacctcatctaggaatagcctaaattcgaagctagacactgcaaaaatggtggcttcatacgtctgcttcgatggaactagtacttaagctcggacagatgaccagggcacgaagttataatcggtggcacggtccttccacaaacgggagagtttttttgggtcgacccggaagctggattctctgtgtgttcctgtgacaaaggaacaggtgataatagcaaggctttgctattgctgaccttagagttcgctggtttgccatgtgaagcagacccagtgactgaaggagaagagccaccagatctcccctgtttcccctgagaaggctgcggatttgttggtgctgcaaaagaaatctgtgtctgtccgtgtgttctgatctgctgctgcgactggaactgcttgaggtttaaggaagtacacgacgtgagtgatgatgaggttgcagggtttttccactgggatgacgtggcagaaacagagtcagcctgcgaatgagtcatcatcattttactccgaccagattgctgctgcctctgcgtgagatgctgcgtaaacactgaagggtctccgtttattgctgttgctgcaggaggaggccaagtaccagaaacaaagttgagggttctcgatggattgtcaaaaaccagcgtatgtccattcatcatcccttgaggcttcccttgaagattctttttcgggtcttcggcattgcttgaacagcttccacctccagtctttgcctcacttgattgatggtttttctggtgagcaacaccaggaggtgtagagatgtgatagccattggaggaaaaattcagagttgcagggggagcactgctggcgatagacgcaaacgacatggaaaagttttgtggctgaacaggggctgccatgatctggccaaatgggcctcctttctgagtgtggctaccccttgaatcagtgttaactccagctacctcaaacttttgtgacatttgacggtgttgctgaacattagcttggcttgaaagactattcacactaacttgcggttgcctgtgggaagatgaggaacagcttgatgcctttgactccctctgggcttgactctgtctctgcagaggctgaggaggttgttggaacatctgaggcgagtaaaaagacccattgtagaaaggcaccgcctggcttggagtcccacctctgatggttgatgacagttgaaaggaatatgcattgtttggaataactgttaagtatggagaagaaacttcgctggctgatgaacttggatggctgaagttagcagatgctaaaccaacagccaaatgggggctcttggttgggcgagatgatttagaaggtaccatgactggttgcaaatggtggtttgcggggtagataaaagctggagcaggctgtgttaagagagaaagatgattttattcaggagagcagttttgcagtttcaataaaaatctaatgcgataaacacaaattcatgataagataaaaagccaacgaagtacataccactacactaattgatgcagggggtggttgaggtttattctgtctggttgaggcaaaatgaccactttcagaggctttaacattaggcgcagaaatattatctccgtttctaacgtgtggttgggagtttaaactgagaataggagagcttccatgcaaggatgggtttccagcggttggcctcaagtcaccacctttcagataaacagaacctttgtttggtgtagggagatggtttgttttgaggaaatgctgatgtagctgaatgttccgagctatgaaaaagtgtgtggcacaccttttaggcctaggctgagaggcagaaattggagcaccctgaatttgttaacaaatcatggtcctaaccagtagaagaaacaatgatcatcatattgaagaacaaatgtaattagaacagaatatacctgcactaatttagaagatccattgctttcatccacaggtttaccggtctggatcagggctacatgtctgccaatgttttttccttttagggtctgaccattaagctgtaagcacaagataacctaagagagattagggctttcagaactcacccctgaggaggaaccccgctaggccagctggctacagctactggcaaaggtaagactgaactgtgcggagctgagaatgatgtagacataggtcagacaaggtaaatctgtgtatcctagaaaaatcatcaacttaaacaaccagaacttggttggtattcataatcatattaccagatttagcctgctgaggttggctccaatccaaattctgtaatcttaaattagagtctctgtcggtctcttgattcggcccctctatatcaagattcagccagtaacgtttatcaaccttcttttgtttgacttcttctggattcatctcattcttgacagtaatcttctctttgctctttagagcactatctcgctgcataaagcaagacagaaacagtcttagaaaaccaaataggggcatcctaaacaaagcaagctatttaaatcaacacttgccttgcaataatcagaaacgagtgggagaagagaaactctccctgaagaggaaggcaatgttggaggaacctaatgacaggacaaggatctttactacattagcagcattcacactgtttattgctaaaatctagaagggacagatttctcaccatgagatgaatatcgagcttactaatacaatgactctcatctttgttgttttccaattgtggaccctctgataccctggagacccaaaaatagaaaaacagatatcagattcccaaacacagaatatatctaattgttgatctatttacccttttggcacctccgaaacttgccttggttctttctcatccacaatatctgaggcgactactaacgaagttttagctccgttggtcgatttatcaatgttggctgagtcgaatctcgctttacaagtgaataaaccgcaaatctctacacctgcaggtaactgcttaatacctttaacctccgatgatttttgagaattctccgaatcgtctcctctctttgagctatgaggctgctttttcaatccggagagaacctctgctatttcgatctccaagtcgtcctcaaccgtgccggaggatttcggtggtttgggtatccgggatttggatccgtttacaatctgggcaaatcggaacaaaatgatattagacggaaatcatttctatgttgatgatgaagaagtgaatggacccacctttctctctttgacggaaagagttgaagaagacggtgaaacgacttcgcagctatggcttcccgacgaagtccggcagtcatgcgacctctttaaacatgctgcaaccgccagaaacagaataatccggtgataaagagatctcgaaaatgcgagttataaaacagaaagaatcaactgaactcaaacctgagcgagcctttctcgggacaggtacgccgatcatttcatcggcgaccatcaaagacgccgcatgcctggggattcgacccgacgagaagctcttcctctgatgataatcgtcgtctccttgactctcatccgagctatcttcttccacatctctctcgttcctcggcgcgaacctctcgcttcttctcctcttactccgattgaacgattccggatctcgctctttcttccccggtcgatctctcaccgtcgccacctcctgatgcatctgctcacgactgttttctgaaacccatgaacataacaaaaactcgtcagaaaatagaaactaatcaaggaagaagaaaaagaaaaggagaaggaagcaatacctgagattctctgcctccgtttagtaactccgtttgatgcagccatgtttgtcgttgatcttcgagcttccctgggtttatccattaatgcaagctagaaagactaagctcccatcaactgagtaaaatcagattccactccttcaaagttttgaagcttccttctctgtatttcagtttcagagctctcgtcgtctccttctcctcaaatgttttgtgcacagaaaaaacctacccctggaaaaaaggatgtaagagagacgacggttcaagatcttcaaatgaccagaatgtcttaatgttagccgttggatcttaccgtgatttggacggctgcgatctcgaaatgccagcatggcagaaacgtcactttcttatggaataaagccactgctcaatgtttagtcacatatattattattatctgtttccctttttttaatatcacatactataattattatcttattcatatattctatgactacattttttttaatacaagtctatcatatataataattattgatttcttgtgcccacccaaaaacatatgaatataatatgttcattgctgtatttttaatattatttcactccatgaccgtatgaacaaatctaatatataaaaaaagagtgcacattttaaaagaacaattttttgtaattttatatgaatgttagcaagttgtactactaaccacgcgcggtctatatgcgtgggaacgacacccacgtaccattgtcactgaaaattttgggactgcttattttacagtgtctttttataactgatatgcaatttgaaaacaactgcactcaaatttatataaaaacaaaaataaagctgatttacaacgatattattgtcaaaacatgttattaaatactagtaaacaaaaaatttggaagagtgatcatttagtaaaagtacaaattatgttagtatatttggatgactaacttgtcactgcgccacgggcacacggcgagtatagagaatacgtacactcgcgaggctcactcttttcaccattcatagtgccacgtgtcgaataagctacagatccacggtgattcgctctctcatgggatcatggctcatcatcatcagattaccgttgggcacaccaatataacgtcatgaactacttaaccatttttcttattttgtattccacttttgtgtatgactgggttcaaacgacttaaaatcctatcaaagcgagctttaacttaaattatgtaccaagattaaactattttataaaaaatatgaatgaataaaataattgacgaagataatgcgaatgaaacaaacatatcaagattaactaaaatattcgactagtgactaaagctacatgatggtatatgtatatatcaactagtatgagttaatttatctttgaagtgttgactgacgaacggtgttttatgcagttaaatgaagggagaaccaaagtaagtacaataatcttcatagactatttttaaagtgcttttataatgtttttgaccctatcctatattatataaacacaaatcaataaataaataaaaaccttattgtaatgaaactttgaagcacaaattaacgaaagtttagttggagttccgatgtaaggaatccaacatctcagccacttgtcatatagtactagaatagtcagtagtatatcgatgcttttttgtataaagattaccagtataataattagtgacataaaatgttttcttattgtgactagacaaattaaaatatactctcccatgaagcctactaattaaaataatcatcatgggttaaccctcggtttatgggatcacttaattaataataataacaacactttagaatattagtagagactaaatatctatatggagtattaaataacacaccactattgaatattgatgcatgcatgtcttacaagttacaagttacaagtaacaaccacgaataaactaattgtcattttgggactttttagtttttaaatcgagatccgcatccgtttgctatatagataaaacgtgaaattgtcacatttttttctcaatttgaaagatttggaaggataagttgaatgaagtagcgatttatgtttagaaaattaaacctgtatgaagtaatagcgttttaaagatgaaaaaaatagaatttttatcattataaaatttttgtaggttcagagaagtcaaattcgccagctacggagggaaaaacgtgtactatacagtttaatagacaattaaaataattcgatgatttgtatttttaatcaattttaacccactgatcccaactttcgatgctttgcaaacatagacaaacatattttgggtttgacggatttctcaatgcggcgaggtgtgattataataagataaacgcatttgaagtggctccaataacctattttatcagattataatacaaagaatatcttaatctaatattgtaatacgtacttttaaattttcagttccaaacacaataagccaaaaataagatttgataattggggtgatgaaccaaaattaacaagagttttgctgtacaaagagggatcctttaataaaagaaacaaaatatcagaggcttcttctaaaaattttgcaaccgaaaatttaaacaaagttgctctcaattcccaaaagacatgcttgtaccccaaggaaacatcagggcaaatagtaaaagaaacgaaggcattggaaattgcgggattttaccagattgttgaattacgtctcctcccctaacaaccattatggtcacaccttcatcaattcctgtggattcatatatgtgtgtagtaattaatggctaatcaatccacaagatggatcagatacaaaagtagactagaaacattgacacaaaactgttaccttttctttctgtttgtagagctcctctatcttcttcatgtatacatcaattagtttctgtcattaccaatcaaatcaaagtttagtcagccacacttaaccatcaaataattctctctctcgcttttttgtcgtatcaacaaaccaactcctgtgtggtttggtttacctgcaaatcacttgacaaatccttcacgttgtcttctgacagcttcttctcctgcaaaaatgaagcttcgacttttaacgaataagatcacaaggaatggccaacaagaaaaaaataaaactaaaatagggttggcaccttctcgagtttatcataagatttcaaggcatctctcctaatgttcctcagtgcaacctataagaatccaaatacgaaaaaagaagggctgaaataaaggaacatgaagttttagcacatccttatgcaccctaaaagtaacaaacttttgtggaaaatcccaaatacttttaagtcacactataggcaaacactactactgaccttcccttcttcagactgtttagcaacaacctttgatagttcctgcagtggtacaattaaaaggtaatacggcagtttagaaaatgcacattgcaaaaaaaatcaactgacagagattatatgccaggaagagatacctttcttctgtcagatgtgaggggaggcaaggacagtcgaataacatctccatcgttattaggggtcacaccaagatcagaattcacaatggctttctctatagccttcaagctgaaagcattggaatgtatcatgaaccgagcaagagaaagcagacatgaaaactcttgtacagaaaaccattagcgcaccattggtcatgtacctggatttgtcatatggttgcagcaaaagagaacttccatccggagtactgatttgggctatgcttttcaaacttactggacttccatagtattccacctgagaacccaaaagatcaaaacatcaacaagttatacatatgaaaccatatttggtagctgtatatcttaatacctcaatcttgtcaagcatcgctgcattggatctcccagtccttatggagttgaaactcgtccgaagcgtttcaatagtcttctccatctttgatttctggattgcacaaaccaaaaaacaagaatcacatccaaatcgtttccactaaacagtaaccaaaaaagatataaagaacgtacaacatcagtctcaatagcagacttctctgcttctatttcttcaatagtagcagaccttatcaccaatctgtggaattttccaaacaaagaacatccggattagagacattcagcaaaccctaaaactcccaaatcatgagtggaacctgcctcttctgtagagagcgcttgacaacggggccaccggagagattgacgccggcaccgagcggaagcttgtctgtcttgaacgaacacgcaattaagcgtgtagagggagatatcgccgaagagattatcctcaaacacgaatctatccaagggtattaaagcaacaacgatttggagccaaatggattatagaggacagtgaagaaacaaaattcgaacctgggagagagaggagaggcttggagtagttggctctgaatcgaagaaccggtgtcgtgggagcagtggaagagaaagaagccgccatggcagtagccgtagaagtgaagtgactagactagaaaagacctttcgttggttcgtctacgaaaattgaaagggagggagacgaagcagaccgaattgttcgggataagaaggaaagcttgctctgtttggatggacagctaactataatcccttcagatatatcttttctgtgggccttaatgggccgtaatatcccatttgctatttacatggtagcccatattgaaatgggtttgagccaacaaaatttgtattgggtcgaagaaggtacggtgatcaatggtctgatttgtaccagaagaaaagtaaaactaaaaggtttaaattctaacatatttatgtcatggtccaaatcaaagggtaaattgtcaaagggtattcaaaaatatatattaaatgaaatggtgcattgatatcatcattcataaactatttatatacttttgccggttcgtcgtcgattccacgtccttcatttatgatggataggagatatataaagaagagttaattagcattaaataaaaagatactagtagattagtaagaagaggcaacaatgtgattagcgggagccgagccggtaaggcagccgaggttcgcgcttactccttgaccttcatactgacatgcctactcacacgtgcgagaacagtcctaccaccccatcaatgtttttttgtttagtaaaattctgattatactttgattttttttcctgtcaagtatactttgatttatgttcttttaattcgtgaattacttatatttatgtgtctagcaatagtttaaggcttttaaaaatagattaattatacatgtataatatacaagtttgggaaaaaaaataagaaaactatctcgtgtcgcattttttgtttagtagaacatataattttttttatcaagcaacaaatattagctgcccaaacaaaagaaaaaaatatgtcaaaaaaaaaggattattcacatcggctaattaaaaaataaaaattgacttgacgagatttagttatttgtgagataataatttgttaccaaaaattatagtatgccctttttcaatttgtgttaattatatttgtaattttcttcagagaaattacaccatttaaaagaagaagaaaaaacaaatactaatatcattgtaaaatatgtaaacgatgggaaataaatagaaaaagaaaacaaaacagtgcatcgtcgtcagtgggagtatataactaccaccacccactcaccattccggaattatctctgaatcactcataaaccctttcttcttccttgttcaaatccactcactcttggagagagacgactcaaacgcatagtctctcctctgtatttactcgttatcgtcactgtgagagagagagagagagcgcgcgcattcccccaattaaagcctctctgctccaaaccgtgatatactctttacgttgtttgtttttgcctttatccttccctagttgtgtataattttgttcttttcttatggagatggatctcagcaaggttactcttgacattttcacaaagcttgaacagaaatggctctctcactgcgactcctcccggaagactcgtatccttagcatcgacggtggcggtaccactggcattgtcgccgctgcttctattctccacctcgagcaccagatccgccttcaaaccggcgaccctcacgctcacatctctgatttcttcgacattgtcgccggaactggcatcggaggcattctcgccgccctccttgtcgccgacgacggctccggcaggccgatgttcactgccagagacgcggttaagtttgtcgcggagaagaactcggagctcttcgagatcaggtacaccggagttttcaggaggaacaagagatactcggggaagagcatggagagggttttggagacggcgtttaggagagaggacggtaaggtgttgacgatgaaggacacgtgtaagcctctccttgttccttgctacgacctcaaaacctctgctcctttcgttttctcacgcgccggcgcgtctgagtctccgagcttcgacttcgagctgtggaaagtctgccgtgccacgtcagcaacaccaagcctcttcaagccgttcagtgtagtgtcggtggacgggaaaacctcatgctcagccgtagacggcggtttggtgatgaacaatccaacagcagctgccgtcacgcacgtgctacacaacaaacgagatttcccgtcagtaaacggcgtagatgacttgcttgtactgtcgttgggaaacggtccgtcgaccatgtcatcatcaccagggaggaaactccgtcgtaacggagactattcaacgtcaagtgtggtggacatagtggttgacggcgtttccgataccgtcgatcagatgctggggaacgctttctgctggaaccgtactgattacgttagaatccaggtacgtattctcaacttttctcgtcaccacagagatcaccgatcaaaatgtctcgaatatattaaaatgtggtggatgcatgcaggcgaacggtttgacgagcggcggagcggaggagttgctgaaagagagaggtgtggaaacggcgccgtttggggtaaaacggatactaacggagagtaacggagaaagaatagagggtttcgtgcaacgtcttgttgcgtcaggaaagtcaagtctacctccaagtccttgcaaggaatctgccgttaaccctctcgctgacggccgttaagtttcctttattattataaccctccccgtccgtgatgtaagaagtttgtaaccaaacccctgggttaattttttaaccccagccagcatcttcgagttaattaattagcctttctttttttctaatgactttagttgaggaattaataatggttaatgaatgatagtctttacttatttatcactgacttgctagctagcagcttctctaaccattttttttaatactagtactgtatttgctattcccttggatcaaggcccgatgattctgtcaaaactgttttccccaaatgacttttatatgctcttccaacccaaaaaaatacaagtaaatgagaacaaaaactcaattcagagcaatgaatatatatacacaattagaaaatctccaattaaagagataggcattgctttagaactttgttatattgaaggaatcattgatgggaaggaagaagtaaagcattaaaaataaacagatattctttccttagatagccagcacagagtgttccaaatctagaacttgtcattttcaagcaattacattgacacacaaatgtacatattcaatatatatcaaaaatacagctcgaaaatgtgagattcatatatataaggagagtgggacacaagtctaataaacacatccatcgccttttctattcttttttccatattttactgtttcaatacctaattggactgtcgttgtaactaacttttactatttacccttctttcttatagcccatcaaaacatccattattatattttttgtctaaattgactccaaggcaacaacaacaaaaactccatttttatgtgtttaagtaaaccatccatgatccacctataactttttcggaggttttatatttcttttctaatgtcatcatattcagttattatagattattcacttttttagctttaattcaactgatatgttgttactattcattagaaagctaacacattacacataaaccttactactataattttctagatttatcttgcatcaatatttttactgattaataaccataggtccatcattatcaacatacatatttgtgtgagtgttgaaatctcggcaagttataagaaccccgagatgcctaaataacaacaaaatatcggaaattgtttgacagacatttctgatggcataaatatttgatgtcgtatacgctgccaaacttaaataattgctttcttcaattaatatgggaaataaaaaataaacaatattcagcataaaacaacaagaaaccttcccttcgtccaacggaattattgatgttcaatgcattcccccactatctatacatataatttttttattttgttgtgtgttctttcgtcaacaaaacataataagcaaaattaaatagaagaagaatttcttctttcttaaaacttttaaatcaatggaactgagttactgatgtataaatattgatgatgtcgtatctaactccaaaccacaaatcttaggaatgttttgtttgccgtatagtgtataattttgtcggtcgtttgattcgagaataattttattaaatttatttatttgttatcatatttaagaaacaagtcaagtactatttgatatttgatttcagaatctgtaaatatgattgacagaaagaaagaaaaagaatatgtacgtattaattaaacactcaatttttgtaaggcagatacaatgaattaacaaggatgcgacaaaacaattttattttattttcagaaatatgcaacaaacaacgatattcatttgacaatagtttaaactacgaaaattacgagagttattaaaattatatatatacttcgattcaatcttttgttttgttttttcagtcttttgtttttgttcatcccttcgattctatttttgttgccaaagcatatacatatatgcatattatatgatgaagcatgtctctttcgtaaatacatgcctttgtgtggcttttttttttgtttcttaagagaacaaatttgtatcccaacattgcttaagagaccaatttatataagaacttttaatttttatgatgttttttatataaaaaaaagatgttaaaatttcattgttgtttcttcgttttttatattttcaaaatcttttggtatatgtctaaacttgtttgtttttattcctataattatttagatgtagtcatattatttaattatgtcgtcaaatttgcataaaagatatctttcagtagaccacaactaaaatttacgagatatttgaattaatatatgaggtcaaaatttgtttggattaaaataatttgacaaaaaaatattctacaattttttaacatagattataaattatcttttaagttaattaataaataaaattaatatgtcagttaaaatgtgcagaggtgtcaccgaaggagaacaatcatgaatcatttaatatataggaagattattaattaactgatgtcttgcccattccatatatttaaattaatattagtataaaacaagattatcccacccacctaatttgattattttgattttttaagtgtccgatcaaatttattaggttttggaaatgagataggctaagtagccggtagttaaaaggtttgagtgggtgccgtagagccactatgagcttaatagattgaaggcacagtaacatcataagcacataatcatataatttgtgcattaattaagacttcatctatagtgcttactaatctttaatttgtaatcttaactttgtcggtttggctatgcaaaatacatcccaccaagaaagaagcataaataagtaaaaactacaatataacaaaactaaaatagaaagaaagattaattatggagataagtactagttggtgggagacactgttcattatctgatgatgaccacgtaattattcaacttttcttacttaattaattaatctcaaggtcacctctcatggaccgttcgtttttctttttttatttcctctccattaccgacaactcttttaagaaatatataagcaacctataaagtcttctaaattcatagctgtgattgaattccacatacagggtaatatataagacattatcaattttattgttcttcaaagaagaaaggctaaataaaaatagaagtggcagtaatcaagtctcgagaatttccttggagttctatggtacggctaaagtcatcaatatggtgataggttggataattgaatatttttgtcttgttttttttcatttgacaaagtaaataatatgataaattaaaagggagtgataaaaaaatatgcagaaatagaaaatataagaacagaacacgaaattatttgggaccatattcgcccaccaataccacgctttattcaatattatttttatatcacaattatgcgttctgcatacaaagtgataaaataaattaacctaaagctcgaccatgcacttttctttcttttaaaaattcgtgtttttgcaaagccattataacgatcctaggcgggatgatatttgaagatagcatacaacaatcataatgaaaaatgaaaataatttctatattataaaacgattaaaaacaataattcattaaaatgtgattaataagcctaaagttgtgtttctgtttaaattactcatcaatgcgtcgaagcacgtagcccccgttaaatgcaaatgtggcgtccttgtgtaattaataactccaactatatgatgtgattaaatatctttctttttatttcaaatatcaaataaataaaaaataacattaatataaagattgctaatagtgttcaatgcaaatttcgatattcagtatatcgaccatacaaagaataatcaagtactaatatttatatggaaaaagtaaaataattaagagtttgtcataatatattgttttatataatatcacgttatatatatgagataatgcgtataagaagaaaaagaatatagatgtgtacagaatccaattatccaagtacaaatgttttagaaataacgttttgcagcgttgttgtataagtacataacggatcattttggcggcgattgagagattcaaaaacgtcaaagatgaaaagattctcgtttgtttttatttctttattaaataataacaatagtgattatatgttagctttatgatgtgcttagttaatcccaaaatcggctatgatgagatttaagaagccccaaataaataaagtataatgtttgtggcccttcttcaattaatataaagaaaacaatagtgaacaaaaaaatgaagccgatgaaaaagaaaaagtattcaactgttgcaagatataaatatttgaatttatccgttacaatatacgagtatggcagattgatttatttgtacaagtgatccaagcatttgatgtataagtaagtagtaaatcaacgaacaacaaatacagtagagagagtatgaaaaagaaatacgagtcaaccagccaacaactaatttcaaatataaagtcgaatgtttgatggatccaataatgcgagttatagaacatataataatgaaagaacgtccatatattatttattaatcgaactactttttttgttgaatgtgaacgtacaataattgatttctactatatgtatatgcagcaaaataatcgtgttgtttttaaaatcaatgcataagtcatacaaatttcagttttgaaattgttaaggtattaatttaatcacaatcacgaacttaactatatttttgctgtgtaactgattagtaaataacctgctatattttaaatagtacatatgcttttttttttttttttttttggcaaaaaattgtacatatgcttataatctaaaacttataaaagagaaaaatacaagtggttgacaaaataaaagaagaggaaggaaatatcggcaccgtcatgtgtataatagacctgaccgcacacgtgtgggtttttgtacttgtcataagttttgcttttttatttttgtttgcttaaaatggtgtttaaataaaataaaagaaaggaagtcgaatctgtaatataaaagtgaagtcaggggcaaatgtaatggattttgctaagatcttcttgtctgtcttcttcaaatccttttttatttttctttacaaatgaaggcaacttgtgtgttacactgtttgttacataaaaatagttttttgtcgcatagcgacgacaatgaacataatacggacgagaacctctggcggaaacctccaccaccattcggcccaacttttctattgatagatctcttcctcttcttttttttttgtaacatttttcttacaacaaatgatttaccaaaacaaaagattcattattacaaatgattccttataaatttctactatgtgtgtcacgggaaacccaaagggacagtacattttatttattttactttatgactgacagctttgtttcttcatatgtgtatcttcaattgttcattcttcataaatcacttgattcacaacaaatactatcatgcatgattattatagagtatgcagaaagctgacattagactcagagtctgaacacattaccagattaattttggtatctcctatatggctatatctagtatatacgaccttcctctcattagtcttaacatctactccaacatccatgttgcatatattaaggtactggctgattcgaataataaacttaaacatgatactgacacaacttcacactttgtttttacaattaaatggttccgtgagattgggccttctagctgctctgatattaaatttacgagtctattccaaaaaaaaaaaagtgatgagggtcctcaacatttagttatctgtcttgcaaattgggcacgccaccgagacatgcaatcatccctgggactctaacctcattacttgcggaccctattagaaacggcccatatctggcccgtattattagggaccggcctaattatgcatgatatagcccatcgatatttaaccactcaaaatcccctcccctgcatctatggtttgatctggtttggtttgattgcgattagagttattatatacttacttgtaaacaccaaatcagactcatttcacaggataaaaacacgagttcaatggcttcccagaaacctttctcgactgaaaaatgagtctgagttcagaatctgaggtaaacggtaacaaaacttgatatattgttgtaacttggcgctgtcaaagttaacaaaattaaatcaaaaagcaaatggccttatagcaataacattttccctctacaagaccgcatagagccacgacgaatgttaggttatggaaaagactgatgcttttgatattttctgattcagatggcagtattctgcaagtttatgatattattgagccctccgagtcactcactctcatgacacaaagaaaaaagttatcaactctctctctatctttcacatatctgcaggcgagaaaggttatgactagaaatacaaatacccccacccaaaaaaagaaagaaagagaagaagcatcagagaactaaaagaataatacaaaagtagatgatgctgtgacaaaatcaataaaaatgaaaagagatggagaaggagtgctagctaggtctccatttgatcaagaagcatctcctggtacctgcactcgctgctgcaaaaacctttctctcccctgcaccacaaccattgtgattaagtttagttttggaaccactctatgatctgattaaagtcaaatacatagataaaagattgtggaggtacgaacctgtatatgtagatgtcctgtttctggtcaagattcttcttgcaggtgaagcaacggcttagaaaactctcggtgctcttggtctccatggctggttggggtaaaggaacagagcaaggagtagcctccacgaaaacagagttgtcgaagatatgagtgatggttgggttaggaccgtgagagatgacgcgcgtgtagtcctccgtctggtcaatctcgctcactgctaagaccttcgtttggacacaaggactaagttgacaaggaggatatctgatgccggttttagttccaaaatcagctgatgatgggatctggactctgagctttgacccgaaaaggaccatcttgttgacaggttttctagagtggtctctgttactgtctccgtctttcacgagatcggctaggccaaagacgtctggagagtgaaaacgctggggattagggatagttggctcgaaataggaaacgggtttagggtttttggaggagaagatggatgggttagcttcgagtatagacgtagggctaacgagtgagaaatcagagtcaaagggagtcatcatcatcttagaagtgaaaaacctaaacttgggagagctaaagagagatggtgagcagtggcaagtgttaggctttggaggtggaggttgatcagccattaacagagatgtttgtttcttagtcgtcacggctgctctaggtttgtttctaagcatagttaaagaccggtgagggtaaggatcataactcagtagcttccatggagagaggaaagcaatgagtctgcgtaagagaaaatatctaaaatgaaagagaagaagaatagagagaatttggtacaattattgagaaactctgactgcttctggtattaatggggtctctcactcctatgaaatgatgatcctctcctcactcgcaaaaatcagattaaaagttgctttcacttatctctttcctctcttctttattccttccaaagagcgagagagagagagtgatctcgagagacgggacgttgtagatttaaccaagaaatgcatgcaactttacggatttaccccttacatttattaacacatagagatctcaattattttcgatccattattcatattagggaccggatatgattgaatgtgtatcgtactctcttttttttgtcgtcgtgtattttaacaacaacatactacattttgggtcgacgataaaagattggaaacatcttttgcaagattatcgaatttgtactctctctttatttttgttgcatgtacaaacttttatttagtttattaggtatacacttgaacggcgatacattcattatttgtgcattgatgtttgggcctctgaaacacaggctctccttttattttatactactatttttcatttttgtaaaaaaaactgtgagttatttatttcttacaatttgtatccattattatataatacggcattttgtcattatttcgtttgtctttctcaaatcataattcactttcatttgggtttcttgttttattaatcaaagaatcagtgacgttatttaaaaatgtaggaacaataatcagtgaataatgtacatgttaatctatactactaaatattttataaacagtttgtggataaaaaacaaatgtaatcagaggggggtccacagttgcacctgctttgcttaatccaataattaagttctagataagcgccacgtgtgtttgtctactagtaaacgtttgattgaatggtcttgatgcgttttactccattacaagacaaattatataataataatcacttatttgacccaaaaagttatataactcgtcgaaccacttttattgttgttgatcttgtttttctcgaatcccatctaactatcgcattttcattgtttaagctcgtcaacttctgattcataccaagattcaagaaaaaacaaaaagagtttcaagttgcaagattatgtataatcataacttcacttacaaataatcaacgcaaaagaaaacataaatattacttggtagcctagtagggaaagaaaagtaacgtattcggatataatacgatagaggaaggaattagtgatagacccacggtggggctaaaaggatgtggacaggagtgtgtaggtcctctcctcctcctcctctacggttttcgctatttctatgacgttgtgatcatattggccttttcttctccccctgtcgattcaagcttttattttctatgttttgtttagccaaggaaattttgtgtatttgtgtcttgttttcatgcctcaaggtctcttcttgcctcaattgggtttctctttttttttttttttttctttcggataaatctaattttgtgaatatccatctgattaattttcttacaaataagaagaaacaaatagcgactactcatccatatatgccattgaatgtgctatttctttttaatgtaatgagtgtgtccatcgattccgtaattgtgtttgtaacccattcagtctaacaactttgatcccttaatcactacgactactaccagaagcatacgtatatgttttgactcccaatccatagacgtgactcttgatagattgatttccttctaaaccacctgacgtagaggttataaaatataattggagtggaatcagcactaatcattcatttgattcgatactgaaatttttatatttctttccatttcatgatttctttgatgactcgccatctttaatcatggttattattaattcgaaagtggcaccgatatattgtgtttatcaaggatatagtcatatcaccctaattaccaaagataaagaaagcaaatgagcaagataatgagaggtccattttcttaaatcattgcttctttgtcaacatgtcttaaatccgaatcattactcttatacactacaaaatactccttagagcttgaataccacaattttgtttttctgttcaatgaccaaatatctccatgttcaaacccatattgctctttcagattgtttaaggcccaacacaaaataacttatgcaacctgtccaaacccaacctgatatcattcccacatatagcccaatcaatagacctattttttttttttttttttcaccagactcataaatgatattttctcaagacataaatctgctattcgtttatagacaataaccaggctttgatgacattttctcaagacatagctgctattcgtttattttcatttctcaaagaagatttaaaaacaataatgctcacaacagttaacaaacaggaagaaaatacaaaacaaaaaagaactgaaagacgtcataatgaagccacattcccatccatcagattgtcaactgcgtgcagccaaggatcgtcccacgacaccttgtcatcggcgccacactcctccaggccggacgatcattcccaactgtcaaagcgtcgacatctgacaagggcttgatgtcccaattgagcctatcaggtccgatcactcctcctacgatcaaaacctcatcactcaaactcgtcatcgccattccgatcctccgcttaaactctgaggccgatgcaaccatcttccacgtgtcaccttcttgcttgaacaccagcccatggctcatcacgtaaagcacgtcctcaacgaccaccattggaccttgcggccagccatagtctttgacatcccacccgagtttaacgctctcaagaacctgcaccgtggacaagcctttgtgcaagacgtggactttcccgtttaccactagacccgagcaggcagagttatgagtctggtggagatctgggatggatgtccagacgtcattctcaggatcatacatctccgctccagatatggatttcctgcaagtggtgaatccgccagcaacaacaatcttcccttgaagaacgcagcaggcgaacatagcacgaggcacgagcattgaagcgcgaggagtccactgtctctgtacaaagtcgtaagaccagacctggtcagtagcaaaggtaccgtcgtgatccccggtaacagggctgacagcgtcgctgccaccgcctaagacaaagagcatgccggcagtagtgacagcaccgaaatgggcaaggtggcggatacgagaaggaaggagagggagggtgagccagcgatcacagttgggactgtagacttgccagatgttctcaggatcgaaagcacagacgcagaggagatgctcagaagatcggagctctttacggactctgaagagctcatgactgcggatagcagctcgccaggagcgagagacgagttctaaattgggatgaaggtgtaaaggcacatgagccaggcatctcagagccactgcttcggggattccatccagcagcccagacattgtttcttgtctgtaacacatttatgagattgatcatcagatacaagcaattgcaaatgcccaatctttgaatacaaatatgccaaaattgaccaaaaaagctgagaagcgtgtaaagtgaagattttgggtgaagtaacttatttcaccgtaagacctaataaattcttctctcgaagctgcatcacacagcattataatcgatttcaaaagacaccgccgcatcacacagcaaataatcgatgaaattggatttaaagaaaccctaaaaacttgaggcgagagagagaatcaagattgggctccgacgaaagcatttaatcgaatccaatgcaaagcaaaagcggaaactgagacaccggcgacgattacgaaagagagacaaatcaaagggaacacaaagaagaagaagaagtcgcacgctaagaattagattagattagcataataaaccaacaacagatttggaggtaattttacctgaagcgcggcgggagattgatgaacacgaaggaaggagattgtgatgatagatatctctcgggagaaacaagttagcttgtgattttgccggacgacgacaattgaatcaaatcaaatcaaatcgaggttaaggaacaacaagagcaaggagagaacaaggttttaataaagaagctacgtcgtcgtttttacgtttatgatattactaaaccgattttataatcatcatttatgattctcccccgtaccggcctttttatgtttttctttgggttgctgctttccacacaaaatatcaaaacgttttcttttcatcaacacatacacatgtgagagaaattgacaccaagtctagaagaatacaaacttatgtcgatttggatattctctgatcctaatatctctattttggcaacttcatcaaatttttaaacaaaaatgttattttcattcttttttacctcaaaatcgtatttacatatatgctattatatttaaaatctttgtgagttttgatcgtaacatgaaaacgattataaaacgattacaatccgaaatccctctctcaagggatggcgaatataatgattccgagcaagagaccgcgagccccaagcttctctgagaagcatccaaagtacgtaggttcttcggattggttgccggcagagaaagacaaggctcaagttcagctcactaacttccttgagctatgtcgtttctgcaagaagaatctacgtcatgacgaggacgttttcatgtacgggtcagttttttgcttcttttcctctctgcttagatatatcattgttagggattctttgtgtgtattgttactatggttttcatttgtgaaattccttgttgcaaccatctggcagatacttgggggcattctgttcaaaacaatgcagagcaaaacagatggcatgcgacgtctttagagatttctcgagacagaaagcaaatgttaagaagggaagaacatccaaagatgagggattagataggatctcatcatcaccatcatcatcatcatcatcatcatgcttttatatatgattttgaatttgatgatgatttggggttcagtgtagatggatgtgtgcaactattaagccttttgcctcgttttttaaggggaattggcttactactctcacaagtttgcatcggcatattattatctgtcgatcaaactttctctttggttatttgggattctccttttttagtcttctttgcataaccaatttgatgtacaagtgtgttttctaagggtggatatgacagcttctgatatcttttttattaatcaaaaaagtttgtctttggcgtttacacttttgggtttcggcagtctcgtaaactcagagaggctttggaatgcaactttattagggcatactctaatagacttgggcttgctttgtctgtggactatgtagatcaaggagattcaacaacaatgaataaaacaggccctgtattgtaagcccataattaaaaaacgggcccattatcatttatctttttctaaaaataattttaaatgggttaataacatttcagtaaacatattaaagctggtaatctcttaccgttggtaattctacatttattctgtggccgtatttgtttgtttaatgcgtgcgtgtgatattcgaattcttgagaaggtagccagcagcccagcagccatacgtaaaccttctttgctggaattgaatatggtaaaaataatataccaaggaagaatatttatagattcttacataaaaaaaggaaattgcaagcatcatcaaggcgttatttcccgttacttggaggtatgacgaaagccaatactcgaaagacaagaatttaattggttgccaaaaaaaagaaagacaagagtttgaccgtatctttgttattagataggcaatgacctcagctgacgtagttaattactactactgacaggaaacttggaacagaagcaaaggtcgaggcaattcatttagaagaagacgacgtcattccccctcaaaacagctaattgattctcttacttattatggtaactcttaactcttaactgtaatatttttttgacaataataaaggttggactaaatcaatgacgcacgacccctgacctcttctctgccagtttactttcttctttttttctttctctttcaaaatttcttttgtataaaggatttttttttttataaaggatattaacatcttaattctaataatcgaccgatcttatatactgaagtcgaaatattcaacaaaattttaaagcatgtgttatcaaaactcaaaagctgacttttgttagctactactttttgttaaaggatgaatacatgtaaatataaaagcattttcaaattatgatgttttgacttagctcacaaacatgtcaaaaaagagacatacacgtcgcacctcacttgttctcgactactccccattcagtttacatgcaagttctctgttctatatccactgacgtcaacctctcttgcagacgctgacgttgagctttatctccacgtgcactcgaactctcataacttctcttccacttcgaccaaggcattgacaaattactgtttttttttgtttgcatcttaatttctctagccaagaattactctgtatgttattttcgttttcttaagattagaaaaaagaaacaagtcaaatcgtattttgtgaacgttcatatatcagattgcccccgcatttcctactttgagacttacgaattgttcctaactatcgcacaattaaaataatacaactcataacattcaaaatttaaggcagatagcatatatatagtgtgtgcagtgccaaccagtcaaatttgtaattacatgattattttttttggttttccattaatcaccacaacactcacccaccggtatatattaaatacatttctttatcgccaatattacctactgcgtctctatgtcactgcaagagtccaaagaccatatcttatgttacaaattgtgtgatcaacttggctaacaatcaatttgaatagcatctactttttttttttttttttctactttatgattgatatactcgcaaatcccaatcgtcaggtacatggaggtttacaaaacctttgtttctcttttggggtaataaaagactaaccttaagatcaatcattcgtttcaatacatataatcatatacacgatatgatcaattattagaagcttcgagggatgaggatcacatggaaatatatatcgttttcaaaatcgctattatggaacttacctacaagcctagagtcctatatgtaaataaaataaaattatgttgggtgtattagctaatgtgtcactgtctttctaaataaatggtgttcagtgtattagttaatatcttccaaaatccacatgatatagtaatgtaatggaatggatatggctacaaaagtaaggttaaatggagttacaagaaagtgaaagcgactagatccaagtggaataatgaattgatttggtattttagtagaaagggtcgagtaatgtacgacatagcatgtggttatgatctagtttaatttataggatcttctcatcatattcatctgcgaagaagcttctttatctctactatgtagatctatcacaaaccatggaacaacaaaatgcattataatattcgtacatgacgtagttctgtattccactagattagcaaaaaaaaaaaaaaggaaaagaaaatggtaaaaagacaaaagatatttaaacataagaaaagaagaagactagaggaggatgggcagagaaagtgagtgtgggcatatgcgtcctcctaaccttctaatctccgccgttgctcagacaaaaatatctaccgtcggatatgtctcttgttagaggatatgatattattaatgtgttctcttcgatcgtagtatatttttttggtttagtctacgaaccgttggtatcatttatatttagataaataaatgagggagctccggtgaacatacagtagatagagattagagacaaaatctaagagtaaaaaataaagatatccgacgtggcgaataatgtagggttaaaggcaatccaaaagagacacaaactcttttatctgatcctctttagtgtacgacgagctccctccactcatatatgttcgtttacttcactcgcctctgcctggcgcgtttcgttacaagacctctttatcaagtacattgagagagaatgcacggaaatacataactatcgttattattgtcattttcttgcaaacaaatggaaaattagttgaaataatactgatgtgaaaactcgataaatataccaactggtttttattaatgttggtgatttctgtcttacactctgatgttcacaaaaatttcgcacccttttttattttttcttttgaaattgttttctaggtttagtatatgattcggttattaaaacaaatatatttttttttcttttcatgtgtgttattgatagaatcatacatgtcttgaccagaaaaataacataattaagttttcaaacttagggaaagcccaatattgaggaattgccttttgttttagggaaagaaaaaaagccaattgtagaatcgaaagtacaaataaagaatatcattcttcgagtttgactctctttttttgaattctcactttgaagatcgaatttacttattaaatactatttgttttaccccttgacattgtgtgacacaaactagatttgtttctgttcaatattataagtgtatgggcaaaaacttataggacaagaaactgcaaaaaactttttttttaactctgctctttccaatctaaacccattggtcccttacaaagaatccattatatttacaaagcatacaactatacacaagtttgacgaatcctacaatcttatggagagataactaatgggttttaaaccaaaaaaactggtcacttctctataatcctaaagatattacttgttcagcgctgaagctatacttttttactctcttctgttttcactcgaatcttctcctgtttgtcaccgagaaacagggcttaggcaccagagatcttgaccaatatctgacctttccatgactcttctatgattcacaaatctccaacccctgatatatcccgcaaaaaagaccagttgatgatatcagaaaacaagagcaacaccaacctgaaatttccataatcattgatcatcaaaaatatagttaccatttttcttttgttcaggctttagaaatattgaatcctcccttggggtctgtctacaaacggattcaggaccgatgatgaatcgttagtacgggttaagctcagaatatccatagcgttgaggaagaagttcctcaacttcgatcctagagctggtgtaactggagcttttcttgatacggtttctatatgccgattcaatctctactgagaacaaactgtagactggtctgtgatcagagaaccttgattccccgcgaacatatgacagctgactgataccactcccgtgccagagtatgcgatcacacctacaaattcagatgaacaaactcagcatgtttgatatatatgccatcaagttaatttagactagagagataagtactaaccatgctggagtgcgtctcttggccttgggaaggcgatcatcgccagcataaatatctgaattgttagagtatttgtaagttggtggaaaatatatagtcccttccttccatccttcaaagacacagccttttcgttgttctatccgtagctgtaacaacaacaaaaacaaaagtgacatttagataaaaatttcttatctttcatataaatataaattctttggtctttgaatggtggaactacctggtctttctcaagcaaggccctccaatctctcatctcgacaagagcttttgcagaccggtaagaaagagctatacggtagttcaagtctccaagccagattacccgactgaaaacacaagatttcgctgagttgattgcaagaatcaaaattcagcaagtaaagagcattgataactcactcgtgttctgaaatcatctgaggagacttgtcgtcgccggcattgttcactctagggaatctggttttccttagaatctccaaaacatcagagtttcttctcagctcgtctccttctttctgaccagacgtcaagtggctgcagacaaagcagaagcttgtctggtgaacggacatgctgatcgaaatggagccctgcagattaaaaagatccaaactttgacaagccgaaagatatattattggacgtatatcaaaacagaagatttgggaatgtggaattttgaccttgtttccaagataacccatcaagcctctcccaacgcaagacactttgaggttgttgacactgtcccttagatcactcttgacccaaacggttaagaatatcccaaccatctgcttactggccactaaacagtacttagacttgtctcttcctttgtctctgtcgtctgccacaaaggaaccagtcctcgagacaggggaatagtgatcatgacaaggagaatctgctggctcgtcttcagaggagcaatacctaaagctctggtcgtagaagtcgtcaggtgtgtcgcccagcatgaaacggtcacagacgctgaatctgcggtcaaactgctgtggcagggatgatgcagacgcgtccatcctcatgctcctgctccgatggtagaataacgagttagcaccagcggctgagtcgccttcaaagtcagagtcgagctcggcgaccgggtggggaacaggagaaggagtctggcagcttccgccgggaaggctgtttagggttcttcggatgagagagacccatttcctggcgggtccgttgtcctcggtgcctaaaacgttgccggcgttcaaaggaacgatctcttggaagctgtgaaaaatccaaaatcatgagaggctttccgagattgggaatcaaaagaaagaaagagttaggtgaggtgcaaagtacccaagaacgtaaatgtcggaaggaggagaagtgtgaagccaatcgtcgagatttaaataactcggcggagatttgccggcgacattccatgtggcagtaaaaaccctttatgtgtgtgtataaagcgtgagttagataaaaaaaaaaaaagaaacaagaatcaagagaaatagaaaaatacctaagatgatcaagcggtggatcgacatcgagtttgtttcgtctggctcttccgctgttccttttgctccgagtctctgcactccattttttttaatcaaaaaaagggaatgaaaaaaagaagacaaggcatggtttatgagtgattgcagactgaccagttttgcttttacggacagagcatgcttcctctctttcaatgacattgttcctccaatctccaccaccttcacctgcaacaacataaagagaagttcgttaaaagctgttctcttctcacattccctacatggacatccctattagtacttactagagatttaacaaacttataattaaagctaagcctaaaaatataaatgtcttgagtttttttctttcttacctctgtccaagtcgtctgcgtgaaaatcttctgatttgctcttgatgttgagccatttcttgaccaacgttttgggccatgacagctgcagcagaaacaacttaaggagatttagatagagatcatcttaggagataacatcataatcaattgagagagatagagaaaacaaaaccttgcttttcttgaggttaccatcacccattgttcttcagcttcatacagagatggatagatctctgattcacaattcaatctttttgcaaaaaaagtcaatataagcctcccctgaaccgaagaagacccaagaggatggttgacgaatttagaagaggtcaatgtgagaccacttcttcttataaacagaggaggaggttaagggattctcactcttcctatcctatattcctatgcaggaacaaggaacctcgtttcagaccaaagtgcttgttgttgctttgctgtttgtttgtttctttgaacgccaaatccaagaaggggcaaaagaaagacaacaactttggaacccgagttcagagagatgggtattcgggtacagcccggattttcctcttcctttcttcttcttcttcttgcttcttgttttctgaaatgtatccgtactctcgctctctctctctttctgtgtctttaaagaagaaacggatcatatgactctctctctctctctctccacagcttcttcttcttcttcttcttcttctgcatctctctctctctctctttcttgcttataaaactgtgggtccgacccgtttttaaagaaatgtaatattaaatccgatttgtacccgttttttcctgtatcgggtcggtacagacgacccggtaactttctcaatttgcattttctaattatcaccaacaaaaattgctagttgcagcagtgcatctgtgcatatatagagagagagttattgcactttccctcaaactttgttttcatatctcattgattttgacgtatctcattttccttcctattaatacttgcgtgtcgttaattactgaccaaatgttaatttccctatatgttcaacacgatttatagcatttaatttgttgccgcaatgtaattcttgtagattgttaaataatcaaaatatactcttatagaaactaacaaaccaaggatatgcatgtgtatattatgaagcggaaatatgataaatcacattaatcattcataagaggtacaatccaatccattttatatatataaaaaagagacacttttggtttattccattccatatattgcaatacaaatcccggatttttgcaattggaacaaacccaataaacaaaaaacgaaatctcaattcttgggaatatgtcgccaagaaacaatactactactagttattattaaaagcaaaacgagagagtggattggttagctaaggtagatgcatgtatgcatgtttaatgggtgaagtttgaggtttcgggagaccaccaacaacaacaattgtcactttatgtttttggattcgtatttatatttttatcataggaaaaagggaattaacacgtttaccaatatttatttgcaaggcactttttagtaaaatgtgagttttataaaatttgagttctgttgtgtggaaagaggaggaaatgcttttgacccaaaatctagactaatgcgagactctgcctcgtcctcttggaccatctattactttatcaaacttttaatttcaaacgtataagacccccaactttattattgcaacgatacaatgtgacaatgtgacattgcatatatattatatccatccatgtgatgtgaatgctagcttatatatagcatatgagagtaacatatggtacgatttatacgaacataagatgggtttgaattactgtgccttagggtttgggcagagtcaactttcaaactgaaaataaccctatttgtttaaacacaagacagaaaaatatatgatcttgtggggttaacttatgggggcaatgctctaagattttgctttatctaacttttcaagattataaaatcgagtgttcacttttaagacattgtttgatgaatttatgcgatatagttttgtaaggtaaagttaaaatgacacatgctgcatgtgggagaccgtgtctgtgtttgttcagtccaatacttaggtttagtaaatagtgattttattttttttatctttccaaaatgtacatttgtacatttcaacagccatcttctttttattttgtaattaaaaagctttaaaaaaaataaagattttgaaggctcaataactttatctggctctacgaaaccctgtgccagttgtaataagtgtatatataattacgctttagttgttttttattttgttaaatgcgtatgactcctctctctgattagagaaacgtactgattagttaaagccttaaagagttaaatacttgatggtaatagcatatactttattctgtcacgtcaacacaagttcaccaaacaataaagaattcgaacattgcaattaaagatacttgaaaaacgacctatttattcgaataaaacgaatcatttattaaactgatcagaaaataactttcaaggctttgtactctgttgtgaattatatttgtatataaacaaaatagtactatattgaatagtaataatacaatctgttaatgaagacgactttgtagaatatcgggcacatgttgggtatttataaagattcatgataacacctagctagaagaacattaagatatgttttggtaagcctgttttcttgattataataatttatctcaatgagtagacagattagtacttaattattatcctccaatctttgttgcctgggaattttttttcagcattatgttaatctgatgtcaaggtagatataaattcatatactctcatgagtcatgatgcaaaagaaactatagtgatagatgcaatgaaataaagacgttttcgggtttttatggaaggaaggatgggtggtgatgtgaaagatttttaacttggaagaagaaagaggtcctttgagcgtgtgtgggtaaaaacatcactttcatgaacatggagagattttagggtttaggggtaaaaaggttaaaggatgatgttactgtttttatctctttctgcattgttatctgctatagttgcaaaaattcgatcatacatcaaataatattgtgtggtcttattcatctaaactcataattcccacaaccgtacggtacaactacaagcccaacgctccctgaaacagggccgtgtacgtctttaaacatttaaaaccttaaatttgtacctgtgtttgattcttcaagaaacagagccattagatgtatcatcggctcatccaatcatactcgttgtctccctgcacaccaaagcaacaacttgtgtaaagatttgaacccaatgttggggttttaagaggatcaaaagaggtactcaaaggattgttaaacgtgcctgaccattgcttcgaggactttctatacgctgtcagtatctacatttgaaagcaaattacaccatctgagacaagcaaagctttgacacaggagatacgagatagccaaataatgaagggtattttacaatcgctctcaccacatttccgcatatagaatgcattaagagcagagatctctcaagcacatataaatcaacagccttgtatccaggcgaggttgatgtaaaacatccaagatttcttctcatgcaagatgaaaactttcaaattaacatccaagcttaaatgcagtcacgcctatccttgaaattagatttgtaattggcaaagggaagacaaacattcatgtttttggtagaaatctattgccaaggttctagagattcatagaagagagtgaagttgaatgctaaagagatctgcggttgacgagtctcttgtggatggctctgatggtggttggtgttgtgcggcagcaacctcccaggagagacactcctgcatccatccatttctctacgtatgatacaaagtcttcatccccaactccggtgttttcctgcaacagtttttgagcaactcagacaactgtgctccttcctctcaaagcaaatactgtatatacgatgacttaccacccactccttccgatcagcatcatagctttctccgctgtttgggtacactagtatgggcttgcttgtcacctacaagttattcatataccttttagggtctctacaaatacaaatacctaatgagtgtggatccaagccgcaccttttctatctccaaaactagcccctctatgaatcttggaggggtacagttgattccaaccgccactactttctcacaattttcagctatggagatacactccttgatggaatccccgctaaccacgtttacgccatcctttgagttgaatgaaaaccacccaggaatcttcacatctccctcttctaatagatcagcaaatgccttgcatatcacagaaagaaacacccacaggaagctaacaacatcaaaattgggacgctcgatatgaaaggataaatctactacaatatgtcaaatatcatcatcagtacctgagcctctatcttgtttggaatggtctcaaatgctattaaatcagcaccagattccgccagaacttggagtcgtctgcggtgaaaatccttcagcttttccagcgtgatcgaatcaccatagattccactgatataataaccaccaacagttaaaagataattttaaggagatagtgcaaaaatacacgaaatccacaaaaatcaaaatctgaatagggcaagtggtaagagctttagaaacttgttccaacccaaactcatatcatctacatagataagagaaaaatgaagcaataacctgtattcagacccatcagccaagtatgcaccgtagctaccaactgatgctgcaactaatatagggcgctttttgagaatcttatcatccatggaagagctagttccgcatttgtcataatacgagttccgagcttcagtcgctatttctacgctctttttaagcaaagattcgctctcttctctagaaaatccctttgcttcaaacccctgaatcgtggcctgttcagaattatcatcaatccaagttgttagtgtccaaaaaagagatagataaacaaagaaacatagaatgatggaggtaaagaacctgataagaagcgctggagatgatatcagcaccagcttcaaggtaatcgagatgcacctgctccatcaggaaatacaagcagctaagtaagctacaatcaatcatatctaatagcaaagcgatcactgagtaggaaacaaaatcttaaccctgtttcccgactcagaatgcaaaagaaaccatggaactgaatctggaaatagcaaataatgagtagatattaccacacaatggagcaacatgaacactagaaaggggtttagggttcacaagtttacagctttaaatattgtcaataacaacagttgaatcagtaatcttctaaatctgcttgaaacgtccaaggagcaaccaaccattgatggaaatgagaatgctttacttcatccacctttagagtacccatggcatttactcaatcaatcaaagtaaacctaaaaatcctagggtttattcacacccaaaataagaaaagcacaaggccttgtcccgcagctggacgttggattcagatttcactgacaacagaagaaaaggatttactgcttacggtgtgaatgaggtgaggagaggtgacaaggcatttggcgctccagagaggatcgttgagatctgctccatgtctctcgaactccgttgcaagccctccgtctattaccgcatagccgcctgtctgcttcaggaaatctttcatcgagttaaaagagtttccggtcatcttgtatgtcgcctcggaccgatcacccaacaactcccactgaagcgtgtactgtgtgaaacatacgataaacacaaaaaactgtagagagaaacactcaaaatctttagtactaattttgtttacaaattgtaggtttagacctttatcttgaatactaataacagtatcggcccaatccttttctatgtttccttcagacccctcttgtaagtaagttttaactctctgtttttttcttatcagattttgatgatcaatttgcatgtgtgcgtcgtgtatatatgaaattcgaatcaacatcaaaaaataaaataaagcttaatcgaattatacacgactgtgttaagtatataaatacatagagcgcagaaagattcttatgacaaaacccacaccaatccaactcccatagctcaaagtaaatacaaaatccaaagaatcacgcagctctcaagaatatatcagacacggagcaaaaaggaaagagagggagagagattcaggggcctcgaggtttgaagaaacagaggcacccctgaaactggtccggagctatcattccaccacctttgcttgtgtctatggcttcaagcagcttcaccacctcctccatctccggacgcctgtctggattcgggtcccagcatctcttcatgatgtttgccaccgcatgcgggcagcatttcggaatctctggtctcagattctgagcaagatgcaccaaacagtgacttcattagatttcctgattagctttaacataggagagattgtatgtatagacagagagagagagaggaaccctatgaacaacggcgtgagagatctcagcaaaactacagtcagcatagggcatgtcacagcagtatatttcccagaggcataccccaaagctatagacatcgcatttcctgttgtaaggctttccttcaagaacctatgcaacaaaagctaacattctcatctttcctattacgaaacacaaggattttgactctacaggaacaacattacatacctctggtgccatgtatccaagtgttccagtttcacccgtcatgtcttgagggttctgagcttcaactctagctaccccgaaatcagcgatcttcagcgtcttgttaggctgtaacagcatgttctctgacttcacgtccctatgtacaatcgccttggagtggaggtaactaagcctgagacaaagaaaaaaggtaggaagagttttgttgataaaggaagcatctttgtctgaatagtttcagaaatgaatggcaaatcaggaaacataaagtaaaggagagattaccctctagcgagatccaaagcgagctgaatgacatccttgatgggtagtttggccctatatttcttgatgaggaacttcttaagcgtgcctccggcaacatattcaaccacaacacaacaggccctcgcaggatgtgcaccgttaccacgtccgccagtatcaccagcaggagggatccgcagatcagaggttcccatggatgctcctataaactgccacagagagagagaggtcaaatgaataagtcctttgatcaaaaggttcttcttctaccttaatcggtgaatgtaaaaagaataccttggtaacgttgggatgatcgagcttctgccagacggcgacctcttgctcgaaggaagcacggagagctgtagtttcagctggtgtggcgtaaccatcttctccccaatctaacactttcactgcagcaaaccataacatccatcagacgggagatccccaaaaaagaccaccagtgtctatcctaatgaatcatatatatcttagtctaggagaaaagacggacctgcgacttcttggccggcgtagacaccgcggtagacagtgccgtaagtaccgtgagcgaggacgtgcttcatatcgagtttggagaggtcaatctcccattcctgcatcgccggtgcgggagcgctcgtggaagcggaattggtgaggacgctgctagtagaggtttgacccatatgcaaatcccatttactgaaatccagtgtatctgccctgaagtatcgttcttctccggcgctcctgctcccagtaccgcctattttgggatccgcggtcccggacccgatttcaagtgatttatccgcctctccgccgccagaggccattgatttctctctccggccttactcttttggagagccaccagccactaatacaacaatactcttcgattcaaaaccacccagatgatcaatcgaaaatcaagcagttcaatcagtgagttgaggggacaaagctaggttttttttttttatgtggtggagagagaaagaacaagaaaaaattggtggagagacaaaagacaagagagttgagaaagaagaagaagaacaagttagtagaaatcgatcgaaggtggtggtggtggtctccacaaaaaaaaatactctttttcttttatagtttgacaagtagagaaggatcggcggtgcagtgggagagagaccaagtcttaatgtctttttgacagtttcaccggccaaagagtcgttttgttgcccttttccagtttttattataaaaaactctctcttgcaaaaacagagctcgtctgtctttgcttcttctcggtctagtggcagcccttccgtcgccgtttattcgtttcccccaaatttcttgtaaatttacattcgactttaataatatttgtacatcgagaaatgaataacctttttggtttgtgacgcaatctatcgaaaccaaaaggtccactgtaataatctctctttaagatgactactgtatttaattgtgtaattcataataaagaaataaatcagattacgtaatttgttatagactatagtttatagtttgtcatgtgaatttgttgggaatcttcgtccgtcgttacttgtgagcacaaagaaccaaaaccgagacgcatccaccagagcatattcctttccgtagaatcacaaacttttcaacgcagagagcgaatataatggaacccaacaactcaatactaaaagaaaacaccaattattattaaaaaaataacatttacattgccaaaacaaacagttccgttggggatatagtccactcctctcaaaagattagtagttcacaaagtatggtaatcacacttaaggatgaatctatttttgtaggtccaactggcatgatgttaatctggtgttgatacctgaagaaaagtttcataacattgcttttgtccgatatgtctcgggctaccactaaactgatgctgaatggtctaacgggcttagtacggccttagagaagagatgaagatgtccaattcccaaggttaagatcctcacctaagcaaatgctcagtcagacatcctctgagctcactaccaagcggctcggtctgcttgcagtaccggtctgcataaccggagtcgtgatgaccagacaaaggaacatcttcttgaagataatccccacagtcgataatgatgttatgcaacaaacaacacaccagtattatactaggtagcttcctcctgtctggtctccacataactttgctcagaatcctccagcttcctttaagctgttgaaaggcagtagctgcgactgacctcaccttctcatgcctttcgttgaacgccaccatggaatcagagggatgatcgctgtcgtgaggagttataagccagggaagaagcgggtaactgatccctccaacaacgtattctctaatctgggctccttgggatagagttttaggattgccgtctaaaatctgagcgttttcacagagtttgaagaagccagagaacttgagaagcttggagacggtcatgccgccaggccagccggtaaccatgttgagaaatctcatctcgtgatcaaagactccttgtaagaacatgctgtagttcttctcctggtcacaccagtcatctgatgcttgcacagccgggagagtcatgatgatgtgcgtagtgtcaatggctccgcagcaattggggagaccgtacatctcctcgaactttgacttgatctcttcaattcggtcagaatctggccatctaagatgatgcttggcacgttcttcgagtgcctcgatgaatctccatgtaacctggggaaacaaatggatggtgtcaggatacagcatatatatattgaaatcagggaaatagggagctgagtagaggttgattggtacctgagaaacagtggactggccaacaccaaaggcagcaccaacggagacctgagaatcaccggaagctaaccttcgaagagcaatggcgacttgtttctcaacactaagaagccttccctcgatgttgatgagaccagagggaggtctagagataaggtcctccctgacgagcgagcaaatgtagctaaaagttgtcttagaagccctaaagaagtgcttgaacgcatagtcttcgtctgaggggactgaaaacaacaacaatctctcggttcaattcaaagaaccctagaggagctacaaaagcatggaatcaaaaggatggaacaatctagtcaagcaatagcaaaacgacattgactagtggtaactgatgggggagaagaggaattaaactgaaatcaggctgaaaagcggggaaggagagagaggagaacctgagggagaagagtttcggagccagaaagtatcccaccagtcgcagtcgatagcctccggatccaatggcactgcgttgactctcttcttctctttattcttcgccaacttcttcgccttatccagaggcttcttcttattcttcttcttctgcttcaccggagccatcgacgagtacgacaagggtcaagccggggagaagcggttcgtctgactggaggtggaacaagggtaaaaatgggaattggaacgtcgctggcttgctggactctagtgggcttctcacatttcatagaaaataagtaaacttaaagctcagtcgtttattaggcgcacagacgcaacgcacagaataaatacctcttgtcgggcccactgggccatctcgattcatggacatcttaacagttttaaaattcattatacagcccatcttgaataaaatatagttttgcattagctaattaattgggatcgctttgaaaagaaaaaccggagtacaatatttcagttacggaaaataattgcgtacaaaaatgggcaaaaaaatggctctacgttacttaagcgagcaaaatcatttttactagaaaagagaactgaaaaagcaaagttttgtatttttttctcttcatatatatatatatatatatatatctttttttttttcatctttatatatatatatatatatatatatatatatatatatatatatatatatatatatctaaaataggaattgagcaaggaaaatctcatactactaatttgaaatttaagaaaaaaaggaaggcgaatcgtagacgggaaattgttcttttgccgctctcggacgaatcgtctggtctgcttctttttccttcttcttatagtctttgctttttggccttaagaaaatgattttatcttttgataaagtttccatttttggtgatataatacaaatagtgtattagtagtttgattctcttcaccacggtgtcggtacgattgaagctcctccctccaagagccttcgtacagaggtatattttaattaattttgtgcatcatgatgattgcgggagctggttcccactttttcgctgtttatgaaaattactcactctcactgtttgatgaaagcaatcataaatctcgctgaaagctaccctttatttgttttaatctttaatctggtgcatgacttgacactgattggattgcctcatctctgtatgtagcagtttctccatgtatactcttttcttttttaagaaaaaattataatttattaagacttgttttgttatatggtttttgttttgaagacgtttctgctgaaatttcaagcaagtgtgtttgtcagatggagcggtatgaagtcttggagcagatcgggaaagggtcctttggctctgctcttcttgttagacacaaacaagaacgcaagaagtattctattctctctcattcattcattctctgcttttgcttctctcttgttgcttctctggtgattccatttgctctattcatcttcaccatttacagatacgttttgaaaaagattcgtctcgcccgccagtctgatagggctcgacgatcagctcatcaggaggtttgttcttgtttttctttttttttcttattggaccaaatgaaattagttggtggtgttggattaagatgatgatgatgagtttggacctccctccccttcatgtttcagatggagctcatttctactgtccgcaatccatttgttgtcgagtacaaagattcatgggttgaaaaggtctctccttctcatctccttttgctcattcttcttctgcctccttactctactcaatagtcaatactcatcatctctcttgtttcccagggttgctatgtgtgcattgttattggatattgccaaggcggggacatgtaaattggtttttgcccattttcaactacagacaagttgtgtttagtttgaagaaattggctcttattttcattttgaatattgcaggacagataccatcaaaagagcatgtggtgttcattttcctgaggaggtttgtctcactctcacccatcccttcacttcttacaatctatcactggatctaatatttgaacaaataactactaaatgatgcagaaattatgccaatggcttgtccaactattaatggccctcgattatcttcactccaaccatattcttcaccgcgatgtcaaggtaaacatgtaacctcactatcaattttcagaattttgttcctttttatgttccaagcatctaaattaacatctaaatgtcttttcagtgttctaacatattcttgacaaaagagcaagacatacggcttggtatgttttgtagattcatgtatctttaagcctttttgtcagttactaacgcatccacaatttcggtctcaggtgactttggactcgctaagattctaacttctgatgaccttacatcctctgtaagttctgtacaatgaaactaatttaaattttgtgacactgttattataagtcagtgtgtttataggttgttggaactccaagctacatgtgtcctgagcttcttgctgacataccttacggatcaaagtcagacatttggtcgttgggtataacaacaatacattcttctttgatattttactcctacacttgttcaccttgtgactaccgtttcatggatcatcatggaaaacaggatgctgcatgtatgaaatggctgctcataaacctcctttcaaagcttccgtaagtatccttacagttggtttttgattttggcattaaaacacataatgtaaaatgtgaaatcttgattgcaggatgtgcagacactgatcaccaaaatacacaagttgataatggatcctattcccgccatgtattccggctcattgtaagcctgaaatcatttcctctgttaacaacattaaccggcgttgctgtaccaacctcttttcctcccttatctgcagccgaggccttattaaaagcatgttgaggaaaaatcctgaactcaggccaagcgtatggttcctataatgcttatttgcttttgatgataagtaatccgtttgtggttgaactaagcattgttgttaactcgctgcaggctaacgagctgcttaaccatcctcatcttcagccttacatcagtatggtttatatgaagctagagagccccagaagaagcacttttccactccaattttctgagagggacgctacattgaaggaaagaaggcgttcatcattcagcaacgacaggagattgaatccgagtgtctctgatacagaagcaggttctgtttcttcttcaggaaaagcatctcctacaccaatgtttaatggaagaaaagtgtcagaagtaactgtgggagtcgtcagagaagaaattgttcctcaacggcaagaggaagccaagaagcaatcaggtgcagccagaacaccaagagtggctgggacctcagctaaagcaagcacgcagcgtactgtttttaaacatgaactagtaaggaagaaaaacttaaagctttatgtatttgagatacaatcagggagtgatctgactatatatgttctgtgctgtgtacagatgaaggtatcgaatcctacagagaggagaaggagagtatctctgccgttggtcgtggaaaatccttacacttatgaatcagatattacagctctttgttccctaaattcaccggatgtttctgtaaacactccaagattcgacaagatcgctgaattccctgaagatatcttccaaaaccaaaacagagagacagcgtcaagaagagaagtagctaggcactctttttcttctcctccttgtccgcctcatggtgaggacaattccaacggttcgatcacaaaggacaagtgtactgtacagaaaaggtcagtttcggaggtaaaacagagaaggttcgacacgtcatcgtatcagcagcgtgcggaggctctggagggactgctggagttcagtgcaaagcttttgcagcaggaacggtacgatgagctcggggttctgcttaaaccctttggagccgagagggtgtcttcgagggagacggccatctggttgaccaagagcttcaaagaagcttccgtgtagatgaagcaaccataacaaacgctctatctcttcttctcttggcttgcttttgtcctgtgtggtttgtatataaataaaaacgacgacgcattcggttctcattgcttaaatgtttatccgaaagcttgcagtttgggccttgttgggccaattcgttagtggatttgtttggacattttgaatttggtggaaaatgtttgggtcgtttcgtagaggttgagaaaaaagcggggttcttcttatcaataaacaaactttgtgagagaatttagcgaagaacgaggaaatcgggagaaagtgatactatcactgtgatagtgaaaggagctttgcttgtgaagagagaagaaatggcagaaacagagattcttgagccctatcaactgtcgttctcggatcttcttttgtcctctcgtaatcgctctcaatggatctcgaaaaatgtgatggacgctcttggccccaccggtcctggtctcctttgtatcaccggcgttcttggctccgcctttctccgccgtaaactccttcctatggctcggaagctggctctgctcgatccggacaagcggaaactcattctcatggtaaccccccggcaatttttcaagatttccattaatccaagttgtatatctggtgctttgttctcaagattgaaactttgagtagtgttagttggttcatgagtgttactgattcggtgtgtttactgccaaaaggagcaccacttgggtagcgacgttcctctcaagaatccagaacgagatgtctcctcttttgcaatgcagctcaattatgaaagaacaacttataaatcctcactgggaaagctgtggttcgatgaggctggatcaaaactggacttgcaggaggatgatgatgatgctttcacaaatcttggtggtgcttttaaagaactcgggttctgcatgagggagttgggcttgtccatagctcgtctatgcgacagggagattggcggaggcttgctggaggagagcttactggattcttgcacagccaaaggacgtctcatacattaccactccgctgctgataaatatgctctcagagaatcccagaggagaaaccaatctggtaaccgagtatcaagcaagaggagagtccagaacgctgctgagcaagagctgaaccgtagaaatggagctggtttgagtgggagtcacttcaatctgtggcagcagtggcattacgattatggcatctttactgttctcacggatcctatgtttctatcgccgtattcctatcaggaattcagtttgatgagcagccattcttacctgcagatctatcatcccagcaagaacaagttctacatggtcaagactccacaagacagttttttggtccaaatcggagaatctgctgatattttgtccaaagggaagctacggtcgacccttcactgtgtgtgcaaaccagagaagctggatcacgtaagccgtgagacatttgttgtcttcttgcacccaaagtggagccaaactttctcagtctcagaatatacaatggaacatctaaggtcggatgaggtcgtccctagaccagatttacagaatattgttccacctctatcgtctcggttaagggatgggatgacttttgccgagttttcacgtgaaacgacaaagcagtactacggagggaatggtttgcaatctaatagatagccgtgccccaggttaatagcttgtctaatctttaggtagttaaattcaaaataatctttaggtaatgagtagtggaaggcaagaggaatgagccaagagggttagttgtaaaagagattagattaaagggagagttgggattcgttatgtgtacttcgatgttggagccaaaacaacagtgaaagctgttacatcgttttcacagtcaaaagctctccctttcaaacatgctttttggttgtggttgctcttctttagtctctctctgtgactcagtttatgttcctgttgtgtctcccctgttgctgttccaaacttacatctctttgtttgctttcaagcgtcgcattaagacaaaagtggtgttattaaagtaaaagctgcctctctccctacacacagattgattcctttagggaatcaatcatcttttctttgacacttttgatttatagttttttttcatgaatggttttttgtacgtgtagatcaaaccgacaacagggtttagctcgcaagtcttttcttttgtgaattcaaaacaaagtttcaaactttgtcccttcgaagatgcttgctttgacctaaagaggtgctttttgcatcgaaagtgacctcggtttcaaaaccctaatctaagaatagaaacggatatggtgtaggtatgtaggtgtctattgtaagcaaatcaaaagcaaaagaagatggtacctaaaaactaaaagtagtttaaagaaacaataaaatggaaaagagggttcatcattcaaagtggcagatacattcaatttttaattggtagtataaaatacaaaacgtccaaacaagaacaatgattgcaaggcaaaggaataatcagagagacaaaatgactagtatttttctaagggattggttataaagaatggaaaatgtgggtatccctaaaaattagacagagcaaaagggaataaaggatgtatctttattcagtggtcacccacctatagtttccaaagtgcaaataaatttaatatagatacacatgatgagattttgaaatatcttatatatgcgtttttatatatatcaaaatgctctagtaccaaagaatatagatcaacaatcatgttaatttgtacaaagatgaaagaagatcagaagttttgattgtgtagcctgaagaaaaccttggatggatgaataaactaattgccaagttttgtgtcattgaagtggaaaagagacagagagaagaaggtgacgtaagggaaagcacgccaaggcagcagcatgtgtgaatgtacgcaaaggtcgcagctttgtgtttcaaaaccgaagcagaagggaccaaattaagagactgactgatcatcatacacagtcgtttcattcctttattctcatctttctcttcctcccattttctcacaccaaatttcagcacctaatccgttagtttaaccatgatccacaacaataaaccaagttgtttgattggtttaaacaagacactctaaacgcaaattcaaccttcttttcctttcttttttggtcaattgaaacataaatgtctgataacctatgactgactagtcaagctatcctaatgtttctgattaaattaagaaaaggcaaatacaaggatgacttgattccctcctttttctcaagactcgttgatacatacatctaaagtaatatttatgtgtaataaaaaatgggattggcaaagatgcggccttattattgaaaagcgacgtctttgttttgtatagtagtaatccattatttatgcaacgactatatattatgtcaagagtagtactactcactcctactctcatcgaaatataatcacatatttctttaaaagaaaaagaaaaggtgaaatacctaaacgttactttgtctatctatatatatacacacacataagtttcctagtcaagctctgaagtcgaagcaaagttaattacagagagagagaaaggatggagagagaactcagacgaccgaacccaatcaacagctctcgccggccggagatattttcttcaggcggtagtagtactcaactaccggaaagcccacgaggcccaatggagttcttgtctagatcctggagtgtctctgccttggaagtctccagagctctccacaccgccaaatcagcttcagccaccaacaggcctccctcatccattaacactccgataccggaagaaacgctaaaccctgagaaagaagaatgtccgccggagaacagtactagtgttagtagccagttctcgttcgctgcctcggccacttcacagcttgttcttgagcgcataatgtctcaatcggtacggttacatagttatggaccgaccgacacactctgtttttgtatcttgatgatgagtttattctgttttgaaaaatgaaggaggtgtcaccgttaacgtcggggaggctatcacacagcagcggcccactcaacggcggcggttcttttacggagacagacagtcctcctatctccccttccgatgaattcgacgacgtcatcaaggtacttcttcccttatactatctctctaatccttccttcctaggtttatccttggtttatcctttttcttagaacgtaagtctccgccatactttagagtttgttagcaaagtaaacaaaaattatgagtcaaaagaaaagcagaggcagcagacagaaacagatttgactttgactctccactttacaacctgtgtttgtttactttaacctctctcattcatttcacccacaaaaaaactacattgtttttttttgtttcttgttcattcatatgaccaatctttagttggtagaaggtctccttaaattgggtcgttgccatacataattttaaggaagtgctgcaaggtttagccttctgggtcttgggacttataaagctggtcggcgatcattaaagcgatagattgatagtaatgcagtttcaatgttttcttttttttcttccattgaatgctctgtctctactgcatttacttgatgaattggagttcataaaagattaaagacataattggttggacacaggaataggaatgttacggtaacgcctagagctcctctttggttggctcattttaagaaagttatcggtaaatgcttttagagcgagcagtcactttacctccatttccaagcagttcattaatcctttatttgctttttgtagtccaatataatgccatcaacttgttggatttttcattaagtcagcctatctaataaaccaatcctaatgcagtattttcgcacccacaacaccatacatcctctcttctccggcacaggaggcagccgtggtaccaccggaaatgggagcaatacccccatggctggaaccggtccaaagacagttggtaggtggctcaaggaccgtaaggaaaagaagaaagaagagactaggactcagaatgcacaggttcacgcagctgtttctgttgcagcggttgcatctgctgtggcagctgtagcagcagccacagcagcttcttcccctggtaagaacgagcagatggccagaatcgatatggccatggcttcagcggctgctctggtggctgctcagtgtgtggaggctgcagaaatcatgggagcagatagggatcatttgacatccgtggtgagctctgccgtgaatgttaagtcccatgacgatattgtcacccttactgcagctgctgcaacaggtactgcattaaaacgtagtcacccttacttctgtagagattccatacctgaattcacccccttttcttttgcagctctgcgaggagcagctacactcaaggcaagagcgcttaaggaagtatggaacatagctgcagtattgccagccgagaaaggggcaagttcagcgttgtgtggacaggttgacacaaagcatagtgatagcagctttagtggagaattacctgtggctggggaagacttccttggcgtctgtaaccaggaattactagctaaaggcactgagctcctcaaacgaactcgtggaggtactccaaagctacacccgtataaatgatttgtaagccaagtaaaaagcaagggtcgctgaccttgaattttgaaagcaggtgaactccactggaagattgtctctgtctacatcaacaaagcaggccaagctgtgctgaaaatgaaaagtaaacacgttggagggaccttcacaaagaagaagaaacgtaggttcttctcagcacaaacatttcatctcttacactagcctggcttttaaagtaaagctagatagataatacaagtcataatagtctttgatttggacttgtgttgcagatatggtgcttgaagtgagaaaggatatacctgcatgggctggcagagatcttttcaacggagacaagcatcactactttggcttaaagacagaaacaaagagggtcattgaatttgagtgcagaaaccaaagggaatacgagatatggactcagggcgtatccaggctacttgccattgctgctgagaagaagcagaaaagttccatgtccaaatggatggcaccttaacaacataagctaggaaagaagtagatgctttgtagaacgaactgcttatgataagaataggtttaaacataatggagtagaagacattcccttttgtaatatccttttattcaattgagtgaacagagatgacttctaaagctaacaacaaccttcacaagtacaaatgtattggattctcctatcatgttacaagcagtgatcaacatttctttacaacccaaatttccttttgcagacaaaagaatttgaacatatgaactagataacaatggcacagtcttaagagcaatctgaaagagacaagactgcctaactatcaacagcccttaagagagtgaggagagataggaagagattaatgacatccaaataaagagaaacagcagcccagatgtactcgtcataggagtgcctcttgatcaagttgtcggtatcatatacaatgtagccacagaagatgatggatgccaaacaaccatagatcatcacagagatctttcctaaagggaagagaatctgcagcaataaagatagtatttaagctcttattgtggaagaagagaacattgaagccttgtgagcgatattgatacctggatgaaggaaaacaccatgaggacaatgacagcaccgaacaagaaaggtccgaggaagttgaagtcatggcctcttttggccgcccagaaagtgtatagagtgagggatatgaccacaacagcggtcaaaatcacagattccagaatcaccttccctgtaatcaaacaaaacacgttagggaaagaataaggagaaaacagaatcgttcaactggatcatacataccgcttgtaaaggcgcaggtcaagccaaccgcaaaggcaagagcgacggtgaaaatcccgagtaacagatagttcacagggtgcttctggtgatagtaatacaaaggacacataactgcacacacacaaaaacgagaaagcagatcaaagagccggagatgatggagagatagaatccaaggagtaccgtaccgatcaatggagtcaatataagaagtatgtagagagcgaagccggcggtggtggtggtgaagaatacagaaatagaatgaaccttaacgacggtggcagcgacggcgattgtaacgagcagctggatggagatgatggaatagaccttgcggatgaaagaccatcggagctccgggctctccgacatcatcgggtagagaggcgtctgagccgactccaaatcatgcttctgattccacatcttccggattcgtttttttttgtcaacgccggtgagaagtcttcagcaaaatgcgaatgagatgtgaggacgatcccgattcctccttgaagaagaagaagaagtaatagactccgagagaggcggccaagagaagaaccttcccgatacgtcccgcaattaaataatataatcagacggctccgatcttgacacctggaattaagattattcagtgggccggcctctgaagaggagaaacaacgttaatgatgcactcatttctacagcccatttccattggatttgatttatttttcacatcattggttggattttgccacaaatgattgtgccaattaaaaaccatttcaacaactttcttcacatttttcgtccacatatacacacccacttgtactttgaattattataattgttcttatactttgttccaattttcaatttacaaacaaaacaattatggctagaccaaaaactaacgaattagatggtagaaaacagaatacacaaaaattggtccttgttgaaaaattagttgcacctacaaggtatgagttgtgattgaatgttagtgcagtatacagaaccagaaagaaaaagataaaacattaaacaagattgcaacgaggtgatactagtcagtcacttcacttaccagagaataatgactcggaagaggctaccagtaagtaagtcacccatatgatgcaaaggtaccattaagtttataatagctgctgttttcttcttcaacctacaataccaaggttgactcattttattataaagtacttgtacactttccttgggcatttgtatggtaatgtcttggtgggaacataccaataactcgttaaacatggttgaaagtggttgagtctgcttcaattgcaatggattaaaagttccatctgttgaaaaacagatatatttagaaatgaaagatcactcttcatcccatacggaataagttgggttgtgatgagagaaactcacatggcagtgcatatgtattcttcatcttgaatcccgaaggacccacagattgctcttttggttggctctcccaatctagattggattttagaggaaccacgactgcagccatattatccatacttcccttctcaaaggcagtattaaccaagcagtctgccaaagatattgagcaatatgaaggcactcctgctccaaagctagtttgattctttacttcccacaggcgatcgcatgcatcttgcacctctaacttctcaaagataccatcagatgacactaccaagtagctgtcattagccactagaggctgccagtccatcacctcaggtgcagagatgacaccgtaactgaaagagatatcaaaactcacatttcaacttctcatagtgtaaaccagctagaatcgtgttccagagagattctaggatacaaccagcagtgccaaccttctataagtaaggtcaccaatcgaacgggagacagccagctgaccattcacccttggcacaccggcccacttggtgacataacctcctgcagctttcactcggagcatttcatcctctctatctgggtgatggtcctttgtcaattctttggcaataaaacgcatgagtccagtgcgatgttccagctttaaatcagagaaccttgatggggaagagtcttgattgcgcttacgctctctgtacaactttattaaagtagctgcaataagcaaacaccaaaagaacaaaacgttcattcattcccctatactcttagtggcttcacaaggttggttatagtctaaaaagggatgctgcgggaacctttagcctcttcaggagtctcatatctttcagaacacaaaagtgccttagaatcaccgatgctagcaaccagtagttgaccatctgcgataagtgcaattgtggccgttgaacctgaatccaactttcgagtagatgcttcctgcattaaacaacagagtctaatcacgctactgaaaaaacaacggtccaaatgatagagtagaaggccatgcaccacaccttagtaaatgttgcatcaatgtcgtagatagctctgagcaaggcttctttcagaatatccaagtgaaaattgagcggcaatgaatcttggaacctgtgtaaaaaagtgagtgggacagggttgcaaaatcatatctcgtgagaagaacaacattctatgtcacgaggactacctttgggaatcgaggtcgtatagatgcatgagtgaatttggtagctttccagtgagctccttagaaaatgttgcgtccaggagaaagtaaatgtggagagcaaaataatccaacaaaagttgtgaagccatctcactggcttctgaaccactgtggccgtcaaagacagctgcgattccaaccaaaacatcctttggtgttccagtcttcttgcctgcgaatcatcttatcttggggaataaaaaaaaaacagttgattctctttggcgatcccaaggcaacgatgcataccgggaaagggaatgcgaagatcaagggcacagagaagacgatcctcctggtatttcctccgcccttgaatcgccgccgtatggcaacgactggcgggggaggagaaggatcggcgattctggagattccagagagggcaattgggagatcggaaaactgccggagctccaccatatttgtaaatactcaaacaggttgaagattccgcggcaacgttgttaatactaactacaacgataaataaagataccaaaatttcaacatctttcacaaccgatatcatcttccgttaagaagaaaaaacaactcgtattttctaccacgcttatttatttaccaaccgaattttaggacttaatttacaacaattatggacaacaaattagttacaaaatgtgactaataagaaaaaaaaaaagaagacatcttgaggtaactttatttacaaggaaaagacaagaggctatttataaaatcgtccacaaccttggattggatggctacctgcttccctttgatgtctctgcaagttcagaatcttcccttgctcgttttaaccttgttcctacataatccactgtagctcatattattttatattcaaacattacatactagagtttgacttattataatttccgtttgtgtgaactctgatattattttatattcaaacattacatactattgtttgtcaatatgtcattttcgatcttctaagtaaactcatagttagttaaaatgtagaaaggagtttagttactagatgataaaatgacttactcttcttctctactcttaggagctgggagggggctggaaataagggtgctgcagagcctcatctacggttactctgtcctcctgcactcccacaatataatctatacgtgtcaacacgccaattccaatttctcacaactatgctatataaggtttaagggagaaaagacagaggatctcacagggtaccattgtaatagacccctcaccaaccttaatgcccaaacatttggaaacctgcattttccaccatatgcacattggctttgtaacaaattcttgtcaacattttaaaaacaccatcaagtaaaggaatcatcagacccacccaatcttcagtgggtctctgctctttatctgttctgcaaaaaattcttcagagcatttccatgacgcaagtgaaattccaccctacatacatcacaggatatattcgattaaatatgcatggatcgctatgagaccccaaaaaaaaaaaaaaaactgaatgtgcttaacaagaatatctcataaacataatctcatttcaaattgactttttgatactggtcaaataaaacatacgtttttaataacctacgtttttaataaccattgtaagttaaaagaacgaactgtcctctacctgctttgagctggcgccaccatgttttaaagagctacctgggattaggatgcacatctccattaaggatcgaagcctgtcaccgaaattgaaatttgaacagataaatagttgtccagagagtgtcgtggtggtcaatttcaaaacgaaatgatttactcctaagttaaacttacttgtatgcaagctctttaaagttttcactccaacctctgatatgttgatccaaaagggcacgtgtaacagaactaatctcaaaaacattgggtgatcctaaaatcatctctaacatcacaaccccaacactccacatgtcgtatctgcaagaaaaaaaggtggtttcgtatttatatttggcgaggcagttgcattaaaaagagcaggatctctcatacttcaatgtcaaactggttggcccatggtgccagctgctgttcagaatggcttcgggtggtgcataatcatgagtttgttctgctctgaattcaagataatccaaattcttatgatgatcaggactcacaaaccggattaggtaaattttcaaaaaaacatacaaagaaaaggaaataccttgacggtcctgttgacccatataagtgttttattgtatactcatcaagtgcactgccaaagtcgatgatgcgcctagacagtgattacaagaccagaaggtaccaggaaacaagaaattacataagtggaggaccaaaagaattgagtgctacagaagtgtagaaatacatggagcaaaatgaataaactagacaactgaaatgtaatttaagtacatattagttttgaagttttgatccccatttggtacaccctttaagcatctgcctgacttgatgtcttcaaggcatatcaccatattctcttaggaacattgtaaattaatttccgtgagaataatcatctgtcacagactgtacactatatgaactatcataaatatcaaaaagtttcttaccgggttttatatctctgtgagtaatattgcgatcatggcatgcctttaaacctagcaactgaaaagaagaataaagcattagggaatatagtaagtacaaatagaattagattcctacgatgcatctgtcaaacaaaggaaggaaatcagaaaattctcagattcctaagcacataccaattgccatattattctccgcatttcttcttttcctgattctgtcgtcttcagccaggtccaccactttgacggacgaagtatctgcccgtgacttgcctcttcagccttttcagagctaatctctgcttcttccacagtgtacatcagctttgataaagatacaccctcgtggtgaaacacaagccatatgtcattatatcgagattcaaaatactctatgtatctagctatatgtttcaaaccctcttcagagagacccaattctgatgacgctgcttgagaacttgacgcttgcgttgcagaagaactctcacttacattatatgcatttagaaacagttcaccaaaatgcttctcccttagaccacttaaatagacggttggtcctctctcgacctgtttaggaaaaataatggtacaatgacgaaattaaattttagaagggcttgcatctacatgtccttatataggtcgaaaagatgacataacgaacagagaacaaactcttgtaatgaatattctatttgtgcaagaaccactcaatttgaaacaaattttattataagcaatgaacacatgagaactattgccagccccaaaccaaagaaacatagatacacttcttaccatcactctaaacatacaaagccagagaaagttgcagacacatatcatttttcaagggaaatttgagaaaatcccaaaaagaacacataccattatccgcttcaaaatgaaggagttattaggaccatcagtatcattatgaacaccattttttgatgtattctcatcttcattgatcgaactagtagcgttatttccttgatagcaatcccagtgaaatgccaaccatacttcaccaaatgcaccacgcccaaattttttcttcagcacatagctaaacaatcacatggtattattatacaattttatcagccaatttaaaagaatttgtttatcctaatttgaaacaactgtttccataatatggagataataatgataaacaatcatttcacaacaagagccaagtgcactgaaaccatctaaccaaaaggtaacaagaagacatgaaacgcgcaaaacaatgtcatttgactatatagccaagtgcactgaagaaaaccccccagcatgaaagaacaaagcatttggcataggttgctaagcacatgactacctaagatcatgtaaaaggatcgcaaccaccaacgatgatacaaaagagggggaaaaattatcaataccaaaggaaaagaagaagacacttgattccggaaatgaaataactgatcaagaaaaagaaataggcaccttgagtcaggaaatggaatctcatccgtcccgttcttagcaccaaacccatgtaagggtacagattcaagtaatccaaggaaagtagcaaaactatcaggattgatgcactgatcttgattctcgttggtagccgttccagaaggtaaacaccagcctttttcatcggaaaaaaattcagacgcacaaaaaaagggggaaaatcagagatttgattatgactaaacgctagttcattggaaccaaaatcaacaacaataaggcttctgacataaaagaggattccactgtgaaatttttcatttaccagggaattgctcggcagatgcaggtagaacctgaggtaagtcacccatgtaaccgttcaaattgttcatttgcccttgagatgccccaataaggttctctgacatataaaagcggcaaaaacttccgtttttaacctctacctagcaaaagaagcatggcccagatcatgtaagttgtaagatttttcaggtcaatgatgcaaaattttgtaacggttgataagaaaaattagagctgaccaccccctcattcttgcaattcaaaagcaatggtgtaagtcataagcttaatctgggaatatgggaatagtgagattgtgtcaactggggcataccaataacctgttaaacatggttccaagtggctgagcctgtttcaattgcaatggacccaaatttatatcattaggcactgctgaaaagaaaaagaaaaagaaaaaacttgattagcacatgaaattgtatgaacgattgtcaatgaagcttcaaaaccctacatttcatcacaggatgttagggaatttgattgcaaccagagaaactcacgtggaagcgtacagttgctacagggtagtgctgaagcaatcttgtctttgttgtcattcatactctgctccttccgttggagctgagtaactagattcgattttagagggacaacaacagcagccatattgtccatgcttcccttctcaaaggcagtattaaccaagcagtctgccaaagaaattgagcagtatgaaggcactcctgctccagagctagtttgattgtttacttcccacaaaagatcacatacttcttgcacctccaacttctcaaagatgccatcagatgacactaccaggaagctgtcattagccactagaggctgccagtccatcacctcaggtgcagagatgacaccataactgaaagagatatcaaaactcacactttatctctcaaaatgtaaacgagttcagcattaatcatgttcagatgcacagagagacactaacatacaacaaggaaggcctaccttctataagtaaggtcaccaattgcacgggagacagtcagctggccattcactcgtggcacaccggcccactcagtgacataacctcctgcagcttcaacacgaatcttttcatcctctctatttgggtgatggtcctttgtcaattctttggcaatgaaacgcagtagtccattgccatgttccagtttaaagtcagagaaccttgatggtgaagagccccgattgcgtcttcgctctctgtacaacttcaccaaagtagctgcaataaacaaacaccattgcaacaaactgtttataaataaatacaacactggctttttgttaggcagcttgattttagaaacagatgttgctaaacctctagcttcttccagagtctcaaatttttcagaacagagaagtgcttttgagtcaccgatactagcaaccattagttgaccatctgcaataagtgcaattgtagccgttgaacctgaattcagctttctgtttgatgcttcctggagaaaaacaaagtgtagctggttatatccttatcatgatagtaacaacgctcgacggagtgtatagaagatatccactataccttagtaaatgtgacatcaatgtcatggatcgctctcagcaatgcttccttcataatatccaaggggagagaatcatcaaaatgaagtggcaatgagtctcgaaacctgcaagaaaattgggacactgcaatgaagcgaaaatgacgacttgataaacgaaagagaaataaaatgaaaaggcactcaactgcatttgaaaatccaggttgtatagatgcatgatttcatcccgacttacgccgtgcaaaatgacactgtggtctcctttagttgggaatcgtccaatcaacttcctcgtcatagcagaaaatgtagcgtccaagagaaagttgatatgcaaagcaaagtaatccaataaaagttttgaagccatgtcactggcttctgcaccattatgtccgtcaaagactgctgcaattccaaccaaaacatcctttggtgttccagtcttgcctgtgagacgaggccatcagtattccctccacagctagcacatagatacaagatagaaattttccataccgggaaatggaatgcgaagatcaagagcacagagaagacgatcctcttggtagttcctccgaccttgaatagctgcggtatggcaacgaccagctccactatgagtaggagaaccccaattctggagaatccaacgagggcatttgggtgattgaaacacagctggagctccgccttgtttgtaaaccgccaaacacgtagaagattcccctcgacagttaatcaccaggaagaagaagacgaaaaatataataaggagccctagatttagcagacttgatttgatactggaggtcatcttcttccttacatggattgtgtgagatttgagggatttctctgctaaatctagggattaaacaaaacaaatatctaaccgacaacagaatccgagagtcctaaccaaacctactgatattccaaattcttctttattatcaatccgagagcaaaatgtttaaatctcaagtaaagatcgccagaaaatgaagctagagtagacaaaaatcaagctaccctttcactcttttgctcgtaaacatgcttgaaaggaacaattgcttcatgggaacaaaaatatgtaataattgtgtggcagaatcttgtcggtaataaaaggttggttacctctggaaggctctgagctcctccacccgcctgaaaacgaagaagaagaggaagaagaaagaagtcgagaacctttgacttcatccaaagggtttcttttgggccttttaatttcgggtttagtaaatatgatcgaaggggaaaaggcctctttaaaagcccagcccactaggactacgtggcagtaagtttgttaccaaattggatgactagtgtgatgaggcttggaatgttctgttgcggtttgtagtacttgttcttctcctaacaataacatgataatacagcataatccaaagagtttgcatcgagaggtgtaaagcggccacatggtcaccatgttcgcaagcacactccacgagacaaccaaaatacgacgtggcaattttttaccttttgtgacgtgttaacttaacttctttcccacatccgaaaggaaactttggaatctactccttcttggaaaaatccaaatgtgccaatcacttgtgtgtatatcgtcttttctatttaccaagacctcaaagctactactatttcttttcttcttttttttacctttgtagctagttttactcgtcagtcgtcactttactacattaaagctatccgattgatgccacgtagtcccgaccggtccggtgaggtggtcaactttttgtatacctggtttcaatatatattacttcgatatgtaaatcatgggatccaccacatacgattttaccttaatctcctcaaaagtataagttccggaactttctaagaagatatgcacccttcctccctctggtaaatagctctagaaagttcgaactccacttggtgactaaaagaattttaaggatcaccagctccccgctatatatatatatggatttaagtcacctacgtggccattgtcttcgccacatttcctgccccaactgccataaactaagtaactaaccaccagcaaaagcagagtactctgttttaaagaaaaaatacacttcccgctctttcttcttttggttctgtgctgttttggtcttctccaatacaggaaccccaaatgcatcgtttccttccttggattataatttacgaaaaatccaatcatagatcattagacttctagcattagcattgctaacaagatggacccgtcgtcaagctccagagcacggtcaatgccaccgccggtgcctatggagggattgcaggaagcagggccttctccttttctaacaaagacgttcgagatggttggtgatccaaacacaaaccacattgtgtcttggaacaggggaggcatcagttttgtcgtgtgggatccacattccttctcggccactattctgcctctatacttcaagcacaacaacttctccagctttgtcagacaacttaacacttatgtgagtatctctgtttctccactaaacgaccttactgtattttttgttttttttttcactatagtgttcccttaatcttatgtcttggaggaactcaacaatgccttcggcctttaattactgcaaaaggttaaacaatgtgtctatttgtgaattacttgttcactggatagtttagtactaagtaattatgctcaataataataatggctggtgaaacaagctagctagtagtgaaagagaagaagtttcttcgcaagttctggaaacctttatttataacaaaataaaaaagttctggaaacttttatccatatcaacctgcaataaaatattcaattattccatccaacaaaatataaaattgaagataatgttgctttccttttacagcgcagtagagtggcaggttcttcgtctgttatatataacatgtttacgtcgcaaaccaaaaaaaaacttatattatgatattcgattacttatttatctgcagggattcagaaagatcgaggcagagagatgggagtttatgaatgaaggtttcttgatgggtcagagggaccttctcaaaagcatcaagcgacgaacctcctcttcttcccctccttcgcttaactactctcagtctcagcccgaggctcatgacccaggcgtcgagcttccgcagctccgagaagagaggcatgtcctaatgatggagatctcgacgctcagacaggaggagcaaagagcgagaggctacgtccaagccatggagcagaggattaatggagcagagaagaaacagaggcatatgatgtccttcttgaggcgtgcggtggagaatccttcccttctgcagcagattttcgagcagaagagagaccgagaggaggccgcgatgattgatcaggctggcttgatcaaaatggaagaggtggagcacctgtcggagctggaggctctggcgcttgagatgcaaggatatggacggcaacggactgatggtgtggagagggagcttgacgacgggttttgggaagagttactcatgaacaatgaaaactccgacgaagaagaggcgaatgtgaagcaagattaggttttatgggttcatgtccgaaaaagaaaagtacaagtatcgatcaatcaaagctaatgaagactgagaaccaacaaaatgaactatgtgtataatatatagggttacattacaccgtcttctgttccattttttagaatttttggttccttttatttgatttttaatagcttttatgtataatttctgtttatttagtactgtagtgtatgctatggcttttagaataaaatttcaataatagtgtgtaaaaatgacaaaacattttatcgtttctttttaaaaatactttgcttttagcttgaaaatcttataaaatgggatatataaaagtattaattatcagaaacaaaagacgtaatattattttgcgtgtttttaagaaacttattcttaggtgtaaaacgggcttaaatactgcttgaacaagaatatgtgatgaaatcaggagcagccgggcttgcgattgcgacagaggcagcggtgggggtcagagacgcaaacgccgctaatggctccttcgtacttgcacaagttgtcgcaaaggccttctcccgcaccttttaaccagcacgggaagtttggtagaagcttgcactcccactcacacttttgcgcttgcgcgtctccttgcttcatcaatcctatatgtatacacagcaattaaatatatgatgttattccagatcgggttgcagtttgattgagagtatgcatgtacctgtggaaaccaataagaatacgaggattatggctgagaagctgatcgtcttccccatttttttgtttcttatgtttcgttgacttttaggtttagtgctacaccaaagaagaacatgtcaatcaaaaacgaacgcatgattatatatagatgacgtgcggagacacacccgcggctccttcagctctattctccgttaattaatttctccttgaaacccgattacttgtgaataaagtaatcttctctgatttatatttgccaaccttatgatcctgatgtttttgggtttaagcgtttagaataacttttttgattcgttcgtccacacgtccttatcgtatgatctgttaatttgatatgcatatttacagaaacgggccctagtgcttgttgttgaatatgggcctggtctggcccatattactatctcagaagtcagatcagaagcttgacccgaaaaagaaaaaaacgagagagataattcggaaacacgaacaccaatggtttaccgatgatgatgatgattggacaatggctacataaatggaatacgcggtaactaacatgagactactgagtaacatgatgtactctgcttcggcgatttcgtttccaagggttcgtctgcattgtagtattccgacagagccatcctgccggagaaacccattccgacagagcaatcagcccgtccaagtcccttctccgaagctcgcttgtttcgacggagtcctaactgaagcttttcaacggctggacgtcagcgaaaacaactctccagtcgaagcctttgcctacgttctcgagctttgtggtaaacgtagagctgtctcacaaggtcggcagctgcattcgcgcattttcaagactttcccctctttcgaattagattttttggccggcaagcttgtttttatgtacggtaagtgcgggtctctggatgacgcagagaaagtgtttgacgaaatgcctgacagaactgcctttgcgtggaataccatgattggagcttatgtttcgaatggtgaacctgcttccgctcttgctctctactggaatatgcgtgtggagggcgttcctctcggtctttcctcttttcccgccttgcttaaagcctgcgccaaacttagagatatccgaagtggctctgagcttcattctctcctcgttaaacttggctaccattcaactggttttatcgtcaatgcgttggtttccatgtatgctaagaacgatgaccttagcgctgcaaggcgtctgtttgacggattccaagagaaaggagatgctgttctctggaattctattttgtcttcatattccacgtctgggaaatctctcgagactttagaattattcagagaaatgcacatgactggccctgcccccaacagctacaccattgtttctgctctcacagcctgtgacggtttttcatatgcaaagctagggaaagagatccacgcttctgtcctcaaatcatcaactcactcttctgaattatatgtgtgcaacgccttgattgcaatgtataccaggtgtggtaaaatgcctcaggcagaaaggatccttcgtcagatgaataacgctgatgttgtcacatggaattctctgattaagggatatgtacagaatctcatgtacaaggaggctttagagttcttttctgatatgatcgctgctggccacaaatccgacgaggtttcaatgaccagcatcattgcagcgtcaggaagattaagcaatctcttggcaggaatggaattgcacgcttacgtgattaaacatggctgggattctaatttgcaggttgggaatacgttgattgatatgtattcaaagtgcaacctcacatgttacatgggccgtgcgtttcttaggatgcatgacaaagatcttatttcatggactacggtcattgccggttatgcccagaatgattgtcatgtagaggccttagaactcttccgggatgttgctaagaaaaggatggagattgatgaaatgatcctgggaagcatccttcgagcttctagtgtactgaaatccatgctcattgtcaaagaaatccattgtcacattttgagaaaaggtttacttgatactgtgatacagaatgagttggtagatgtctacggaaaatgcaggaacatgggctatgctactcgagtatttgaatcaattaaaggtaaagatgttgtctcttggacaagcatgatttcgtctagtgctcttaatggtaatgaaagcgaggctgttgaactctttcgacgcatggttgaaactggtttgtcagctgattctgtagcattgttgtgtatactgtcagctgcagcaagtttatctgcactcaataaagggagagaaattcattgctacttactccgaaaggggttttgcctagaggggtccattgcagttgcagttgttgacatgtatgcatgctgtggagatttacagagtgcaaaggctgtatttgaccggatagaaaggaaaggtttgctgcaatacacaagtatgatcaatgcatatggaatgcatggctgcggaaaagcagctgttgagttgttcgataaaatgaggcacgaaaacgtctcgcccgatcacatttcatttctggcacttctttatgcgtgcagccatgcaggtctgcttgacgagggtagagggtttctcaagatcatggaacatgagtatgaattggaaccatggcctgaacattacgtgtgtctggttgacatgctgggtcgtgcaaattgtgtagtggaagcctttgaattcgttaaaatgatgaaaacagaaccgactgcagaagtctggtgtgcactccttgcggcatgccgatctcactcagagaaagaaattggagagattgctgctcagaggctccttgagctagaacctaagaatccgggaaatcttgtgcttgtatctaatgtctttgctgaacaaggaagatggaacgatgtagaaaaagtgagggcaaaaatgaaagcaagtggaatggagaaacaccctggatgtagttggattgagatggacggcaaggttcataaatttacagccagagacaagtctcacccagagagcaaagagatatatgagaaattgtccgaggttactaggaagttggagagggaagtaggttatgtagccgatacaaagttcgttctgcataatgtagatgaaggggagaaggttcagatgctgcatggacatagtgagaggatagcgattgcttatggtctgctcagaacacctgaccgagcctgtctacggatcacaaaaaatttacgtgtctgtagagattgccatactttttgtaagctggtctctaaattattcagacgagacattgtgatgagggatgccaatagatttcatcattttgaaagtggactgtgttcttgcggagattcttggtgaccgaaccttgacaaagcatatgtttatcaatccagaccaagattattatgttattagctacacatagctttcacaggtttgcatatggctatttgcatgtgtcccaccaagagaaacaaatgaagtcgtcatgggaatgatgccttttttttgcaccatagaagggaaagagagagctagcaagggaattcaacgcaagagagaagatggagacctgattaagaggaaaaaagttaaggcctatcagcaattaaaagcaggaagcagagacctagacaccaaggtagggatagagtcgtctaactaggctgttcagcagagaccttgtaagccttttgagagtaaatgttttcaagacactcatttctcttttctctttgtggttacatctgcttttaaacgcacacctaccaaaccggtggatgaatctttcatagatacacctctatccctttgcattcaaacacaaaccacaaagtaccgctgctattttctttttacgtctttgtatttgcatcgtctaagagaatgatgggttgttttgtgggattttaatgcaggaggaaacatatgaggggtgattaaggcaaaaaccttaagatgtggtcatttagatacatggagtcaaactaagaatggaccttggcgaaagcttcttcacggtcaagatttaaaatcaggtacgacactgtgtacgtgagagagagagagagagagagaaagagattatagaaagaaagagatgtatcacaataaaggagtatatttagggtcacaggtggtggagatataggtatgcagggccaaggctctaatctcttcatagccctattgattttgtccctctctctctctctttcttcctctcttagctgtatgcattatgatgcgtcttttaattcactgtttcaggcttctttaattcgtggtgtctctctcctttttacccaaccatctcttaaaatttttaacatctgttcctcaaatcctctctcatctctttctataagtatctatagcgcctcttaaaccacaaagcatcacctctgtcttctctcatctcctttctgtattctctttcattgccttcacgtctgttgcaatttctccacttcttgagcttccgttttttacaattattgatccgtcaaatatgtgagatttgcacaacttgttgctcaggtattttgaagacaagtccacaagggaacaagtgaagctgccagcatgatctatctttggttaagagatgaatgtggaaacatattgcttaaacccaagctaggtcatgctctgacagcctcactccttcctggtttaggaccattcattgatgaagcattccacatgccgattgaaagaaaaataagagtcccgaacgcacacagttgactacacgaaaccggtgtaaggctctctgttttctccctgctttgacacactctccactttatttttctcatgtttttgcgctctagatctatcataggtgcatcatgttttagtgtttcaaagaacttagactgtgcaaagccaaacgttttaataaaaaggaaaacagtttaataccaaaatggtgtctctcactcaattacaagacaaagtatacctttcacaagtttgaccaaaacgaactactataacccttatttcaagacagtgtacttctagcatacatacttagtttaaaatgtacagacgacgtagctttaaaatgtacagacagtgtaatttacccttgacactgctgtaagtaaataaaccaaaattacactttactattcaccaatggctaccccaaagctcaaattcacaattctttttcctttattttcctaagccatcaacataacattttgaaccaatttagtagtgtcgtgttatgtttccatagacgtgaactgaaaagccaacttgttgcagcagtttgaaagaactttgaagccagtgaacataacctcgtgttccacgactcttttgatcagaagcagaagcatctcttggtggggaaccatcaaggtttcagatttgacccttttgatcgttcaagggagctggaagttatcttatcagacgagtcccactctgtgctcctgatcatcaattatccagccatccgtagagaactgcatctgctatggtaggcttctcaaggtttcttgagagatgggcttcttgaacccttaaataaggatcttggattcttaaagtaactgaggaatggtgtctcagaaacaggtatgaattttgtgaaaaagccgatcggccatgaaagggatgcaagtgctatgcaagttccccattgccacccgttaagccttactgtatccgcaaacttctttaggaattccaccataatgacttgaagcacaatagttatcgctattattccaatgaacaacctgtttctgtgaaggcctttgaacacatttttcttctccatctccctcgcattgaattc

SEQ ID NO: 1383 - DNA, 79153 bp, Arabidopsis thaliana
gatcgctttgaaaagaaaaaccggagtacaatatttcagttacggaaaataattgcgtacaaaaatgggcaaaaaaatggctctacgttacttaagcgagcaaaatcatttttactagaaaagagaactgaaaaagcaaagttttgtatttttttctcttcatatatatatatatatatatatatctttttttttttcatctttatatatatatatatatatatatatatatatatatatatatatatatatatatatatctaaaataggaattgagcaaggaaaatctcatactactaatttgaaatttaagaaaaaaaggaaggcgaatcgtagacgggaaattgttcttttgccgctctcggacgaatcgtctggtctgcttctttttccttcttcttatagtctttgctttttggccttaagaaaatgattttatcttttgataaagtttccatttttggtgatataatacaaatagtgtattagtagtttgattctcttcaccacggtgtcggtacgattgaagctcctccctccaagagccttcgtacagaggtatattttaattaattttgtgcatcatgatgattgcgggagctggttcccactttttcgctgtttatgaaaattactcactctcactgtttgatgaaagcaatcataaatctcgctgaaagctaccctttatttgttttaatctttaatctggtgcatgacttgacactgattggattgcctcatctctgtatgtagcagtttctccatgtatactcttttcttttttaagaaaaaattataatttattaagacttgttttgttatatggtttttgttttgaagacgtttctgctgaaatttcaagcaagtgtgtttgtcagatggagcggtatgaagtcttggagcagatcgggaaagggtcctttggctctgctcttcttgttagacacaaacaagaacgcaagaagtattctattctctctcattcattcattctctgcttttgcttctctcttgttgcttctctggtgattccatttgctctattcatcttcaccatttacagatacgttttgaaaaagattcgtctcgcccgccagtctgatagggctcgacgatcagctcatcaggaggtttgttcttgtttttctttttttttcttattggaccaaatgaaattagttggtggtgttggattaagatgatgatgatgagtttggacctccctccccttcatgtttcagatggagctcatttctactgtccgcaatccatttgttgtcgagtacaaagattcatgggttgaaaaggtctctccttctcatctccttttgctcattcttcttctgcctccttactctactcaatagtcaatactcatcatctctcttgtttcccagggttgctatgtgtgcattgttattggatattgccaaggcggggacatgtaaattggtttttgcccattttcaactacagacaagttgtgtttagtttgaagaaattggctcttattttcattttgaatattgcaggacagataccatcaaaagagcatgtggtgttcattttcctgaggaggtttgtctcactctcacccatcccttcacttcttacaatctatcactggatctaatatttgaacaaataactactaaatgatgcagaaattatgccaatggcttgtccaactattaatggccctcgattatcttcactccaaccatattcttcaccgcgatgtcaaggtaaacatgtaacctcactatcaattttcagaattttgttcctttttatgttccaagcatctaaattaacatctaaatgtcttttcagtgttctaacatattcttgacaaaagagcaagacatacggcttggtatgttttgtagattcatgtatctttaagcctttttgtcagttactaacgcatccacaatttcggtctcaggtgactttggactcgctaagattctaacttctgatgaccttacatcctctgtaagttctgtacaatgaaactaatttaaattttgtgacactgttattataagtcagtgtgtttataggttgttggaactccaagctacatgtgtcctgagcttcttgctgacataccttacggatcaaagtcagacatttggtcgttgggtataacaacaatacattcttctttgatattttactcctacacttgttcaccttgtgactaccgtttcatggatcatcatggaaaacaggatgctgcatgtatgaaatggctgctcataaacctcctttcaaagcttccgtaagtatccttacagttggtttttgattttggcattaaaacacataatgtaaaatgtgaaatcttgattgcaggatgtgcagacactgatcaccaaaatacacaagttgataatggatcctattcccgccatgtattccggctcattgtaagcctgaaatcatttcctctgttaacaacattaaccggcgttgctgtaccaacctcttttcctcccttatctgcagccgaggccttattaaaagcatgttgaggaaaaatcctgaactcaggccaagcgtatggttcctataatgcttatttgcttttgatgataagtaatccgtttgtggttgaactaagcattgttgttaactcgctgcaggctaacgagctgcttaaccatcctcatcttcagccttacatcagtatggtttatatgaagctagagagccccagaagaagcacttttccactccaattttctgagagggacgctacattgaaggaaagaaggcgttcatcattcagcaacgacaggagattgaatccgagtgtctctgatacagaagcaggttctgtttcttcttcaggaaaagcatctcctacaccaatgtttaatggaagaaaagtgtcagaagtaactgtgggagtcgtcagagaagaaattgttcctcaacggcaagaggaagccaagaagcaatcaggtgcagccagaacaccaagagtggctgggacctcagctaaagcaagcacgcagcgtactgtttttaaacatgaactagtaaggaagaaaaacttaaagctttatgtatttgagatacaatcagggagtgatctgactatatatgttctgtgctgtgtacagatgaaggtatcgaatcctacagagaggagaaggagagtatctctgccgttggtcgtggaaaatccttacacttatgaatcagatattacagctctttgttccctaaattcaccggatgtttctgtaaacactccaagattcgacaagatcgctgaattccctgaagatatcttccaaaaccaaaacagagagacagcgtcaagaagagaagtagctaggcactctttttcttctcctccttgtccgcctcatggtgaggacaattccaacggttcgatcacaaaggacaagtgtactgtacagaaaaggtcagtttcggaggtaaaacagagaaggttcgacacgtcatcgtatcagcagcgtgcggaggctctggagggactgctggagttcagtgcaaagcttttgcagcaggaacggtacgatgagctcggggttctgcttaaaccctttggagccgagagggtgtcttcgagggagacggccatctggttgaccaagagcttcaaagaagcttccgtgtagatgaagcaaccataacaaacgctctatctcttcttctcttggcttgcttttgtcctgtgtggtttgtatataaataaaaacgacgacgcattcggttctcattgcttaaatgtttatccgaaagcttgcagtttgggccttgttgggccaattcgttagtggatttgtttggacattttgaatttggtggaaaatgtttgggtcgtttcgtagaggttgagaaaaaagcggggttcttcttatcaataaacaaactttgtgagagaatttagcgaagaacgaggaaatcgggagaaagtgatactatcactgtgatagtgaaaggagctttgcttgtgaagagagaagaaatggcagaaacagagattcttgagccctatcaactgtcgttctcggatcttcttttgtcctctcgtaatcgctctcaatggatctcgaaaaatgtgatggacgctcttggccccaccggtcctggtctcctttgtatcaccggcgttcttggctccgcctttctccgccgtaaactccttcctatggctcggaagctggctctgctcgatccggacaagcggaaactcattctcatggtaaccccccggcaatttttcaagatttccattaatccaagttgtatatctggtgctttgttctcaagattgaaactttgagtagtgttagttggttcatgagtgttactgattcggtgtgtttactgccaaaaggagcaccacttgggtagcgacgttcctctcaagaatccagaacgagatgtctcctcttttgcaatgcagctcaattatgaaagaacaacttataaatcctcactgggaaagctgtggttcgatgaggctggatcaaaactggacttgcaggaggatgatgatgatgctttcacaaatcttggtggtgcttttaaagaactcgggttctgcatgagggagttgggcttgtccatagctcgtctatgcgacagggagattggcggaggcttgctggaggagagcttactggattcttgcacagccaaaggacgtctcatacattaccactccgctgctgataaatatgctctcagagaatcccagaggagaaaccaatctggtaaccgagtatcaagcaagaggagagtccagaacgctgctgagcaagagctgaaccgtagaaatggagctggtttgagtgggagtcacttcaatctgtggcagcagtggcattacgattatggcatctttactgttctcacggatcctatgtttctatcgccgtattcctatcaggaattcagtttgatgagcagccattcttacctgcagatctatcatcccagcaagaacaagttctacatggtcaagactccacaagacagttttttggtccaaatcggagaatctgctgatattttgtccaaagggaagctacggtcgacccttcactgtgtgtgcaaaccagagaagctggatcacgtaagccgtgagacatttgttgtcttcttgcacccaaagtggagccaaactttctcagtctcagaatatacaatggaacatctaaggtcggatgaggtcgtccctagaccagatttacagaatattgttccacctctatcgtctcggttaagggatgggatgacttttgccgagttttcacgtgaaacgacaaagcagtactacggagggaatggtttgcaatctaatagatagccgtgccccaggttaatagcttgtctaatctttaggtagttaaattcaaaataatctttaggtaatgagtagtggaaggcaagaggaatgagccaagagggttagttgtaaaagagattagattaaagggagagttgggattcgttatgtgtacttcgatgttggagccaaaacaacagtgaaagctgttacatcgttttcacagtcaaaagctctccctttcaaacatgctttttggttgtggttgctcttctttagtctctctctgtgactcagtttatgttcctgttgtgtctcccctgttgctgttccaaacttacatctctttgtttgctttcaagcgtcgcattaagacaaaagtggtgttattaaagtaaaagctgcctctctccctacacacagattgattcctttagggaatcaatcatcttttctttgacacttttgatttatagttttttttcatgaatggttttttgtacgtgtagatcaaaccgacaacagggtttagctcgcaagtcttttcttttgtgaattcaaaacaaagtttcaaactttgtcccttcgaagatgcttgctttgacctaaagaggtgctttttgcatcgaaagtgacctcggtttcaaaaccctaatctaagaatagaaacggatatggtgtaggtatgtaggtgtctattgtaagcaaatcaaaagcaaaagaagatggtacctaaaaactaaaagtagtttaaagaaacaataaaatggaaaagagggttcatcattcaaagtggcagatacattcaatttttaattggtagtataaaatacaaaacgtccaaacaagaacaatgattgcaaggcaaaggaataatcagagagacaaaatgactagtatttttctaagggattggttataaagaatggaaaatgtgggtatccctaaaaattagacagagcaaaagggaataaaggatgtatctttattcagtggtcacccacctatagtttccaaagtgcaaataaatttaatatagatacacatgatgagattttgaaatatcttatatatgcgtttttatatatatcaaaatgctctagtaccaaagaatatagatcaacaatcatgttaatttgtacaaagatgaaagaagatcagaagttttgattgtgtagcctgaagaaaaccttggatggatgaataaactaattgccaagttttgtgtcattgaagtggaaaagagacagagagaagaaggtgacgtaagggaaagcacgccaaggcagcagcatgtgtgaatgtacgcaaaggtcgcagctttgtgtttcaaaaccgaagcagaagggaccaaattaagagactgactgatcatcatacacagtcgtttcattcctttattctcatctttctcttcctcccattttctcacaccaaatttcagcacctaatccgttagtttaaccatgatccacaacaataaaccaagttgtttgattggtttaaacaagacactctaaacgcaaattcaaccttcttttcctttcttttttggtcaattgaaacataaatgtctgataacctatgactgactagtcaagctatcctaatgtttctgattaaattaagaaaaggcaaatacaaggatgacttgattccctcctttttctcaagactcgttgatacatacatctaaagtaatatttatgtgtaataaaaaatgggattggcaaagatgcggccttattattgaaaagcgacgtctttgttttgtatagtagtaatccattatttatgcaacgactatatattatgtcaagagtagtactactcactcctactctcatcgaaatataatcacatatttctttaaaagaaaaagaaaaggtgaaatacctaaacgttactttgtctatctatatatatacacacacataagtttcctagtcaagctctgaagtcgaagcaaagttaattacagagagagagaaaggatggagagagaactcagacgaccgaacccaatcaacagctctcgccggccggagatattttcttcaggcggtagtagtactcaactaccggaaagcccacgaggcccaatggagttcttgtctagatcctggagtgtctctgccttggaagtctccagagctctccacaccgccaaatcagcttcagccaccaacaggcctccctcatccattaacactccgataccggaagaaacgctaaaccctgagaaagaagaatgtccgccggagaacagtactagtgttagtagccagttctcgttcgctgcctcggccacttcacagcttgttcttgagcgcataatgtctcaatcggtacggttacatagttatggaccgaccgacacactctgtttttgtatcttgatgatgagtttattctgttttgaaaaatgaaggaggtgtcaccgttaacgtcggggaggctatcacacagcagcggcccactcaacggcggcggttcttttacggagacagacagtcctcctatctccccttccgatgaattcgacgacgtcatcaaggtacttcttcccttatactatctctctaatccttccttcctaggtttatccttggtttatcctttttcttagaacgtaagtctccgccatactttagagtttgttagcaaagtaaacaaaaattatgagtcaaaagaaaagcagaggcagcagacagaaacagatttgactttgactctccactttacaacctgtgtttgtttactttaacctctctcattcatttcacccacaaaaaaactacattgtttttttttgtttcttgttcattcatatgaccaatctttagttggtagaaggtctccttaaattgggtcgttgccatacataattttaaggaagtgctgcaaggtttagccttctgggtcttgggacttataaagctggtcggcgatcattaaagcgatagattgatagtaatgcagtttcaatgttttcttttttttcttccattgaatgctctgtctctactgcatttacttgatgaattggagttcataaaagattaaagacataattggttggacacaggaataggaatgttacggtaacgcctagagctcctctttggttggctcattttaagaaagttatcggtaaatgcttttagagcgagcagtcactttacctccatttccaagcagttcattaatcctttatttgctttttgtagtccaatataatgccatcaacttgttggatttttcattaagtcagcctatctaataaaccaatcctaatgcagtattttcgcacccacaacaccatacatcctctcttctccggcacaggaggcagccgtggtaccaccggaaatgggagcaatacccccatggctggaaccggtccaaagacagttggtaggtggctcaaggaccgtaaggaaaagaagaaagaagagactaggactcagaatgcacaggttcacgcagctgtttctgttgcagcggttgcatctgctgtggcagctgtagcagcagccacagcagcttcttcccctggtaagaacgagcagatggccagaatcgatatggccatggcttcagcggctgctctggtggctgctcagtgtgtggaggctgcagaaatcatgggagcagatagggatcatttgacatccgtggtgagctctgccgtgaatgttaagtcccatgacgatattgtcacccttactgcagctgctgcaacaggtactgcattaaaacgtagtcacccttacttctgtagagattccatacctgaattcacccccttttcttttgcagctctgcgaggagcagctacactcaaggcaagagcgcttaaggaagtatggaacatagctgcagtattgccagccgagaaaggggcaagttcagcgttgtgtggacaggttgacacaaagcatagtgatagcagctttagtggagaattacctgtggctggggaagacttccttggcgtctgtaaccaggaattactagctaaaggcactgagctcctcaaacgaactcgtggaggtactccaaagctacacccgtataaatgatttgtaagccaagtaaaaagcaagggtcgctgaccttgaattttgaaagcaggtgaactccactggaagattgtctctgtctacatcaacaaagcaggccaagctgtgctgaaaatgaaaagtaaacacgttggagggaccttcacaaagaagaagaaacgtaggttcttctcagcacaaacatttcatctcttacactagcctggcttttaaagtaaagctagatagataatacaagtcataatagtctttgatttggacttgtgttgcagatatggtgcttgaagtgagaaaggatatacctgcatgggctggcagagatcttttcaacggagacaagcatcactactttggcttaaagacagaaacaaagagggtcattgaatttgagtgcagaaaccaaagggaatacgagatatggactcagggcgtatccaggctacttgccattgctgctgagaagaagcagaaaagttccatgtccaaatggatggcaccttaacaacataagctaggaaagaagtagatgctttgtagaacgaactgcttatgataagaataggtttaaacataatggagtagaagacattcccttttgtaatatccttttattcaattgagtgaacagagatgacttctaaagctaacaacaaccttcacaagtacaaatgtattggattctcctatcatgttacaagcagtgatcaacatttctttacaacccaaatttccttttgcagacaaaagaatttgaacatatgaactagataacaatggcacagtcttaagagcaatctgaaagagacaagactgcctaactatcaacagcccttaagagagtgaggagagataggaagagattaatgacatccaaataaagagaaacagcagcccagatgtactcgtcataggagtgcctcttgatcaagttgtcggtatcatatacaatgtagccacagaagatgatggatgccaaacaaccatagatcatcacagagatctttcctaaagggaagagaatctgcagcaataaagatagtatttaagctcttattgtggaagaagagaacattgaagccttgtgagcgatattgatacctggatgaaggaaaacaccatgaggacaatgacagcaccgaacaagaaaggtccgaggaagttgaagtcatggcctcttttggccgcccagaaagtgtatagagtgagggatatgaccacaacagcggtcaaaatcacagattccagaatcaccttccctgtaatcaaacaaaacacgttagggaaagaataaggagaaaacagaatcgttcaactggatcatacataccgcttgtaaaggcgcaggtcaagccaaccgcaaaggcaagagcgacggtgaaaatcccgagtaacagatagttcacagggtgcttctggtgatagtaatacaaaggacacataactgcacacacacaaaaacgagaaagcagatcaaagagccggagatgatggagagatagaatccaaggagtaccgtaccgatcaatggagtcaatataagaagtatgtagagagcgaagccggcggtggtggtggtgaagaatacagaaatagaatgaaccttaacgacggtggcagcgacggcgattgtaacgagcagctggatggagatgatggaatagaccttgcggatgaaagaccatcggagctccgggctctccgacatcatcgggtagagaggcgtctgagccgactccaaatcatgcttctgattccacatcttccggattcgtttttttttgtcaacgccggtgagaagtcttcagcaaaatgcgaatgagatgtgaggacgatcccgattcctccttgaagaagaagaagaagtaatagactccgagagaggcggccaagagaagaaccttcccgatacgtcccgcaattaaataatataatcagacggctccgatcttgacacctggaattaagattattcagtgggccggcctctgaagaggagaaacaacgttaatgatgcactcatttctacagcccatttccattggatttgatttatttttcacatcattggttggattttgccacaaatgattgtgccaattaaaaaccatttcaacaactttcttcacatttttcgtccacatatacacacccacttgtactttgaattattataattgttcttatactttgttccaattttcaatttacaaacaaaacaattatggctagaccaaaaactaacgaattagatggtagaaaacagaatacacaaaaattggtccttgttgaaaaattagttgcacctacaaggtatgagttgtgattgaatgttagtgcagtatacagaaccagaaagaaaaagataaaacattaaacaagattgcaacgaggtgatactagtcagtcacttcacttaccagagaataatgactcggaagaggctaccagtaagtaagtcacccatatgatgcaaaggtaccattaagtttataatagctgctgttttcttcttcaacctacaataccaaggttgactcattttattataaagtacttgtacactttccttgggcatttgtatggtaatgtcttggtgggaacataccaataactcgttaaacatggttgaaagtggttgagtctgcttcaattgcaatggattaaaagttccatctgttgaaaaacagatatatttagaaatgaaagatcactcttcatcccatacggaataagttgggttgtgatgagagaaactcacatggcagtgcatatgtattcttcatcttgaatcccgaaggacccacagattgctcttttggttggctctcccaatctagattggattttagaggaaccacgactgcagccatattatccatacttcccttctcaaaggcagtattaaccaagcagtctgccaaagatattgagcaatatgaaggcactcctgctccaaagctagtttgattctttacttcccacaggcgatcgcatgcatcttgcacctctaacttctcaaagataccatcagatgacactaccaagtagctgtcattagccactagaggctgccagtccatcacctcaggtgcagagatgacaccgtaactgaaagagatatcaaaactcacatttcaacttctcatagtgtaaaccagctagaatcgtgttccagagagattctaggatacaaccagcagtgccaaccttctataagtaaggtcaccaatcgaacgggagacagccagctgaccattcacccttggcacaccggcccacttggtgacataacctcctgcagctttcactcggagcatttcatcctctctatctgggtgatggtcctttgtcaattctttggcaataaaacgcatgagtccagtgcgatgttccagctttaaatcagagaaccttgatggggaagagtcttgattgcgcttacgctctctgtacaactttattaaagtagctgcaataagcaaacaccaaaagaacaaaacgttcattcattcccctatactcttagtggcttcacaaggttggttatagtctaaaaagggatgctgcgggaacctttagcctcttcaggagtctcatatctttcagaacacaaaagtgccttagaatcaccgatgctagcaaccagtagttgaccatctgcgataagtgcaattgtggccgttgaacctgaatccaactttcgagtagatgcttcctgcattaaacaacagagtctaatcacgctactgaaaaaacaacggtccaaatgatagagtagaaggccatgcaccacaccttagtaaatgttgcatcaatgtcgtagatagctctgagcaaggcttctttcagaatatccaagtgaaaattgagcggcaatgaatcttggaacctgtgtaaaaaagtgagtgggacagggttgcaaaatcatatctcgtgagaagaacaacattctatgtcacgaggactacctttgggaatcgaggtcgtatagatgcatgagtgaatttggtagctttccagtgagctccttagaaaatgttgcgtccaggagaaagtaaatgtggagagcaaaataatccaacaaaagttgtgaagccatctcactggcttctgaaccactgtggccgtcaaagacagctgcgattccaaccaaaacatcctttggtgttccagtcttcttgcctgcgaatcatcttatcttggggaataaaaaaaaaacagttgattctctttggcgatcccaaggcaacgatgcataccgggaaagggaatgcgaagatcaagggcacagagaagacgatcctcctggtatttcctccgcccttgaatcgccgccgtatggcaacgactggcgggggaggagaaggatcggcgattctggagattccagagagggcaattgggagatcggaaaactgccggagctccaccatatttgtaaatactcaaacaggttgaagattccgcggcaacgttgttaatactaactacaacgataaataaagataccaaaatttcaacatctttcacaaccgatatcatcttccgttaagaagaaaaaacaactcgtattttctaccacgcttatttatttaccaaccgaattttaggacttaatttacaacaattatggacaacaaattagttacaaaatgtgactaataagaaaaaaaaaaagaagacatcttgaggtaactttatttacaaggaaaagacaagaggctatttataaaatcgtccacaaccttggattggatggctacctgcttccctttgatgtctctgcaagttcagaatcttcccttgctcgttttaaccttgttcctacataatccactgtagctcatattattttatattcaaacattacatactagagtttgacttattataatttccgtttgtgtgaactctgatattattttatattcaaacattacatactattgtttgtcaatatgtcattttcgatcttctaagtaaactcatagttagttaaaatgtagaaaggagtttagttactagatgataaaatgacttactcttcttctctactcttaggagctgggagggggctggaaataagggtgctgcagagcctcatctacggttactctgtcctcctgcactcccacaatataatctatacgtgtcaacacgccaattccaatttctcacaactatgctatataaggtttaagggagaaaagacagaggatctcacagggtaccattgtaatagacccctcaccaaccttaatgcccaaacatttggaaacctgcattttccaccatatgcacattggctttgtaacaaattcttgtcaacattttaaaaacaccatcaagtaaaggaatcatcagacccacccaatcttcagtgggtctctgctctttatctgttctgcaaaaaattcttcagagcatttccatgacgcaagtgaaattccaccctacatacatcacaggatatattcgattaaatatgcatggatcgctatgagaccccaaaaaaaaaaaaaaaactgaatgtgcttaacaagaatatctcataaacataatctcatttcaaattgactttttgatactggtcaaataaaacatacgtttttaataacctacgtttttaataaccattgtaagttaaaagaacgaactgtcctctacctgctttgagctggcgccaccatgttttaaagagctacctgggattaggatgcacatctccattaaggatcgaagcctgtcaccgaaattgaaatttgaacagataaatagttgtccagagagtgtcgtggtggtcaatttcaaaacgaaatgatttactcctaagttaaacttacttgtatgcaagctctttaaagttttcactccaacctctgatatgttgatccaaaagggcacgtgtaacagaactaatctcaaaaacattgggtgatcctaaaatcatctctaacatcacaaccccaacactccacatgtcgtatctgcaagaaaaaaaggtggtttcgtatttatatttggcgaggcagttgcattaaaaagagcaggatctctcatacttcaatgtcaaactggttggcccatggtgccagctgctgttcagaatggcttcgggtggtgcataatcatgagtttgttctgctctgaattcaagataatccaaattcttatgatgatcaggactcacaaaccggattaggtaaattttcaaaaaaacatacaaagaaaaggaaataccttgacggtcctgttgacccatataagtgttttattgtatactcatcaagtgcactgccaaagtcgatgatgcgcctagacagtgattacaagaccagaaggtaccaggaaacaagaaattacataagtggaggaccaaaagaattgagtgctacagaagtgtagaaatacatggagcaaaatgaataaactagacaactgaaatgtaatttaagtacatattagttttgaagttttgatccccatttggtacaccctttaagcatctgcctgacttgatgtcttcaaggcatatcaccatattctcttaggaacattgtaaattaatttccgtgagaataatcatctgtcacagactgtacactatatgaactatcataaatatcaaaaagtttcttaccgggttttatatctctgtgagtaatattgcgatcatggcatgcctttaaacctagcaactgaaaagaagaataaagcattagggaatatagtaagtacaaatagaattagattcctacgatgcatctgtcaaacaaaggaaggaaatcagaaaattctcagattcctaagcacataccaattgccatattattctccgcatttcttcttttcctgattctgtcgtcttcagccaggtccaccactttgacggacgaagtatctgcccgtgacttgcctcttcagccttttcagagctaatctctgcttcttccacagtgtacatcagctttgataaagatacaccctcgtggtgaaacacaagccatatgtcattatatcgagattcaaaatactctatgtatctagctatatgtttcaaaccctcttcagagagacccaattctgatgacgctgcttgagaacttgacgcttgcgttgcagaagaactctcacttacattatatgcatttagaaacagttcaccaaaatgcttctcccttagaccacttaaatagacggttggtcctctctcgacctgtttaggaaaaataatggtacaatgacgaaattaaattttagaagggcttgcatctacatgtccttatataggtcgaaaagatgacataacgaacagagaacaaactcttgtaatgaatattctatttgtgcaagaaccactcaatttgaaacaaattttattataagcaatgaacacatgagaactattgccagccccaaaccaaagaaacatagatacacttcttaccatcactctaaacatacaaagccagagaaagttgcagacacatatcatttttcaagggaaatttgagaaaatcccaaaaagaacacataccattatccgcttcaaaatgaaggagttattaggaccatcagtatcattatgaacaccattttttgatgtattctcatcttcattgatcgaactagtagcgttatttccttgatagcaatcccagtgaaatgccaaccatacttcaccaaatgcaccacgcccaaattttttcttcagcacatagctaaacaatcacatggtattattatacaattttatcagccaatttaaaagaatttgtttatcctaatttgaaacaactgtttccataatatggagataataatgataaacaatcatttcacaacaagagccaagtgcactgaaaccatctaaccaaaaggtaacaagaagacatgaaacgcgcaaaacaatgtcatttgactatatagccaagtgcactgaagaaaaccccccagcatgaaagaacaaagcatttggcataggttgctaagcacatgactacctaagatcatgtaaaaggatcgcaaccaccaacgatgatacaaaagagggggaaaaattatcaataccaaaggaaaagaagaagacacttgattccggaaatgaaataactgatcaagaaaaagaaataggcaccttgagtcaggaaatggaatctcatccgtcccgttcttagcaccaaacccatgtaagggtacagattcaagtaatccaaggaaagtagcaaaactatcaggattgatgcactgatcttgattctcgttggtagccgttccagaaggtaaacaccagcctttttcatcggaaaaaaattcagacgcacaaaaaaagggggaaaatcagagatttgattatgactaaacgctagttcattggaaccaaaatcaacaacaataaggcttctgacataaaagaggattccactgtgaaatttttcatttaccagggaattgctcggcagatgcaggtagaacctgaggtaagtcacccatgtaaccgttcaaattgttcatttgcccttgagatgccccaataaggttctctgacatataaaagcggcaaaaacttccgtttttaacctctacctagcaaaagaagcatggcccagatcatgtaagttgtaagatttttcaggtcaatgatgcaaaattttgtaacggttgataagaaaaattagagctgaccaccccctcattcttgcaattcaaaagcaatggtgtaagtcataagcttaatctgggaatatgggaatagtgagattgtgtcaactggggcataccaataacctgttaaacatggttccaagtggctgagcctgtttcaattgcaatggacccaaatttatatcattaggcactgctgaaaagaaaaagaaaaagaaaaaacttgattagcacatgaaattgtatgaacgattgtcaatgaagcttcaaaaccctacatttcatcacaggatgttagggaatttgattgcaaccagagaaactcacgtggaagcgtacagttgctacagggtagtgctgaagcaatcttgtctttgttgtcattcatactctgctccttccgttggagctgagtaactagattcgattttagagggacaacaacagcagccatattgtccatgcttcccttctcaaaggcagtattaaccaagcagtctgccaaagaaattgagcagtatgaaggcactcctgctccagagctagtttgattgtttacttcccacaaaagatcacatacttcttgcacctccaacttctcaaagatgccatcagatgacactaccaggaagctgtcattagccactagaggctgccagtccatcacctcaggtgcagagatgacaccataactgaaagagatatcaaaactcacactttatctctcaaaatgtaaacgagttcagcattaatcatgttcagatgcacagagagacactaacatacaacaaggaaggcctaccttctataagtaaggtcaccaattgcacgggagacagtcagctggccattcactcgtggcacaccggcccactcagtgacataacctcctgcagcttcaacacgaatcttttcatcctctctatttgggtgatggtcctttgtcaattctttggcaatgaaacgcagtagtccattgccatgttccagtttaaagtcagagaaccttgatggtgaagagccccgattgcgtcttcgctctctgtacaacttcaccaaagtagctgcaataaacaaacaccattgcaacaaactgtttataaataaatacaacactggctttttgttaggcagcttgattttagaaacagatgttgctaaacctctagcttcttccagagtctcaaatttttcagaacagagaagtgcttttgagtcaccgatactagcaaccattagttgaccatctgcaataagtgcaattgtagccgttgaacctgaattcagctttctgtttgatgcttcctggagaaaaacaaagtgtagctggttatatccttatcatgatagtaacaacgctcgacggagtgtatagaagatatccactataccttagtaaatgtgacatcaatgtcatggatcgctctcagcaatgcttccttcataatatccaaggggagagaatcatcaaaatgaagtggcaatgagtctcgaaacctgcaagaaaattgggacactgcaatgaagcgaaaatgacgacttgataaacgaaagagaaataaaatgaaaaggcactcaactgcatttgaaaatccaggttgtatagatgcatgatttcatcccgacttacgccgtgcaaaatgacactgtggtctcctttagttgggaatcgtccaatcaacttcctcgtcatagcagaaaatgtagcgtccaagagaaagttgatatgcaaagcaaagtaatccaataaaagttttgaagccatgtcactggcttctgcaccattatgtccgtcaaagactgctgcaattccaaccaaaacatcctttggtgttccagtcttgcctgtgagacgaggccatcagtattccctccacagctagcacatagatacaagatagaaattttccataccgggaaatggaatgcgaagatcaagagcacagagaagacgatcctcttggtagttcctccgaccttgaatagctgcggtatggcaacgaccagctccactatgagtaggagaaccccaattctggagaatccaacgagggcatttgggtgattgaaacacagctggagctccgccttgtttgtaaaccgccaaacacgtagaagattcccctcgacagttaatcaccaggaagaagaagacgaaaaatataataaggagccctagatttagcagacttgatttgatactggaggtcatcttcttccttacatggattgtgtgagatttgagggatttctctgctaaatctagggattaaacaaaacaaatatctaaccgacaacagaatccgagagtcctaaccaaacctactgatattccaaattcttctttattatcaatccgagagcaaaatgtttaaatctcaagtaaagatcgccagaaaatgaagctagagtagacaaaaatcaagctaccctttcactcttttgctcgtaaacatgcttgaaaggaacaattgcttcatgggaacaaaaatatgtaataattgtgtggcagaatcttgtcggtaataaaaggttggttacctctggaaggctctgagctcctccacccgcctgaaaacgaagaagaagaggaagaagaaagaagtcgagaacctttgacttcatccaaagggtttcttttgggccttttaatttcgggtttagtaaatatgatcgaaggggaaaaggcctctttaaaagcccagcccactaggactacgtggcagtaagtttgttaccaaattggatgactagtgtgatgaggcttggaatgttctgttgcggtttgtagtacttgttcttctcctaacaataacatgataatacagcataatccaaagagtttgcatcgagaggtgtaaagcggccacatggtcaccatgttcgcaagcacactccacgagacaaccaaaatacgacgtggcaattttttaccttttgtgacgtgttaacttaacttctttcccacatccgaaaggaaactttggaatctactccttcttggaaaaatccaaatgtgccaatcacttgtgtgtatatcgtcttttctatttaccaagacctcaaagctactactatttcttttcttcttttttttacctttgtagctagttttactcgtcagtcgtcactttactacattaaagctatccgattgatgccacgtagtcccgaccggtccggtgaggtggtcaactttttgtatacctggtttcaatatatattacttcgatatgtaaatcatgggatccaccacatacgattttaccttaatctcctcaaaagtataagttccggaactttctaagaagatatgcacccttcctccctctggtaaatagctctagaaagttcgaactccacttggtgactaaaagaattttaaggatcaccagctccccgctatatatatatatggatttaagtcacctacgtggccattgtcttcgccacatttcctgccccaactgccataaactaagtaactaaccaccagcaaaagcagagtactctgttttaaagaaaaaatacacttcccgctctttcttcttttggttctgtgctgttttggtcttctccaatacaggaaccccaaatgcatcgtttccttccttggattataatttacgaaaaatccaatcatagatcattagacttctagcattagcattgctaacaagatggacccgtcgtcaagctccagagcacggtcaatgccaccgccggtgcctatggagggattgcaggaagcagggccttctccttttctaacaaagacgttcgagatggttggtgatccaaacacaaaccacattgtgtcttggaacaggggaggcatcagttttgtcgtgtgggatccacattccttctcggccactattctgcctctatacttcaagcacaacaacttctccagctttgtcagacaacttaacacttatgtgagtatctctgtttctccactaaacgaccttactgtattttttgttttttttttcactatagtgttcccttaatcttatgtcttggaggaactcaacaatgccttcggcctttaattactgcaaaaggttaaacaatgtgtctatttgtgaattacttgttcactggatagtttagtactaagtaattatgctcaataataataatggctggtgaaacaagctagctagtagtgaaagagaagaagtttcttcgcaagttctggaaacctttatttataacaaaataaaaaagttctggaaacttttatccatatcaacctgcaataaaatattcaattattccatccaacaaaatataaaattgaagataatgttgctttccttttacagcgcagtagagtggcaggttcttcgtctgttatatataacatgtttacgtcgcaaaccaaaaaaaaacttatattatgatattcgattacttatttatctgcagggattcagaaagatcgaggcagagagatgggagtttatgaatgaaggtttcttgatgggtcagagggaccttctcaaaagcatcaagcgacgaacctcctcttcttcccctccttcgcttaactactctcagtctcagcccgaggctcatgacccaggcgtcgagcttccgcagctccgagaagagaggcatgtcctaatgatggagatctcgacgctcagacaggaggagcaaagagcgagaggctacgtccaagccatggagcagaggattaatggagcagagaagaaacagaggcatatgatgtccttcttgaggcgtgcggtggagaatccttcccttctgcagcagattttcgagcagaagagagaccgagaggaggccgcgatgattgatcaggctggcttgatcaaaatggaagaggtggagcacctgtcggagctggaggctctggcgcttgagatgcaaggatatggacggcaacggactgatggtgtggagagggagcttgacgacgggttttgggaagagttactcatgaacaatgaaaactccgacgaagaagaggcgaatgtgaagcaagattaggttttatgggttcatgtccgaaaaagaaaagtacaagtatcgatcaatcaaagctaatgaagactgagaaccaacaaaatgaactatgtgtataatatatagggttacattacaccgtcttctgttccattttttagaatttttggttccttttatttgatttttaatagcttttatgtataatttctgtttatttagtactgtagtgtatgctatggcttttagaataaaatttcaataatagtgtgtaaaaatgacaaaacattttatcgtttctttttaaaaatactttgcttttagcttgaaaatcttataaaatgggatatataaaagtattaattatcagaaacaaaagacgtaatattattttgcgtgtttttaagaaacttattcttaggtgtaaaacgggcttaaatactgcttgaacaagaatatgtgatgaaatcaggagcagccgggcttgcgattgcgacagaggcagcggtgggggtcagagacgcaaacgccgctaatggctccttcgtacttgcacaagttgtcgcaaaggccttctcccgcaccttttaaccagcacgggaagtttggtagaagcttgcactcccactcacacttttgcgcttgcgcgtctccttgcttcatcaatcctatatgtatacacagcaattaaatatatgatgttattccagatcgggttgcagtttgattgagagtatgcatgtacctgtggaaaccaataagaatacgaggattatggctgagaagctgatcgtcttccccatttttttgtttcttatgtttcgttgacttttaggtttagtgctacaccaaagaagaacatgtcaatcaaaaacgaacgcatgattatatatagatgacgtgcggagacacacccgcggctccttcagctctattctccgttaattaatttctccttgaaacccgattacttgtgaataaagtaatcttctctgatttatatttgccaaccttatgatcctgatgtttttgggtttaagcgtttagaataacttttttgattcgttcgtccacacgtccttatcgtatgatctgttaatttgatatgcatatttacagaaacgggccctagtgcttgttgttgaatatgggcctggtctggcccatattactatctcagaagtcagatcagaagcttgacccgaaaaagaaaaaaacgagagagataattcggaaacacgaacaccaatggtttaccgatgatgatgatgattggacaatggctacataaatggaatacgcggtaactaacatgagactactgagtaacatgatgtactctgcttcggcgatttcgtttccaagggttcgtctgcattgtagtattccgacagagccatcctgccggagaaacccattccgacagagcaatcagcccgtccaagtcccttctccgaagctcgcttgtttcgacggagtcctaactgaagcttttcaacggctggacgtcagcgaaaacaactctccagtcgaagcctttgcctacgttctcgagctttgtggtaaacgtagagctgtctcacaaggtcggcagctgcattcgcgcattttcaagactttcccctctttcgaattagattttttggccggcaagcttgtttttatgtacggtaagtgcgggtctctggatgacgcagagaaagtgtttgacgaaatgcctgacagaactgcctttgcgtggaataccatgattggagcttatgtttcgaatggtgaacctgcttccgctcttgctctctactggaatatgcgtgtggagggcgttcctctcggtctttcctcttttcccgccttgcttaaagcctgcgccaaacttagagatatccgaagtggctctgagcttcattctctcctcgttaaacttggctaccattcaactggttttatcgtcaatgcgttggtttccatgtatgctaagaacgatgaccttagcgctgcaaggcgtctgtttgacggattccaagagaaaggagatgctgttctctggaattctattttgtcttcatattccacgtctgggaaatctctcgagactttagaattattcagagaaatgcacatgactggccctgcccccaacagctacaccattgtttctgctctcacagcctgtgacggtttttcatatgcaaagctagggaaagagatccacgcttctgtcctcaaatcatcaactcactcttctgaattatatgtgtgcaacgccttgattgcaatgtataccaggtgtggtaaaatgcctcaggcagaaaggatccttcgtcagatgaataacgctgatgttgtcacatggaattctctgattaagggatatgtacagaatctcatgtacaaggaggctttagagttcttttctgatatgatcgctgctggccacaaatccgacgaggtttcaatgaccagcatcattgcagcgtcaggaagattaagcaatctcttggcaggaatggaattgcacgcttacgtgattaaacatggctgggattctaatttgcaggttgggaatacgttgattgatatgtattcaaagtgcaacctcacatgttacatgggccgtgcgtttcttaggatgcatgacaaagatcttatttcatggactacggtcattgccggttatgcccagaatgattgtcatgtagaggccttagaactcttccgggatgttgctaagaaaaggatggagattgatgaaatgatcctgggaagcatccttcgagcttctagtgtactgaaatccatgctcattgtcaaagaaatccattgtcacattttgagaaaaggtttacttgatactgtgatacagaatgagttggtagatgtctacggaaaatgcaggaacatgggctatgctactcgagtatttgaatcaattaaaggtaaagatgttgtctcttggacaagcatgatttcgtctagtgctcttaatggtaatgaaagcgaggctgttgaactctttcgacgcatggttgaaactggtttgtcagctgattctgtagcattgttgtgtatactgtcagctgcagcaagtttatctgcactcaataaagggagagaaattcattgctacttactccgaaaggggttttgcctagaggggtccattgcagttgcagttgttgacatgtatgcatgctgtggagatttacagagtgcaaaggctgtatttgaccggatagaaaggaaaggtttgctgcaatacacaagtatgatcaatgcatatggaatgcatggctgcggaaaagcagctgttgagttgttcgataaaatgaggcacgaaaacgtctcgcccgatcacatttcatttctggcacttctttatgcgtgcagccatgcaggtctgcttgacgagggtagagggtttctcaagatcatggaacatgagtatgaattggaaccatggcctgaacattacgtgtgtctggttgacatgctgggtcgtgcaaattgtgtagtggaagcctttgaattcgttaaaatgatgaaaacagaaccgactgcagaagtctggtgtgcactccttgcggcatgccgatctcactcagagaaagaaattggagagattgctgctcagaggctccttgagctagaacctaagaatccgggaaatcttgtgcttgtatctaatgtctttgctgaacaaggaagatggaacgatgtagaaaaagtgagggcaaaaatgaaagcaagtggaatggagaaacaccctggatgtagttggattgagatggacggcaaggttcataaatttacagccagagacaagtctcacccagagagcaaagagatatatgagaaattgtccgaggttactaggaagttggagagggaagtaggttatgtagccgatacaaagttcgttctgcataatgtagatgaaggggagaaggttcagatgctgcatggacatagtgagaggatagcgattgcttatggtctgctcagaacacctgaccgagcctgtctacggatcacaaaaaatttacgtgtctgtagagattgccatactttttgtaagctggtctctaaattattcagacgagacattgtgatgagggatgccaatagatttcatcattttgaaagtggactgtgttcttgcggagattcttggtgaccgaaccttgacaaagcatatgtttatcaatccagaccaagattattatgttattagctacacatagctttcacaggtttgcatatggctatttgcatgtgtcccaccaagagaaacaaatgaagtcgtcatgggaatgatgccttttttttgcaccatagaagggaaagagagagctagcaagggaattcaacgcaagagagaagatggagacctgattaagaggaaaaaagttaaggcctatcagcaattaaaagcaggaagcagagacctagacaccaaggtagggatagagtcgtctaactaggctgttcagcagagaccttgtaagccttttgagagtaaatgttttcaagacactcatttctcttttctctttgtggttacatctgcttttaaacgcacacctaccaaaccggtggatgaatctttcatagatacacctctatccctttgcattcaaacacaaaccacaaagtaccgctgctattttctttttacgtctttgtatttgcatcgtctaagagaatgatgggttgttttgtgggattttaatgcaggaggaaacatatgaggggtgattaaggcaaaaaccttaagatgtggtcatttagatacatggagtcaaactaagaatggaccttggcgaaagcttcttcacggtcaagatttaaaatcaggtacgacactgtgtacgtgagagagagagagagagagagaaagagattatagaaagaaagagatgtatcacaataaaggagtatatttagggtcacaggtggtggagatataggtatgcagggccaaggctctaatctcttcatagccctattgattttgtccctctctctctctctttcttcctctcttagctgtatgcattatgatgcgtcttttaattcactgtttcaggcttctttaattcgtggtgtctctctcctttttacccaaccatctcttaaaatttttaacatctgttcctcaaatcctctctcatctctttctataagtatctatagcgcctcttaaaccacaaagcatcacctctgtcttctctcatctcctttctgtattctctttcattgccttcacgtctgttgcaatttctccacttcttgagcttccgttttttacaattattgatccgtcaaatatgtgagatttgcacaacttgttgctcaggtattttgaagacaagtccacaagggaacaagtgaagctgccagcatgatctatctttggttaagagatgaatgtggaaacatattgcttaaacccaagctaggtcatgctctgacagcctcactccttcctggtttaggaccattcattgatgaagcattccacatgccgattgaaagaaaaataagagtcccgaacgcacacagttgactacacgaaaccggtgtaaggctctctgttttctccctgctttgacacactctccactttatttttctcatgtttttgcgctctagatctatcataggtgcatcatgttttagtgtttcaaagaacttagactgtgcaaagccaaacgttttaataaaaaggaaaacagtttaataccaaaatggtgtctctcactcaattacaagacaaagtatacctttcacaagtttgaccaaaacgaactactataacccttatttcaagacagtgtacttctagcatacatacttagtttaaaatgtacagacgacgtagctttaaaatgtacagacagtgtaatttacccttgacactgctgtaagtaaataaaccaaaattacactttactattcaccaatggctaccccaaagctcaaattcacaattctttttcctttattttcctaagccatcaacataacattttgaaccaatttagtagtgtcgtgttatgtttccatagacgtgaactgaaaagccaacttgttgcagcagtttgaaagaactttgaagccagtgaacataacctcgtgttccacgactcttttgatcagaagcagaagcatctcttggtggggaaccatcaaggtttcagatttgacccttttgatcgttcaagggagctggaagttatcttatcagacgagtcccactctgtgctcctgatcatcaattatccagccatccgtagagaactgcatctgctatggtaggcttctcaaggtttcttgagagatgggcttcttgaacccttaaataaggatcttggattcttaaagtaactgaggaatggtgtctcagaaacaggtatgaattttgtgaaaaagccgatcggccatgaaagggatgcaagtgctatgcaagttccccattgccacccgttaagccttactgtatccgcaaacttctttaggaattccaccataatgacttgaagcacaatagttatcgctattattccaatgaacaacctgtttctgtgaaggcctttgaacacatttttcttctccatctccctcgcattgaattcgttaaaaacttgacagagcacgaaagtgttgaatatgagcgtgtccttcacttccttgcgaacactgaatattgacatacccttgaattgtaagatcaagagtacggctatttgatataatgactgaaccaggagattcctccacatgacatttgttatcagggcctctgttcggccaactggctttctcttcaggagctcgttagtgggtcgctccgtggcgagagccagagctcccaatgtgtccatgatgaggtttacccacagcagttgaactgctgtcaaagggacctcaccggctgaaattgctgcgataaaattgatcacaagagctgcaacgttcactgttagctgaaactgaatgaatttctggatattgttgtagacacaccttccccattttaagactgtggcaacggatgcgaagttatcatctagaattacaatgtctgagctttcttttgccacttcagtgccctgaattcccatagagagtccaatatctgcttcttttagtgcaggtgcatcgttggtgccatcccctgtgacggctaccacatggcctttaagtctcagacacttgaccattagaagcttgtcggagggagaggaccttgccatgacccggatcttatcaactttctgcattctctcttcgtccgtataatttctgaattgaacaccttctacaacagcatcttcttcatctttgtcattgtggtcgaggattccgcattcaaaagcgatagcttttgcagtgaaaacattatctcccgttatcatcttaatggtgactcctgcaagtttgcaagtttccacagcttttgagacaccaggtcgacaaggatctttcagacccactattcccatcaaggtcaagccatcttcctctaataccgagtcatttgacgctattttatgagcgaatgctatgcatctgaggctactggccgccataccttggattattgcctgaattctgctctttgcggtggagtccattaagtcaacagacccagtgcttgtgtagtagtgagaacacatagctaggaccatttcagcggctcctttccagtgtacatggactgtattgtcagattttcttcggaccaaaactccgcttcttttctttgctgaactgaaagtttcaacgcggagaacttcatgtttctgctttactgactccatatccatacccagatttagcacagtccaagacaagagggccttctctgttggactgcctgagaactcaggcgttgatcctgagtctgacacacagacacttcccgttgtgttcagaccggtgccttggtaaagcagatcaagaacgtctggtgagatcattttggtagagtcttcatggattgactcttggccaagccaaaacttggtaaccttcatctcgttcagtgttaaagtacctgttttgtctgtgcatatcactgtcgctgagcccatcgtctcgcatgccgagagctttctgaccatagcttgatcagacatcattctcttcatggagtaagccagcgtcagagtcacagccaatggcaagccttctgggatagctactacgacaatggttactgcagctgccacgattcgcacaacggaattgaccacagtgtccacaggtgttttgctcccgttgtattctcttttgccctctttctctgtgttcccagtgaagtaacggactaatagaactaccagaacaagtgctgccaccgtaagaccaatttttccgatggtggaggtcagcgtgtcaagacggacttgcaaaggtgttctctcgctggaatcttgatttatggagctcatcgtctgtccccaggttgtactcatacccacagagacaacgagcatttgagcaaacccatcgactatctttgtccctgagaacaagaagggattatccttgtggtccacttcaagatggtcactctctcctgtcatactagactcgtccacctgaagtgaatgcccttccaagaacagaccatcagcgggaatctgatctccgatcttcaagaagacaacatcaccaacaacaacgtcaaagatggagatatgttgccgcctgctgtcccgaaggacttccactttgatgttattgcttatcttggacagcttgtcgaactgtctctcctgcctaaagttgctgagagcagagacaactatgaccaagaagactgctacaaagatgcttccgccttcataccaaccttctttgatgccatgttctttgataccgaagccaagggagaaaatagcgcagaccaacaagatcaagatggttaggtctttgaaagcttcatacacaaagaagagaagtcctttaggcggtggcttatggtaggtgttagagccaaagaggtcacggcgtctactgacttcttgctcattcccgtggatccctttggtggggttagtcctaagggaagcggcgacaccctccacgccgcccagcgcttggatgcccggtaagtccttacccttcatgatctccacaagttgttcttgatcaatggcaggaacgtaagagagaggcatagagttgatctttgctccctcaccggactcgagggctgtgtaggagagagagagagaggcatctgaggttttgggatcaatccttgcgggaactatctccttaacaagagagagcatagccctcatagagtagatggcagcgtaggcaaaacgccaacgcctctgggccttgttgaggctggaggtggtaaggttgagcaaaagtgcactgtaatcatattccttgaggtccctcatgctttatttgtgtgaaagaaagagagtttttagaaggaaaagagtctcgctctctctcaactaaatgtggtgttacttgtaagacacttaagactcgcaaagaatgatttctctctctctaataccctaagcttcgtggtactatttaaatccgtattggccgccttttgattgctatttatctgctttaaaatattaaatatctcgtgtaaagtaacttgtcctagtttaatattttcaggcggtggaaccactcagaaacgttgtaaacacgaagtcatgtcgatcaaaggacatgggccgcacatccttttgtacttgtgttttgacttatctgttgtctcgtgtttcggtttggaaccactgtgccctaaaagagagagttaatctgagattttggtagtaatttctaaagcagccgtatgatgtaatggtgtggacaagccgtcattgtagaatgaggaggaatagcgtgcgtgtaccaacttgcttagtccgcacggacaaatgaaaagaaatggcgaatatagtaaagcgaaagaagaaaaaaaggatttagattgaatcttccacaccaacttggtttggtataatatctatcaagtgaaatttatactactcaaactcaaaatccgtctacttttccacaaatctatgtttagaaataataaaatggagcagcgtgtacgacgaaggcattatgagtttgatcaccgaaacttcatagcactttccattttcgctgtcatctctttctttgttcatgtgacgacagcaagacataaaagcagttgactttatttttataaacaaacaaaataagttgacctccactaaaactagacgtgaggtgagaccagatttggcataaaattccgatacaagcgatgaagtgaatgtcgagaaactcctcaaatcatatacatacatacacagagatgctcagtgacatacattagatcacgagttactgtatgtggataagaaagaaacaagagtgtttgcaccaaaagcagtagcaagcttaacaaaatcccaaccaacaaatacaatggcttgctcgagaataaatagactaaccatcatcttatgaaactaaacaatggttcaggaataagtagaagggaagattacaactaattaagctcactcataacggtaactagtaataacaaagctctcagcatgcaacaaattaagagctatggtttaagaagaagatccctggctgtgcagcagcagttgttggtgtgcagacgcagtgaaccaccaagccccatgagatccctccacctgctttcctccggcattgaagctagccacaccaatccctcaacctccttgtccttggcgattcgcgcatctaaaaaggcaccagagcacttgtctttggcgaaagcagcgcacttgcccttggcggcagccacacagccctcgaattcccgctcttcgcacttctctcgttccctcatgtcaccaccagatccccgccaccacggcggcttacagttgttggaggcggagacggcgcacccaattttagcaccttcctcgcactggtccttgattagggtttcgcaacgcttgaaagcggctgaccatgaatccagtgatcggaaagctagaacataagaaccaccggagggtacaggtccccggagcagcggaatcggacggtcgaacacaacggtagtcgcagccgccgagaaatcatcgtcatcttccatcatttcaatttctcttcaaaggcccatcgggcttttgattgaggccatccacctatatttatttaattaattaagtttgggggatccaaaacataattagtataacgatactactactaaccgactggactagattattctacttgatatatcctctcgagaactattgctgccgctactcgtttcatatctccgtctccggctcgatccgccaagtagagtaagcaggtatctccgagcatcttgacatcgcttctttcctgcttctgtttcctttgaccttattacagagggaggactcatcattcttctttctcttctactttttttcatgtttattttggggtttagggttttagaagtttgatcgatctgttattataactttggtttcaatcgatctgggtgtccatttgcttttcgatgtttaggattttctgtgcttatttgaatcaccttgtatcttgtatttctccttgtaatttagcacatcatctgcactgcagcaatgactaaaaagaagaatcctaatgttttcttggatgtatcaattggtggggatcccgttcaacggattgtcattgaggtattacctcaacctttgcattttttgctttgctttccgcattcagcttcttaagttttttttcatctgtcaatggcagctttttgctgatgttgtccccaagacagcggaaaacttccgtgccctctgcacaggtaccttgggcttcctcataacactttctgccatttaatctctccagaatgctttgataagattatgggctttacattttattgttatgatgttttttcctttgtgcaggtgaggcgggcgttggaaagtccactgggaagcctctacatttcaaaggatcatctttccatcgggttatcaaaggattcatggctcaggtatgtatgcattattcttttgcaaccctgtaatgtccttcactgacatataatttgtttttgtatgcatttgatggttcgcaaactctttattcattagcgcttctctttcttgcagggtggtgatttttccaatgggaatggtattcttcaaacctgttatcctttatacattaaatctccaaaccgtatatatttctttatatcacaatatgtgtgatgtagatacctcatgatctagtttttagtttaattaacacacaaggagcttagtatatatgtttatagaatgaaattggttactagggaaaagcgtattggggtccctttttcatctctgagacaacttctggatgaagtctttcttgctgtaatgccttaattagagataatctctctggttgatttgcaggcactggtggggagagcatctatggtgggaagttttcaggtataattttggtttctctgtttacggctttctggtattgattttttttttctcaatatcccgttatccttttacagatgagaactttagattggaccatgatggagctggagtcctttcaatggcaaattgtggcccaaataccaacgggtcccaattttttatactttttaaacgccaaccacatcttgatgggtaatctctgttcctagattttgttgttttgagaaattcaaagttcattgtaaaggactctcaaaacgtttaatgcatttggaaggaagcatgttaagggtcctgattttccttatcctcatattgtaggaagcatgttgtatttggcaaagtcgttgaagggatggcagtaatcaagaaaatggaacttgtggggacgagtgatgggaaacctactagcccagtcaaaataatagactgtggtgaaacgtctcagataagagcacatgatgctgctgaaagagaaaaaggtaatgaagttaatctttgaatgtggagtttctataataatgatggagtttctagaataatgatgcagatatatttaatgtttattagggaaatcgaaaaaatcaaacaagaacttttctcctggtgacgtatctgaccgtgaagctaaggagacacgcaaaaaagaatctaacgagaaaaggataaaacgaaaaagaagatactcttcgtcagattcatatagctcaagttccgactcagattcagattcggaatcagaagcatattcatcttcctcctatgagtctagttcttccagtgatgggaagcataggaagaggaagtcaacaacaagacacaaaggccgacgcggggaaagaaagagtaaaggacgaagcgggaaaaagaaagctcggccagatagaaaaccaagcacgaatagttcaagtgacacggagagtagcagcagttctgatgatgagaaagtgggccacaaagccataaagtcagtgaaagttgataacgctgatcaacacgccaacttggatgactcagtgaaatcaaggtttatctccctggctttatgtatttcagctttgcttctgcaatttggtggtctgattttgtggtcactgacaaactttgccattttctattgctatacaggagcaggagcccaattcgtaggagaaaccaaaacagcaggagcaaaagtcctagtaggagccctgtgagagttcttggaaatggaaacagaagtcctagtaggagccctgtgagagatcttggaaatggaagcagaagtcctcgtgagaagccaacagaggaaactgtggggaaatctttcagaagcccatctccaagtggtgtgcccaagcgcatccgaaaggggcgtgggttcaccgaacgctattcctttgctcggaagtaccatactccttctcctgagcgttctcctcctagacattggcctgacagaagaaactttcaggataggaacagggataggtaacttaatctatacatacatacaacaaaggacgatagctctgcggatagtactaaagcctcattttgtttaattatgtaggtatccgagcaacagaagttactctgagcgctcaccgaggggacgctttagaagcccacccagaagaaggagccctccaaggttcgctttcttatctctgtacagattctggctttggcttgggacgatatagcttgtaaaccagcacctagagccacttgcattagatttatatcctagaacgaccctttttgtgatattattttggttaagcaaaacattctaattgaatgctgaaagttgaaaagagcaactttatagcaatgttggatgtcctctgaaattgagtgttgtcttgcataggtacaaccggaggagaaggagcacttctcggagtccagatgggtaccgtagacgattgagagacggaagcaggagccagagtccgaggcatcgtagccgtagccagagccctagaaagaggcagccaattagccaagacctgaaatcccgtctcgggccacagagatcccccatcagaggaggacgcacctctcctgcagaatcactcagcccttctcactcaccttctccaccaggaaagagaggtctggttagctatgcggattgatggtcactctcatccattggtttctctgctgacttgcgagtttttgttttaatttccgtgttttagtgcaagcaataataggtaatgatattttttatgttggtcggatatataatactctaccttagttgcattattacagatcgtggaacattgatcaaattgagactgatatatgttggcagaattgagtttgggaatcgaagtttgtagaaaatttatcgaacaagtagcatagatatctcaacatgaaaatctagtaatacatgtaaagaaagaaggttaatgatattccgcatgttcatagataggactcgaatctttctttaccacaagaggggtttacaatgatacaatgatcatgtcctagaagagaaggatcagatgggttggtctttgggaacgatctgatccttgatccacatgtagatagggattaacacaaaccaggcagctgctagagttcccaggaggaagcgtcccaagaaggagaaggggttgttgacaggcttctctacgtcctcttcctttggaccaagctgcagcatttgagtgataagtttagtgtatcaaagagagaagaaagtaaaaaaggtgaagtgggaggtaaaagacctggagaggagagtcaccggaggcaggtttaacaccagtgacagaacatcccatgataaggccgtgcctgcgaacaccacggtaccacttggggccaatcctcttgagctgaacgtccttgaaaccggcattcttgaaccactcaatgtactcttcctccttggggaagagcatccagacatcagaaaagaagcgagagagccagaaggttgggtagacagggccgatgagacacgctttgccaccgatcttgagaaccctgtacgcttcccttattcccctctgcgggtccggccagtactcaatgctgtgtgatgatgagacacacaatcaaacccaccggaaagaagacgattataagaagaagaagaagaagaagaagaagaagaagaaaaggataccttccagcagaaacgtatctgtcagcataatcggttggaaaaggaagatcctcagcatctccctcgacgatcttgcattctttcaacggctccttttgctttgctttggccagctgatgtggcgactggtccagaatggtcacattcttggccttcactgtcttgactatgcccagagtagtgaaaccagttccgccgccgacatcgaccactcgcatgtccggatggctgagatccgctggctcaagagcgtcgtctctcatatcctcggtccaatgcccaggattgatgacatggtcgtatacgatggataagaacctgtagaaccagtaagcctccttcttgtgctgaatgaacctaggttgcgccgatggccgggaagacgacacgctgctgctgctgcatctagtagccaccgagagtctaggtgtggaggttcgggtaactgagagtaaggtcggccgaggaatcgatctggcatgcaaattggaaccaggggaacctaaacctttggggaaggtaatggccccgttgagcatcaaagaggccatcgatgacagatccaccaagttgagaagagggaagaagaagcttatctatcaccaattctccgccaatcaaaaacacaaacgagaatgagagtgtgactaaaccctctaactctaacagagtcagtactgactccaaccacatgtttatgtacggtcacgttgtttgttgcgacaacacatatccctttgttgagcccatgggctcatttgcaagaattggcccaaataatagtattgggcgttttggcatttttctgcaaatggaagggaaaagtcgatttgagtcagagagagagagacttcgacgacaattcaaacttgtacggactaagaccagactctctctgacgttgtcagatctgcgacctgctagcgagaggatgcgagaggaaactgtggtttacgagcaggaggagtctgtttctcacggcgggggcaagcacaggatccttgcagagcttgcccgcgttgaacaggaagtcgctttcttggaggtagctaaactaactcgtatctctttcaaattccgacgtaggtctctcgtggatagctcaattatcctttttagatcaattgttacaacaattaggtaaaggtcgctaagattgtttcctgtgaaagcaaaaaccagtatggcagatctgttccaatcagaagagcatggtagttctcttgacaataagtggcaccatttcagtcagtcttgtttatgactctatgaattgtattcccaaaatctaaatctgctgggttctctttggatccactattggaatggttctctgttgatcttattcttagggatgtgcaagaatacttttgatcatagtccaattagtatcattctctcttggttatcatctatcgaggcatgttaaaagttaaccttctcccaagtttctctgttgcacagataatgtgtttgcctattgttcctactagtgagctctaacacttactaaaaatagctttactctctctttctgtttcatgtactatatccagaaagagttgaaggaggtcgagaacacagatattgtatcaaccgtgtgtgaggagtaagtatgggatactcaacctatgtttttttttaacgcttgcaagcaactgtgtgctagctcctgtaggtatattatctggatttgactgaaacttgtacgttgattggtgatcaaattgatattcccttggttcgcaggctgctatctgtcatcgagaaaggacccgatcctctgttgccactgtgagtgctttttaaaccttgaaactctagtgttggtttggactgaataactgatggatgttgtggtgctggcagaaccaatggacctttgaacttaggatgggaccggtggtttgaaggaccaaatggaggagaaggctgcagatgcttaatactttgattcgctagacagagtaatgtgttacatatactagtttcttgctaggatatcattttacatgggatccaaaatggggctgtagcagagaaaaagcgtacagattaatgagcattggaattgcatagaacggcttagttgcacctacgtaaacagtattatatgtatatgtaatgtatgggatccggatctgacatacgagtaatggagtttcaggcttacagcttctcatcttcttattctagatcttgttgaaagaagctgaaatgtgcatagtgatatttgggggctaatagagtaatagctaatgaggaagtgggtacaatcttgaagaccgttaagtgtgtctctcttttttctttttagataacttttggccacatccaccctccatgatacacacacgctagtttcgaggatcagaatacatacatacctatgtttattatatagatagaacgataatggaacacagagcacatgcctcatctgttgtctttttattattacttattactcttctcctccacttctgtattattacagtctgttaaagtagaacccccttttgtttttttctttctatgtctcaaaaattaaaacaagttatgaggtttaaaaaaaaaattgagaaatgtagagggtattagtagaagtgatttacggtaagtttattcgacagctaaaaagatagtttatgcattccaaaatattcctcaaatttgtgatgagtaaacaaatactggtaaggtgggttttctgacaacctttggatatacagtagtatgtcatctgttttcattgcctcattggtcaagatcaaagttgatgacctcattagagctccttcttctcccataaataaaaaaaaattgatcaaagtttgtagtatgaatttgttatataaacagaagagaaattaacacagagatgtgagttggtccaaaagaaaaatgattgagcagccggaagaagcacgttacaacatctgcagcatatctggtcagagagagtacagaaatattggggattcaaacaattcacctcgtgatgaaacctgaacattgaaacatgcattatagcctcactcacatgctcacataatgccaaaccctttttctctgttcccgccttgcttttttttttcgtggcaatagaatacaatacattggttgggtgattaaataaagagaatgactaggataagtaagttagccgttaaagttgtaaatctcgagtaagtgaagtggtccgtttttatgaaactcataaaaacgaaagtcccatgtccctaaaacactagtagaatgtggtaacgtatcttcttcacattcacgttttcatatgggaaacgaatgaaataaacaatgcaaaacgcaataacttaattagaatcttgaactggccgataagtgcaaccgtaacggaaagcagaggcagagagagaagagagaagagggagagagctgccttgggaatagatagaaagagagcgtatcaacggtggtcattactttatgatggcattcccaactttgaaactgccacgtcgatgtcggtcaacagcggggtccatatctcctcatcttccgttccatattttttccacgtggcatttttctttcctcttgaaacaagaattcagaattgaatcgtaaactctgaactagagtaagtaaataatgtattgactagaagaagaagtaagtagtacgggctgggtaagtaaagataataaatatgcggggtttgatctttacttatttattaggactcaaacttagccattattaactcaaaaatcaaaattactcctaaaacaagcagataggaaaaaacacaaataaataaaaaaaaggaaattgaatgcagagttgtcagagtgtatttaaaaaagaaaaaaaaagcacgttaggaggagtatcctttagactagagtaagggagtgggtgctttaaagaagcagagaagcgggagaagagtgtgcagcagcaacagccaacagaagaaaatggcaaaagagaaagatctggagaagcaaatcggcggttgcatggccggcttcttcaacatcttcgatcgccccagtctcctctctcctaataagcgtctctcttcctctccggtaacttgtctatctctctttccctcttctcctgttcctagagggatgcaatgaattgacttaccaacaaaacaacaatgtctgtgtttctccagagcgctgaatctgaatctgcctcgggtaggacgaatcagcagagtgtgtactctacccctgagctacgctctcctgcgccggctcaacaaagatcttcttcttcttcttcttcttcctctaggccttggaggttctctaaagaagctccgaggctctccctcgatagcagagccgtcgtggatgccaagggctgcctcaaacacagacagatccgagccgatgcggttgaggctgagaaccagcgcggctcacccagtgtgatcgcacggctcatgggattggagccatttccccaacagcctctccagagatctgcatccgagtccagggtcaccagagactacatatttgactttcacgatgacaagggagcagctcaagatccggctccaattaggaacgcccgagcccacccaacctcagtagtacgccgaaagagtttctttgattccggtgatttcttcccgagagtttccaaaatgagtggatttgacgctcccccgaccgatctggaaaccctcaagcagcttctcgaagctcttaggctcaaaggactcttgcactcgtcttcactcaaacatcagagcaggaatctcgtcttcgaccatcattctccgatcaaaccagtgaggcgggatcgcatttccccgagcgtcaataggaggagaccaagaccaacgctcaaggaacagaggagagtctcttcactcccttggcggagaccagaacctctccagacgaggattgaagaccagagtagcactctagccgaggaagaggtacctcattcattactcgacattttatctatcaaaaaggcagctaatgaaatacaaattctgtaagcagatgtggaaagtggatgtgtataacagacaaggcaaaaccttattggagagatgcgacaagctgctccacagcattgctgaaatggccgctgctgaggccggagactcacaaccgagccccgtctctgttcttgacgcctcaatttaccacgaggactcttctccgtcccccgtcctgaaacgcacccttgactttgctgatgctgaagaagacgaatcctggggtggctcaatattatcatcgtccgactctgaatatgtatacatctcggacatcctccgagcctcagattgccttccacaagagtccgacagcttctcctttctggaaaagcagcaatacctcaaaggaaaatgcgcctccagagccgcagctcaggaaagacgcctcatcttcgacgcagtgcaagagattgtggcgcggagaaggagcttgcccccgtggatgatggtaggagaggctgataataagatgcaagtgatctggtctgaatttcagaagataagagacaaaaagtcgtccacggaggaagatgaccttgtgggatacgtgtgcggggtcctcggaagagatttgtcggaggaccgatggcgagattttcaggtggagatgtcagaagcagttcttgacgtcgaacgcctcatattcaaagatctcatcggcgagaccatacgccagttggcttttcttaacaggtccgactcgctgcgtaggaggctgctcttttgatataaaactagactaaattctctgacccaagtctgaaactaaacccaacctacgacctataccatgtctaaccaaacatgcgagagtgatagttcttttgtgtgtttttttgtgtgaaatgtgtgatttatcaagtttgggacttggcgcctgttgtctaaaagactaaaaccatacactcttttttttgctctttctgaatcaaactgctgctcatttgtgtggtgtattcggactaataaagactttaaaagtgttatgggcttcaagtggaccgtttatctctaatcatagtctactccaacattcatctacttcagtagtggcccattcagacccaataaggcttttcggcattgacttatatgagcagagagagaaatatgcaaaagatgatcaaagaaaaacttgtgatttgtaattttcaaaaatatgcaaagaaaagcggatcatactccagtagtctttttctttgaaaaacagaatcatataataatatcttccaaactgtaaaaagaaaacgagagaggtagacacaacacacacttttattttttttgaggtggaaaaaaaaacgttaatgggggaacaaagccacgtgaaggtgggaagaacgcaccaattatagtataaggtgacaagtcagcagagaggtcacagtcgtggaccaatccacttccaacaccaccatagccgtcccttcgacactttggctgacaaatgttcaaaggcatattttatattgggaccaagattttgcttgggacaagctatgccccacgactctcccgctagtgctctctggtcgcttctcctctgcttctagagaccaaccatttccaccaactctgttttcagttcacacacctcattctgcaatgcccaccaccgcaccaatggagttgagaagagcccaacttctttcttcactctctgttcaaaactggactggtcaaaccatcatctctctttgaccctactcctacactcgagatttctaatgggtgcacaatctccactgggccaccttttgtcaccagtctctctctctctctctctcttttcttttttaatccttctccataacatttttatacctttctgattactattgctggctccattgaagaatgatcctaatcttgaagaaactgaaagtaactcgtgccaaagagatagtaagtagtaataaaaataaatggaccactccagatgattctatctgaagaagcagtgagtccctctctgttatccacctgcccgatgtttagcaaaagttaactaaagcataatataaagctaatcttttatcataatgtctgatcaaaagaatttaagaaaagaagagatgattcatttagttttgtcagctagctgcaatgggaggccttaaatcagtcaggtaacaggaagacttactcattggttgctttgctttgagctgccacagcctcttttagtttacaaggattgtgttgttgggtcccaacactagtgaaattgcctcctattttcccacagagagcacaaggattttttcccttgcacgttccaccattcttttactctcacggatgatacaggaaccaatcctttttgcgcttcatctgagtcaaaagcctgaaaaagaccacatataatacatctcagcctaaaaagcaaataccatacctacgactggaaacatatgggataagaggataaataaataaagggaatccttcaaatggtaagtttcaaagtaaaagtgttatggtatgatcttgtctgccttttctttgaaaaagccaagattgtgggtgtaactgttatcaaaagataaaaagattcgtgagatctttctttcttgtgactttttccttcaactaggctcctcctttatggcttctctccgccaacaaagaaagggagaggcctcaactataaagctatttataaccctttgttagacaatcagtccccattcggagattggttgcctcggccattcagaaatcacactacttttttatttatttatttataagatcaaaaacccttttccatccttggtttctatactcttgtctctcagaaatcaagaggccttatgagctatctacatgcaagcctcctcaggaaaagaaccatgcttatagtaagaagtttcaccatcttgcttctcagctgcatagcctttaagttggcttgctgcttctctagcagcatttcttctttgaaggcgcttcccctagtaggccatttggagtttgaacatgtccatcacgcctccaaagattttggaaatcgataccagttgatccctttggcggtcttacatcccaaatcggtaagcgacatcgcctcaacgatacgacacatctggatgatgggcactcattcacagcttacagtggcagcgagaggtcgtggacattcactccaaggccaagctcaaacaagacatggaattgttatacacatggaatcactccatccccagaagctgcaggtctacagtgtggattcccctgctccatatgttgatgtgtctggtggtgagctgtggataaacattttgcatgagaccctcaagtacgggcttgcaccaaaatcatggacggattacctgcatttaactgtaggtggtactctgtccaatgctggaataagcggccaggcattccgacatggaccacagatcagcaatgttcatcaactggagattgtcacaggttagttcagagttgcagtattcgtgttttgaaagcatagactctatatggttggtgactattaacaacatgaagagattcccgagaatagctacccactaatgtcatgcctatttattgactgcaggaaaaggcgagatcctaaactgtacaaagaggcagaacagcgacttatttaatggtgttcttggtggtttaggtcagtttggcatcataacgcgggcaagaatagcattggaaccagcaccaaccatggtaaacaataaataaataaaaaacttaaaaactgaacacgcgtgtgtcctcctaactctgtataatggacaggtaaaatggataagagtgttatacctggattttgcagcttttgccaaggaccaagagcaactaatatctgcccagggccacaaattcgattacatagaagggtttgtgataataaacaggacaggcctcctgaacagctggaggttgtctttcaccgcagaagagcctttagaagcaagccaattcaagtttgatggaaggactctgtattgtctggagctagccaagtatttgaagcaagataacaaagacgtaatcaaccaggtgagaaaacagagtagaagcaatcggtagaatcttctttggtagatgacattcattggaactgaaaatatatatatatttgtccaatccaggaagtgaaagaaacattatcagagctaagctacgtgacgtcgacactgtttacaacggaggtagcatatgaagcattcttggacagggtacatgtgtctgaggtaaaactccgatcgaaagggcagtgggaggtgccacatccatggctgaacctcctggtaccaagaagcaaaatcaatgaatttgcaagaggtgtatttggaaacatactaacggatacaagcaacggcccagtcatcgtctacccagtgaacaaatcaaagtaagaaagaaagaaagaaagagctagtcatgattttgtttcttttcacttgttgacaaaacaaaagcatgttggtgagcaggtgggacaatcaaacatcagcagtaacaccggaggaagaggtattctacctggtggcgatcctaacatcggcatctccagggtcggcaggaaaggatggagtagaagagatcttgaggcggaacagaagaatactggaattcagtgaagaagcagggatagggttgaagcagtatctgccacattacacgacaagagaagagtggagatcccatttcggggacaagtggggagaatttgtgaggaggaaatccagatatgatccattggcaattcttgcgcctggccaccgaatttttcaaaaggcagtctcatactcatgacccgtcgtctcgtggaattatttagggcctctctctctctctgtagtaaactctatcagtaaagattgtacatactgtttccgatgatgcgtatccatatatgtagtatcccaatttcgtacacaacagggaagatgaagaagaagaagaaagaaccaatacgcaccaaccaagtattcattcatccccccatttgcaaaggttgggctctaatgatgtgggcttatctattctcttaactttctttcaggcccaataggtccccaagttctatttatgtggtccatttacaaaacgacagacactaactactaaagattccaagccgttaacttttctttgttacttactcctatggacaaagcaagcaaatgatggctttcaattatagctattaatgatcttcacaagtgaaaatttcgctatcttgtaacaattaactactagactcttgaggtaatagatatgatgttccctcaaagtatttacaacttaacttagataaatatatagtgattgaatacaaacaaaaaaatagacaaaccaacctttctttttctggtgaataatcaatctcttcttgtgctttttttatatatgattaattaatattaaggtcacctgtggggagtggtccattgcataacattcacgggactcatttactaacactcttgtttaatgaatggtacaacaaccaaccttccccccatcttcttctctatctatcttacatccacgtctccctaattgctcttcaccttttttccttttttttggttaatcttctcttcctgcaatgacatgccaaatgacttttttacattgcgatacaaatctcttccatatccatatcacactataaccaaatttactcctctcatcagactacctacctaccactggttagctgttttgaatgggtttagatcccaacgcgacacgttgttggtccgctgctgccctgtgttatccccatcattgataacctcggcatttggcacttcaaggacttgagaggctctttcaatgtacctgtactagactcatcctgatcaaaagatggcgacgacaagcctgaaccctttgtttctgcagctaccccacactcgagaaaatggtgtttcggtgatacaattgggctatccaccagcctatcatcctccaagctgaacaacggcaaacaaaaagacaaaaaatactcagatcttcttcaagctcacaaaatgaacgattatcaaactggggatacctctctggaagtttgattgtatcctcatcattctcttttgtgcacactctctgattgtttgaaactgccagcagagagcgatcaggttattacacatttcagacaagcataaatcacttactcggaccaaaaccgaacctagtcgtggagaaacaagtagtgtttggtcgaaattgagttgaaactgtttctcgacgtcgagaagctgcagattcatcagccttgtgctctgcagctcaagagctcgttcttcaaacctccttttccacagcagatcttcatgaaaagccctcccccctatacacagagaaatcagtattcaataccaagggaaataaaagagagagagagagagctttataccaagctggaaatccataatgtccctggatggcttagtcctgcagcagaggaatcaaagcgtcgtaaagagatgaggaatcaggagcagctcaaggaggaaaagccaaagtacctgtacttgtctgggactttgcctttctccttgtaaggcttaacaagaaccctggaatgacacacaaagtgagggttccctttggccagaatgctcttcacagtctctgggtacatgaaggtcacgaacccaaacatcctcttctgctggtaaggtatcctcacgtcctgaactggcccaaacgtactgcaccaccattgctttaagtagacaacatccaacaagaagaatgaatgggttccaaacaagagtaatacctgaagtagtcggaaacatcttcttccctgaagatactgtcagccgggaaagtcagatagatctgtctagacgccgggcaggccgtggccgagaggtcgatcctctctggcctccatattcccaatttgtgcaagtcatcgcccatcatcaaagcagcagctctgctacacattttaccaaccaaagtttcagaatacccgtccatacagatgaaggaaaaaaataaagaaaaagaaaagctccaacctttgggcttcactctgttgcaagttgacacctttgggggagaatggataaccggtgaactgattggcaagtctcggcggaacagagttggacctaagcacctctttgcggtgaccccatccgaaccctaaatcggactcaaaatcttcggcggttctcggagtcaagaaagaaagccgctcttcgaggtcctttttggccttggctatgacagaatgaaggagattctgaggcccgaaagctaaccttatcatctccttctcaccgtgatcctgaaggaggagaagacctatgatcttggaagcattagctgggtctaagttctggattctagagagcacgatcctagttgcttcgtacacatccatggaaacacactctttgctcgatgagaccttgtctctctctctctcgcttaatctttctttggcaggaaaaagaaacactgctattgttgtcttgtcttgtgtacaaaaagatgtttggtttcttgtcttggactttagcaaagctaaaaaggctttctttctcaactaccttaccaccatcatcactctagtaccagtgtaccactccactccatacctaagcttctttctacttcttcttcttcctcctctgcttgcaaaaatcaaagttgccacttccctcgtgagtcgtgtggtgtggggaaattaaataaaaaaaagagttaaagaagagtggagtgactgttgtgtcttctgggctccaactcccaagtgagtgggtcaaagcgtcaaactttggatttttgcaatcaaattcacaacaaaacacacacacacactctctctctctcatgtatttttgtacccatatgattctagtatatattttatcatcatctcttatcaagtataatgtgttattctttttctttttttttcagcattcaagtattcaaccagattacagaatgtgtgtttctgattttcaaacttttatttgcaagtagagtttgattatttgatttgacctgtcgtttcataatatactcccagaggtaataaagctttggtgttaaaaatgcttctcctttttaaaaaataaaagaattactcaaaagttataaagatacatgtatatgggtccaatagtcaagtcttatcgcagtaaagttttcttttattatcatatatatacactcaaggatcaatttttattattttcaaaacacttggttaaattgataaaaacataaagctgcaaatgatgaatgttaaaaataatgacgtcgataagagttagttatacggcccgcaccctcaatatatgtaaatactcctttttcttttgtaaatcaaaagtagtagtcagaagaaatcgtattattgcatttgcacgttctcttcctttcaaccctctctgacatctccatttacacacaaaatccacacgtagcgattgggtcagtgtgattctcacgcgccagtgatctcacacatgcattggattgcactgcagcaactcttattagtaggttagttacattgggtttcaaaacccacaattgaggttgagctctctttctctctctccccacttaactaactttttcgaatttcaagtcatcagtcatcacaacacaatgtgtgttctcagtcaacgacgttccaatcaatgcctttatgtctctgtctctctcagactctcgcacataagtcatacttttttaagcaacggatctctctacgtcaagtaatttggtggtaacgtttttgggtccataaacatacattctctattatatgggcctacattctctcgctatatgggcctgttttatacaacccaaaggttttatattttcatcgacaaggcctgctgcaaccacattgatttgtcatgtcgctttcgtaccatcatcttttacatccagtttcttcaatactcctttccttattgtcctaatgtacattcgaaggatgaggccctcgtagtcgtgggggatgatgtctttcttcctcctacatggaatctgcaccatggccgagatcgacctcaaaaaggccatgatggtgactggcacgtttcttttaaaagtttgctcaacgcgttctaggatactcccgctacccgtgtctcccttttattagtaagagattctggcggaatatttagttgttgctcaacaatattttataaatgctactttttgcttaatccatgtttcaaatatgacaagaaaaacaaagagcgtaaaaatctaacaaaattcgtagaaagaaagacgaacaaacttgtccggtaaagtaacatccaaaaacatgagaatgtttcagcaatctgatgatctctatactatctaaacaaaagagtaactggaagtagcagatgaggttcataaatgacaaaaaaaaaaaaaaaagaagattagagcagcaacggcgttttaaaaagaccaaaattaagaaagcaaaaggagtttgatacacacgtccctccttaagatttataaaaaaaaaaatccatgaacccagaaaataaataatcaccgcacattttgcctggccttgaccatcatccgctttagtgttgccagccagaagttgcattcgtcccattcgctggtagtcagaagtacctgtttgtttgtttttgaggtcaataaaactgattattaaacacgaaatcatctacaaggaacccagaagagatcaatttactagcttacctgtatttgaagggctgtgctgaagtcattgttgtccagagcttggcatagctgtgcgagtttgtccgcagcattcttggagatgtctccgctgttgagtttcacaaacagagcacctaattttctcgagttgtcttctatctcacgcttcttagtagtattcgcacgtgcgcctcccagtgcttccgatgtctcattgaaaagccttgtcaacgttgctatcacaggtttctggtgggctggatcagtttacaagaggtgatcattatatgactttactcagaaacaaaacagagataaggtgctaatgaaacgtcgtacgatacctggaacgttggaagtatctgcagtctgaacagttggtggcggagttgcaggcgcaggggctgcctgtgcagctgcctgctgtgttggaggacttgctggttgcacagatcttggagcaactcctggagttgccatgggcgtaaatcctatgggtccagctgctggagcaacaacttggggcatcttagggttaggatattgcccaagttgtgaagggccagaaggtgcatattgaccaggacccgggggaacagggtatgcattgttagatggtccctgatgaaaatttagaagttagcttcattaaactaaaactgcgggtaacatcaaacacactggaggcaaaatttctcataccgtgaatgaatgagaactcatggttggctgctgatattgatctgcattcttcagtgcagggggagttgaaggaacaaatgtagttctcatggatggctgagcattgcttgtaggagctggagtaaaagatggctgcataaacacactatagtcaacaagttggcccaagaaacctgtacatagcaaacaaaacactttcccacgacaaaattttctcacgacctctctaggatatagattctacagcagtgaataaaagtaaaggtctagattatccgtttctctaggacatgggtttagaggctgaaaatgttcagttttggggagttttgttttaggtcaaagaaccacatacctattataatccatctactattctgactaaaaaaatcacacaaacgaagagactatgcatttgagcaccacatacatatttcagatgtcatcatatctcaaaagcttgaccaatcccttagacaaaaacataaagaaacggacactttcctgatctagacatctgagaactgctagataaggatggtcattaatgcatgatggtgcaaggaagaataagaaaagaaaatgcaacaaaaccaaaactttagaaacctgcggagctggctgagcttggtgtggcataaacatggttggttgctgcatgggtggatgtgaaacttgagggacataataagaatcagtgtacggttgctgatactgattatcatatgggttagcaagaacgtttggttgcgcctgagttggctcctaagccatagaagagtaaagactaagtatgttatccgtgaaagctacatggattctaagtaaaatataaaacgatttgcagaactcaaatacctgattatatggcatggtgctttgaggctgagtgtttcctgaagctgtagtgttagtctctgcgtataaaatgttaagctaaatttatcatcaaaactctcttaaatattaatcaaaaacacaactgcatacgcaccaggttctgcagatagagaaatacgatcacgtaatattgaaagttcaggtgacaagccaccagaatccagaactttcaagtacttcattgccgttgtaagaagcccttggctggccagtatctcagcataactctcaaagagtttacacagagatgcgctgaactttttgttgccagttgccaaagcaaggacaagagtcttctccataagatcctattataagataagggcagaaaaatatgagcggagaagcccagcaaaatttatgcgcgaaacatagaaagtgatacacacttgaagaagctcagcataagatcttccatcccgctcatttgcaaggctcctcgaccaaatttctactgttctgtcaacattgcctgcgcaaatgtagcagagaactgcagccaaagtgttaccagcagccatcaacttcgaggcaagggcatcacacagggttgtccattgttctccttgtgcaaactgtttgccaatgaatataagatcagcattcattacaaagaagttttctagtgagcagaatagcgtagctgacaagttgttcatcttggttcacgagtgcacggagataacatcacattatattgttgaaaagagttaaaagtgatagcagaaaatgttttcgctgagtaagacacgaaaaagcagattccatttcctttatgattattggagtgcattgatagacaatatcaattagtaaatttcctttcttttctaagtatttttccctcagtcggagaaacttacagtacagaggagagcaagagtctctttccagaacttatgtgaccttgtatagataaggctcctgagatcattgttcaccatcgcagaaacaacctgaaatagataaacatacagtagtttacagattttgcaaccacaaacaggggtgtagatggcacttacctacatatcaagttgggaaagaatatacatataccttcatgtatggcgcactgctcgtcttcaaatatttctcacgagtactctcccacaacgctgtaccaccaacatgagcaataactaaagcatcggccatcttatttgcagttatacactgatccaccgcctccttgtaatctccaacaatcaacgctcgctggatggcattatcaaaaactgggtcagaactttcttcctcttcttcttgcatttcttgcgtttcttctcctttggtagaaaaatctgtgtcagaaggcataaaatctttggcagatgtagatacaggtgtatccggtttagcaggaaagttgttaaagaagtcttctccattatccatcgcaaatgcagctgcctcgttactgtcgtcaagatccagtgcatctgccgcagtatcctctaatctaatgccattgagatctgatgagagcccatctactgcctgatccttttccgcaacaggcaaagtaaagccaagatggctgatcaactttgtccttgaagttccttcctcttcgaacatgattttcagcaagccccatgtctctttctcctcttcggatctgcgaaatcagtggaataaaatggtccaaactgagttatctcatgagtttttataagggcgaatatcaacattttcaatcacaaggatggcatactcagtctcttcagatttcttctcgcacaaaccccttagagaagtcatatctccattttctattgcagcttcaaattcagaagttcgactcaccaaactctgttctgttaccaggctgtgcaaaaaaacctaaacatgacactaagtcaaattagaattgacgacaaaaggggtataaccggataaataaatatatgtacatagatacctacctcggatagaatgctcgaagtaccctttgcaggggcccttgcgtgacacgatacaagctttcccccaaatccaaaagatgcaccaaccgggcgcttataccattttggtgcttttaaaggagctgcatagagaggaatataagaagtaatgttggtcctgaagcttttcatcttccagcataaaaatgatagaagtaatcaacggtaaacaaacggttcagattgggtaaatggaattaccagtaccaaaattattctcttcaacaccatagcgactgcaaccctgcaccaaagcgttgaatacgtttttttaatccattctaggaggggagaagggagatctacagttcaacaggtcttgctaataaggtaaatctcaactacaaagtgtataagattaaactctaaaacatttgatttccagtggtatgttaactggggacctgaaacctaaaatgatgaaggagaacagtcgatagggctggattcaaaagttcattatttgttatgcctcatacattatttacattcattcatatagaacaaaataatttacaattactgaagggcaaactactaaggtacctcgatattgtagatgccaattttcccatcaaatgaagatgctgatataactccaggtatctttgggtaccaatgaacatcaaaattccaattgttgccagcaggtaactcagccacaatctgttatggttggatcaaactcagtcaaaatggaaaatagttaactaattcacggacccagcaaatctgtatcttttattgattccttcacactacctctgctgtatttgtatcccagcaaatcgttcggttgtccttagcacaggtgagaagatatgagctgtcacttgggcaccactccattgcaattacccctgacagataagaagtatcaccactacacttcaccaaggtgtaacaccaagaatgaagacaacaggactataatataaaggcaccaaaatatgagtgggttaaagactaagacgtctgatctacaaggctgtccacttaccaaccatagaaaatgataccaagctagagagaagcactgagaaaagcattttgatatcaatgatttgaaaatacctctttggtgtccagtaaactcgcgcacaggtgacattatattcctcatgtcccagagctgattgcagataccttacatcactaaaagaaccaaaattgaactatatgaagcaacgcgttaaatgattccttaccttcaaagtaggtgaactgtcgtcatctgatgcaaccattatctgagtagtaacgttagggttccactgtaaaacagagcaccggcgtcgaactgaatctgcaaagctgttgaatgataatggcgagatcaaggatttgacaacaagtttttcgagagcctcaataatatcacttaataaattgaatacttacttaattataggcttctgcttcctcaagtcccaaattactgggggaaaagaaaatgaaaataaagactgatgagcagaagcagaaatatagtagacagaagtgaagtagtagtcaagtagatagagaaagagagagaaacccctaagtctcaccagtagtcccattgtatgaggtagaagctaatatctgttgaacttttctattccacgatataaaggagatttcaccttgcgtagcagaaccactaccctgcaaaagaccctcgcataaagttactcatgggtttataccaaagcaataatgagagtaaaaggtaatacaaaaaccaaggttgttgactagtaagaagtggtggtataccttgagcagtggaaaatgagaaggctctgaaggctttaataagtcccaaatgcaaatttcaccatcatcagccccagaagcaagtagatttgagctgatagcattaaactcaagaccacgaacctaagaaaaaaagaagcacgcacacatgaaaatgaggagtgataaaaacaaaacagcgttaagcaacaaaataatgcagagagacacaactcacagggcctttgtgaactgaaagatggccaacgagtgcattttcgctgggctgggaactgaaaattgtgacagttgttcgagttagactcgttcagatgaaaattggataccacatacataactctattaatgcggattataaaaaaaaacagagtgaaaatggcgattcaatagcagcaaagcaaggcgaggaaaggaaacgcacccgatcaaagaaagaggattccatagatctatatttccgtcgacaaggccgccggcaataagaccaagggcgaattcctcggatccagatccgtttcttccccaggcgagtctattgaaccgctcggagctggggatttccccgacgagaggcaagtcgcgatcgtcagactgaaagtcgagcttaaagatctcgagattggcggaagagctaaaggagagatcgacggctccggccatggttccggcggccatgtaaggagcatcgggagccagggcaacggaggcggatcggcccacccccttgatgcaagccatattggaatcggagattgggatttaatttttagggtgtgtgaagttgaattcttgtaaattgggatctggagaacaaaggaggagaggagttacttcaccattatagatttgattagaatgttttttattttcttatttcgacaggggcgaaactgtactttcaactcaaaagagtaagggtaatctcggacactcccctaaggttctgagagccattctaaacatgacacgtcaactaatctctgaggcctatgacccatcttatttgggccttggaacaatatgctggataaatctcattacccaactttgaatcgcaacaattgggcccaataatgtgttttcaaaaacacgtgaaatttttatcatcaaatttgaaattatttatttaagtggtcaatgagattgttatgaataataaactgggaaggaatgtgctgaaacatcggatctggccagtggggctactagtacacgaaagtcccatgttcggctcatatcattgtcttacattttttctgttccagatttatagaattcgtattaaacaatggtagaaaataagctaatatttgtttgcagttaaatgtattacgaagaaacaaaagatggaatgatatcaagtgtgaaaatcaggattgcagcatcgactcacacaccacatggcataacatgatcactcagagacgttgacatcttctctcctcgctcttttttttcttcagattcttagaattccacttgtacatttttatcagggtaatgcattttatgcttctttaacttttgttttgggaaaaaaaagagaaataattattaaaaaccaataatcattgcatcattctacttataagttataagttgctatcaaggtgtttcgtttttctctcccaaacgactaataataatcgaaggccatatacattcgaagattactaatttaatttagtaagttcacttcacacccatagacacacaaccttttcttacatgaaacatatatatatatatatatatattgattgaggcccgaaaaataaaataaataaattaatctttaatctgaatctgttatcaaaataattgtactactttaaaaatgaaaaacaaaaacaatagttgtcaaaaaaaaaaaaaaaaaaaaaaggaacaatcattcgtatggttggaggttttgacccacaaaaaagaagaagttgtttaaagatgcaaacccacacactcgtttcttcatttaactgtctcttcttcaaaaccaaaaccaaaaccaaaaccttctattgtttccctcccacgctataattcatagacataagagaatgaggaaaggacagggctactcctactctgtaatcgcatcggtgttggtgttactgtgtgtggtggtgtctcgaatcgaatgcagcagccaagtgcacgccctgagccgtctttacctgtctaagcgaggggttggtggttcgtccaccatggacacaagccatttcaaggcggttaaggatttgaaaccgtcttcgctgcggagtgctgctaatcaggaggggctaagaaagagagatctgatacggagattgcccggacagcctcccgttagtttcgatcagtacggcggctatgttaccgtcaacgaatccgccgggcgttcctttttctactatttcgtggaagcctctaagtctaaagattcttctcctctgcttctctggctcaacggcggtacgtttccactgtccacacgcatacgtatatatatttcttttattttggtttgcatctttagttaggggcactgcattatgggtttatatctgtacatcttatatctgagtacaaagatgaacaagaatgttagtttgatcgatcgaggctgtctttttctcagtgcttattaatctatcatatgctatatgattttcagaatttaataattgtgaggaccataccatatttatgccttataggtctgctaattttctttttcttttataatttttaaatcaaattatcggaactaattattatttgcgcaacaatagtagtgaataatagggaaaagatccacaaccccaatcgaaaactcaactgagaaaagaaaaagaaaaatgatttgccttttttcaaaaatggcacatgctgaggatttctcggcgtgctttgtttgttgcacagctctactggtcaattatttagccagccactacgtatctatctatatattatatactgatttctatattatgtatgtacataaaaataaaatgcaatgtacaacatatattcaaattcaccagagacgttaatagtaagctcatcagtgaattagctgtcacaaaatcgagaatttgattacagaaatatgggtgactaataatacatacatatgcataaagtgtgttggaaataattaacaggaccgggatgctcgtcactggcgtatggagcattacaagagcttgggccgttcagagtacacagcgacggcaaaacgctttttagaaaccgatatgcatggaacaatggtacctatcgtttttcttttttattaaataacaaaaataaattaatggtaaacgattcttgtgattaaaaaattatcaaacgggtggtggtggtgcagctgcgaatgtcttgttcttagaatcgccggcgggagtggggttctcgtacaccaacacgacgtcggacctggagaagcacggggacaggaataccgcagctgataactacatcttcctggttaactggctggagaggttcccggagtacaaaggcagggacttgtacatcgccggtgagagctatgccggccactatgttccgcaacttgcccatactatccttctccatcaccggagcttcttcaatctcaagggcattctgataggaaatgcggtgatcaacgacgagaccgacttgatgggtatgtacgactttttcgagagtcatgctttgatctccgaagattctttggctagactcaagagcaactgcgatctcaagacggagtctgcgagtgtaatgactgaggagtgcgcggtggtgtccgaccaaatagacatggatacatattacctcgacatctacaacatatacgctcccttgtgcctcaactccacgctcactcgcaggcccaagcgaggaaccacaataagggagtttgacccctgcagtgaccattacgtgcaggcctacctgaacagacctgaagtccaagcggccctgcacgcaaacgctacgaagctgccttacgagtggcagccgtgcagcagtgtgataaagaagtggaacgacagtcctaccacagtgattcctctcatcaaggagctgatgggtcagggcgtccgcgtctgggtgttcagcggagacacagacgggagaattccagtgacgtccaccaaatactccctcaagaagatgaatctaacggccaaaacggcctggcatccatggtacctagggggtgaggtgggtggatacacagaggagtacaaagggaaattgacatttgccacagtgagaggggctggtcatcaagttcccagcttccagccaaagcgctctctttcactcttcattcacttcctcaatgacactcctctccctgacacctctcgttactaaatattctatctgagattgtaatttctctcttaattagcttttattcatcctcccatccattttttatctactatttcattacatacctttgaatgttaatatctgttttgctctcacgacctaaaaagagaaacttatctctttaccatctacttgtccacatcttctacattaccaagatagtatattcattttatcatctttaggacgtaaagaacgatgcataccaagaactgatgaaccttgacatctttccgaccgaaccaggttcgtgattgcgcaatgcttgttcctgaatacctatgttttctgcttctaactgcaaagaggaaataacaggacagcttgcatcattgaccatgcccaccctcactctctaattatacatacactagtttacctttttgactttctgttggagttcatcaacagcctgctgtaaggattgtatagtttttgatacaatatcttcgtatacggtttccacttcagccatcgaatctaggctgaaaatgatcccttcctgtataaacacatcttctagcattttgatgtcttcgttgctcatcctctctttcatctgtataaaataacaataatgcaaatgtatcttctacatcccgttttctgaatattagagagaatgaggaaatggctgacgtagagtcttaaccttttctaggatcctcccacatttttcatctttggtaaccgaggagggttcctcctgtgccttcgcagatttcacttcactagcacgtggtgatgcttttatgtgttttgccctgtacagtaaatggaagcaaacatctctcttaaacacgttcaataacgtaacacatggagcaagaaaccgttactgtgctctgagatgcatacctcatgccaaacctgagagttgagagcgtctcagatgcatttaaagtgcttggtgagcaacagcaaagcagcgccattcgagaatttccaccctgtggcatgagagaccacaatagaattgagaacaagctagaaaattataaaataaaatcaacctgagaagatatactaaccagggcatcctgtaagatgcgagtaagcttggagtcacgatatggtatgtgattccctttgctagatggcccactagtgagagcgtttatcacgttccccaaggctgagagcgatttattgatcgtcttcgcttcttcaagaaccctaccttctgctccagttttgtctgctttctctgagccagccaggtcgacaagaatcagttttcctgtttttaccctgttcacatgccagatatgtatataagctccaccactacagcatcacttttttctgattaattgtaaaaaatcgttaccttttatctttaactgaatcctgctggattgtgaacaagtaggcgcagtggcttctactgctggacatattcatttctgtcattcattgttaaactggaaacattcttcaagatgactctcaatcagttttaacctttcagtcaactcggagtagcataatcataatctcactatcgactaaatggggaaacattgaacaagtaagtgctgtaaaagctaagaggatacgggtttccccaactgcgcggttagctaaaccggtctgaaatggcaattggcatcagaaataagaaagaagaaggccgtataaggcaattaagaaacttagggtagctgctatcttacgcatagatgttgtaatgcctccaccgaatctgatacaggcacctgaagcaacgaatgattaaaacttgcctacccagtaaagatttttctcaacactagcaaatagaagatataagacaatgaagctagcctctgtaacgcctgacaagagtattccttgtgttttgttctccttgatctgtatgtttgcttttgataagtccaacaggtccctgagagatatatgaatttatcgataagctatataccctagaagaaatcagagggaattacatacacaatacctgactttctccatgtagatctcaacctagaggagacaaaagacacgtaagatgtctatacaggagagcttgaaaggagacttatagcaagtgcatttaagtcagtaccatagacaatttaacagtgtatcttgcaatatcattggaagagctgatttgctcaaacatcccatggaccactcttggaagaagtcctttattgtgctcatcacagtcctggatgcctggtccctgaatcaatcgaagaaaaccaaaatgagccagaagaaggaatggtccttgtgctacaggaagaggtatcaagatgagttaggtgacctccatggaataagtcttcccagcccctgtctgcatagtataacatgaaacgatcaaattgagatcaaaatctgccaaattaagaaaaagacattgaaagcatttccagataaaagagatcaggagaagaacaaacctgtccataagtgatgattgttccgtttataccatttacagcgtctgaaagtagtagtagtagtacaaaggtaaaagatgcaaaagacaaaggtaggaggaaaccaaaaccaaaaatgttgattacattgtaaaatcataagattggtgctcaaatgtttagatctaaaatccagaagagaagatcaaggaatcaattagtacctctcatgatggggagagccagaaactcataaaccgcagcttgggtagagtcctcataaaaaactctatcgaggctaaatgtaaattcatcttccttgtcatcctacacgcaagtaaaaacgctagatagagtttgagagacagagagagagagacaatattaatcaagcacacggcgtcgagtagacaaacttggaaaacgaaggtttcagcgtcgatgggtcgagcacagacaccatctctgctgggatcgcgcatctctttagagcttcgcggcctgaatcgcgcacagacggttacgttagacatctcctctccttatcggaacgagctcagtctacagtgaaacacccaaaatgagtcagcagaagatgaatgaaattggggaaatagtagcacaggaaatttgaagctgagagaaaaggaatcggaacttacctctcaaatggagtggagagtcagagtagggtttctcttacgggcgggaaagaagaaactcgaaatctgatttttgagaaaagagaaggaagaagaagaaggagaaggagaagaggtcacgaggatacgcgtgtgggttgttaaaagatctaatggtccataagaagacacgtgtcactaggaacacggtagctaaggtgcccgccacgcagagaataatagcttagaaagaatagggggtgttgttatccccttgggcgtggagtggattagggagactcgcactcttcttcttcttctttgtacccagaaagaaagagagctccaacaatggctgcttgcgctactcactcctctctcatgctagcatacgccgccgcatccactcgttcccaggaccttacccctactccatctcttttctcttttgccagctccagacccaaccacttgagcttcccgcttcttctccttgggggttccagggaccggagatgtgctgctattgacagagcttccaaccacaagtttattgtctccgccgtggccgctgaggctgacctcgacacggaggaggacctggagcagaccgccaccgccgtccttgatccgcccaagcctaagaaaggaaaagccgctttggttctcaagagagatagagtatgtgctttacctacttcaatttcgcttcctttactcgtgaatcatcactttgtttgcttacccattgacagacaaggtctaagaggtttttggaaatccaaaagctaagggaaaccaaaaaggagtatgatgtcaacactgctatctctttgcttaaacaaactgccaacacaaggtttgttgagtctgttgaagcccatttccgtctcaacatcgatcctaagtacaatgaccagcagctgcgtgcaacggtctgctttgccttttgctggatatacactctatcttgtgctgcttcattccacaacattttttaatctcaatgcattgtctttttgtataggtgagcctgcctaagggaactggccagactgttatagtcgctgttcttgcacaaggtatattgccccaccaaattcactgctaggacttaggacagagattatgctttaccatttcagtcaccaaattcactgttaggacttaggacagagataatgtttacggtatcagtcagtcagtcagtacttctctagatgcaacattgtttggtgcgattgactttttatttatatattgattggatggagttcttgtgtatcatgtggcttattctttctaaatctttggcttgcaccatttccatgctgaacttccaggtgagaaggttgatgaagccaaaagtgcaggggcagatattgtgggcagtgatgatttaatcgaacagattaaaggaggcttcatggagtttgacaagctgattgcatccccggatatgatggtcaaggtatgtgttgatgatataatgttctacttgttacagcatatgaaaccgtcatgcttggcaaataaggtggcatgagatacttgtaactcgtgatctattttctaacattcttgaacttggcgcttaggttgctggcctgggaaagattcttggaccacgggggctcatgccaaatcccaaggctggtacagtcacagcgaacattccccaggtaagcctactctgcaacatcttttcctgattctggtagtcatggcttaaagatgcataaatctctcaggctattgaagagttcaagaaggggaaagttgaattcagagcagacaaaactgggattgttcacattccatttgggaaagttaattttacagaggaagaccttctcataaacttccttgcagcagtggtaggctaattctccattcttattacgtatttctgtggtttaaaatacaaaaaaaaatgaagagggaaaagtaaatgatgaaatgcagaaatcggtggagacaaacaagccaaagggagctaaaggagtgtactggaaaagcgctcacatatgctcgtcaatggggccttccatcaagttgaacataagagagatgatagacttcaagcctcccactgcgaactaatcgacaacgccatttgtaaatggggtccttttgggagacgggcaatgccagtgtagacagagaagagaaacaccaagtctagtctgttagtaatcttttcacgcctcactgctttgtatcactttgatggccatttgcttcttgtcgttatttatttactattgcctattaaaatttggcaaggggctgtacatgtcaggacgcagaactctttagtactctctaaaagaaaagaccttacattgatctttaggttacatacgaggaggaggtttctgtgtacattacatgtgatttactactacaaatattacaaggccagactctgcttcgtcatttccattttggtgagaagccctctcatctcttcctccattctcatcttcatttcataaaactctctctgccctctctgcattgcctctaactcctcgtacctcctcctccttctctcctgtgcatcctccatactcaacttccccattctccgattgtactcttcttctatcttctccttcttcgctattgctattcgtttcagtccctctgcttctcttcgtgcatcatcggcccgcccttggaacatttctgcctctgcttgcttcattctcacaatgctctctagctcttcgaaacgaggttcctttggtgaacccctttccaactccatctccactgcacatatttcaacttgcctctctctgtggaatgcatcagctacgctcgctgaccttttcagctgattatgcgggttatctgagcacaccgatctcagccacgccgtgtcctgactagggcttcccctctcatgcctgggttttggctgttcgtatatgaacggtgcactagtttcagcaggagtggaggaatcacagtctgcaatcaacaggcaaagtatcgacagattgttacaaggaatatctatggcacatatatcacaagaatttaaccaacatgtgttcactgtgtgatcatctatactaaaacagactaataaagccatatttgatacccagataaagctcacaatttatacaatttcgcgcacctgaaatgaaacccaatatgcgattgcaagcttcaggaaggcctatcaatttacttttcaaacttgccagcatcgcatcagcagcttgtctcagctgtttccctctagagtctttgcttgatgaaaatattttattgacatactccagttccttgcaaaagcgctcaaatttccattcccttgcaaaattcagaaacacttctttgacaaagccaaacatctctgagggatggttacaggcaacacagtgaaattgcatctcggtcattcctggagcaccagaagcattgatcccattccggatgtaagactcttttatcccacaatctgtgtggcaccagtgtaggcacacatcacacccaacccagctacaggtgttggatgccatatcaaaatttgagcacacaagacacatgcaagcactacaaaatccatccttccttgaacaaaccctgcaatcgcattcgtccacaggcaacagaaccctacaagaaagatttttgcatctcatgttcatgaaaatctcagctaaatgggaagacgagatgctgttgtccaaaagaaggaaatcagaacgcccagatttcagtgcgaccaagatctccaactgagcgcgatgagattttgtaagcaattccagtgttatatcagtcctgttctgcaaagcatcttgaaaagcaccaagttgtacattcttatccatgttcagcatcatctgccgaatgttttccttcaggctagtgatgtttcgagtgggcatttcatgaaatctcttggtcattacaggcatcgaatcggagagaatgtatctgatgacggtctcaacaaaatcatgcccaccggcttccagcccagttatccacgaattactaccactgtaaaagtccttggccgttttcttctcaacagtaaactttgaaccattttcaagagagcccgttcttggacatgctgatctaacatcaacacttttctggaaactcaattgtttctcaagtatatttgctgccttagagctcccatcgggcaatctaagatgctcttcatcagcttgacccgaaattaaattgcctttcattgctcgaggttgaactgaaccatttccattttccatcagtctttgatagactgtattctcattgtactttgaatcattatgagacagtgcctgccaatctataccctgaaatataggtcggctatgaactgactgctcattgtctccaatattgtgactcagcgaacagcttggattatgattgaacgaacgggaacctgaaaaggacatagacattgtaaagccatcagaattggtacaaaacgtgtctgtcaaagaccgaacacttccagaacggactggtgaccccagctgattagtatcctggccaccaatcggcaacaatacatctggtaggctaagtgacagatccagtggctccaacaacaacttctcatccttgtgcttattgacacctgactgctcagttttttttgctctcctaaccggagaactagagaacagttcaaaccctctgatactcggtcctccgaagttgtcatctttttcatctttatccttgtcatgaagatcctcagtcttgctttcagaaaagagagcatttccaactaaatgtgtaagagggacatcagaatttttgcctttatccttgcatttgtggacggagctatccgatacactgctaatgtattctgcaggcgttctattagctagagcattttcctcaacacattccgggccttcaacttccgctttgttggcatcaccatcattacccttcacttccttaagctcttccaaccgttcaggaacatctggataaagagtttcttccaacttcactccatgaaggttctccttataatcctcatctttgtcacctttctcgtcaaccgtatctgtaatcttattggcactagcagtgattgtgccatctctatgatcgtgttcaatagccaaagctgtagaagtatcattcacgttgttttgagaaacatgcatggactcagtcgcatgctcaggcacattttccgcgtcttcaacacttttcttatcggtcatgctatctgtcgtttccatttccctattaccacccacatgactgagttccctgttactctcagtgttggcatcaagttgagcgctttttccaatttcctggaagcttctatcaatccttgcgttcttatgatcatcagcagagcaggaaggcagtttacagtcatgtttggtttgatgagcaaggcctgaggcagtctctggttggggctctggctccagctctccttcctccatctcgctactggttgtactgctcttaccctgcacttcctcctcgcttttcttgacaacatttccaacacttttggattgctcactcccggaatctttggaccatgtcggagaagctagagatttggatctggagcgagaatttctggaatcgagtggtttgaatttggaaagctcgttaggcgagtctctggaccaagaaggggatttgagactcctatccctctcagcgtcccttaatctcctatctcggtcatcaacgccaaagtcattaccaggaccaccaaacctcctccaggaagagacactagcatccctattgggcctctccctctcagaacgaaatccctttggaaaagccctccttgagaaacaggcgctctcagatcgatggtaccgggcatctggccgatgattatccaagtcacgattggatcgcctacgggaaaaagccctggagaagccggcagcatcttccccgcggtcacggttgttgcccgagaagaagccccggtgggaggaagaggccggacggtccgagttgggaggttctccgtcaacattcttatcattacagaaatcaaggtcgtcgctggatcttagtctcttcatcgttttagttgctgaatatgcgtcagaaagctagggtttatgaggatcggaaattgcagcaaaacgcacaagaggagaagggaaacaaaatagaagagagtacctgaagattggggcaagattcatgtcggaagaaccctaacttgcagattcagctgccttttttatataccaaggaatcacgcaacgaggaaggagcaagcaaggaggaggaagacgaaaaggaatattacaagtcaaactgagtgggaaaagcaccatttccctttgccctccctttactcgcttatttacatcatctgccatctcccaaagaccagagaacgtgggtgtttacgtcattttcgttgctagtccaatctttgactcttatcgcgtgtcgtcgtatcctccaccactagcattaaataattagtattaaactaaagacacttgttgctgggctctatcagtggccctttcctactccatcatagatataaaatgcgtaaagtaaggcccatcacaactacttatatactttaaacattattaatgttcccttactgttatgctagttccaaacaaacggtttcattatcttctccaattccaaatgtggtgtctaccatctgttcgaccaaatgtctctgagatgttcttcaagtccccaatgctcaaacccactgctagattctcctccacttcgtctccctatcttcctccttccttcaggttttttgctctctctcagactcagggctttaactcccactaattcggttcttactagatttttgctctccagcgtcgccccgatgatggattggacagataatcattaccggacgcttgctcgtctcataacaaagcacgcttggctttacactgaaatgattgcagctgaaacccttgttcaccagcagaccaatttggtagactaattttgttttcttaaatttgtgtcgcattgaagaatctcgctagacatgtccgttcttctgcactttgcctcaggacaggttcttagcgttttctccccaacaacatcctattgttctccaacttggtggtagcaatgtggaaaaccttgcaaaggctgctaagctttctgatgcttacggatacgacgaaattaatctcaagtttgttcagtttctttcgccaacaccgccttgggtggacttctatactttaactgggtttgttttgttggcttagctgcgggtgccccagtcctaaggtagccggtcatggatgctttggtgttagcctcatgctcaaacctaaggtccgttactttactcctcctcatgatttcaagagatatcttctctttcttaatttcacactttcttttaagcttgttggagaggcaatgtctgccattgctgccaataccaacgtccctgttactgtgaaatgtcgaattggtgtagacaatcatgattcgtatgatgagctctgtgagttgtttttgctttctgtttttctaaagtctcgtatggatttgccactacgctctaatactgcttttcctttactcttaggtgactttatctacaaggtttctactctatcacctaccagacatttcattgtacattcacgcaaggcactgctcggtgggataagccctgctgataaccggagaatcccacctctaaagtttgtttaccgtaacttgcctcttgcttacctgcaattgtgtatgatctatttgtttctttaaggtcacctgtttatgggcgtagttcaggtatgagtattactatgccctcgtgcgtgacttcccggacttgagattcactattaatggaggcattacttctgtttcaaaggtcaccaatcttggatatcagagactagctttctttctgcactaccagggtaagactgaaaaatttctgtgattgtaaggtaaacgctgcactgaaggaaggagctcatggagtcatggtaggacgtgctgcatacaacaagtatgtgaaatttagctcgattgatctgagctcttatcagaccccttttcttgactcgctgtctatccttgacagcccatggcagacgctaggacaagttgacactgcagtttatggtgtaccaagcagtggccttacacgccgacaggttccgtggaaatattcagcttttgagatgctttgtctgtcaaacttatcaataagctaactaaaatctgcgtgttgttgggcaggttcttgagcaatatcaagtatatggagattctgtgttaggaacacatggaaacgggaggcctaatgtgagggatttggtgaaggtaggtgtggtttaaacaagaaagctgtaggtgttgagaaaagtaatacaagtcttgtgtgtgaactgaagatggtttcaattgattgcagcctctgctaaaccttttccattcagaaaatggaaatagcttgtggaagcggagagcagacgcagctttcaaggagtgcagggtgtgtgatatattggtggtaacacgttagaaagtttgtaactggtgttgagtggttgaattatgtattgcagagtgttggatcgttgctggaagaaagcttgagggcgatcccggactgtgtcttagattcacccatatctgggagtccagagagcggagacgaagatgtgttcgcagatgtgcacaatgtattgcccccaccatacgaagctggagaagaaatcatcttatgcgcttagttgtcgtttgtaatctgtgtttgtgattgtctctgtcgattaaaattgtaaattgaacggggcttacttcaagtggttgttagtcttgggctcgtgtatgggcttttttgttattttttttgtttgggccggaaatataactgggtccatcatctcaagaaaaaagattccgttgcgacgtggcagcgtttccgccaagacgcgggccatattatctggtctcaaatcacctcctccttgcagcaaaacaaacaatcatggcggagaaactcagtgatggcagcagcatcatctcagtccatcctagaccctccaagggtttctcctcgaagcttctcgatcttctcgagagacttgttgtcaagctcatgcacgatgcttctctccctctccactacctctcaggcaacttcgctcccatccgtgatgaaactcctcccgtcaaggatctccccgtccatggatttcttcccgtgaaattctctcatattctctttgatcctttcccctaagggttatttagtattcttatgatcgtctcttttgtctcgcaggaatgcttgaatggtgaatttgtgagggttggtccaaaccccaagtttgatgctgtcgctggatatcactggcacgttctcttcttcttcttccatttttacagtattcaattattcatcatggtcgcttcctacttatattaaatgcttcaccctgctctcttttcaggtttgatggagatgggtacgtgaatcgtgtcatcttcttgtctcccttcatatatatctcctggatttatatttcatcttcttatagtcttcctctttgctcaacttccttcatgttccataactttgcaggatgattcatggggtacgcatcaaagatgggaaagctacttatgtttctcgatatgttaagacatcacgtcttaagcaggaagagttcttcggagctgccaaattcatgaaggtgcgttagtataataaagagtgacttcatcttctgcattctggaattgttggggcaatcatttgtgctcttgtgaccaattttgcagattggtgaccttaaggggtttttcggattgctaatggtcaatgtccaacagctgagaacgaagctcaaaatattggacaacacttatggaaatggaactggttaactacttcatctacttttctattcttcctctgttctactagctagtatcgtaaaatcgcactctctttttccatgcaccagccaatacagcactcgtatatcaccatggaaaacttctagcattacaggaggcagataagccgtgtaagcctatatgacctcttcgtttttctttttggctacattggtccaatgtgagtaagtatgtgaaccggatctatctagaaaccgaatcttctgttatgttggcagtgtttctcttcacccatttccttgtttgaaattttgatatataagatatgcatggtatgaagatttatgtttcgtttcgtaaaagtcaaagcctctctctctctcttggtctgtagacgtcatcaaagttttggaagatggagacctgcaaactcttggtataatagattatgacaagagattgacccactccttcactgctcacccaaaagttgacccggttacgggtaagacttcacttttccctggaagaacaagttactatctctgttgacatgattaaccgtcatgggctctctgtgtaggtgaaatgtttacattcggctattcgcatacgccaccttatctcacatacagagttatctcgaaagatggcattatgcatgacccagtcccaattactatatcagagcctatcatgatgcatgattttgctattactgagacttatgcaatcttcatggatcttcctatgcacttcaggccaaaggtatgttactcatcaagtttaatggttactcaagcgtttattgcctcccatatgcttttctttaaatagtgtaagagtgtaaggaaattaaggttgcctgttttgaatttcctttgattcccaggaaatggtgaaagagaagaaaatgatatactcatttgatcccacaaaaaaggctcgttttggtgttcttccacgctatgccaaggatgaacttatgattagatggtttgagcttcccaactgctttattttccacaacggtgtgtgctttttaatgtctgtttaagttttcatatcatcaaattttatattctatatataccaatcaaacatctgtgaatgacttcgtatattcagccaatgcttgggaagaagaggatgaagtcgtcctcatcacttgtcgtcttgagaatccagatcttgacatggtcagtgggaaagtgaaagaaaaactcgaaaattttggcaacgaactgtaagaatccctgacgtgttacatctgtcctgctctctcataaccgtaaaccctcctcaactattacctgtgcaggtacgaaatgagattcaacatgaaaacgggctcagcttctcaaaaaaaactatccgcatctgcggttgatttccccagaatcaatgagtgctacaccggaaagtatgagttcacccgtgtcctttgtgttgatatgcactgtgttcccagcaaggaaacctcatcatgcccaacgtttttttttgttgttgtttggtgcgtttaggaaacagagatacgtatatggaacaattctggacagtatcgcaaaggttaccggaatcatcaagtttgatctgcatgcagaagctgagacagggaaaagaatgctggaagtaggaggtaatatcaaaggaatatatgacctgggagaaggcagatatggttcagaggctatctatgttccgcgtgagacagcagaagaagacgacggttacttgatattctttgttcatgatgaaaacacagggtagttatagctctcctgctagttccttatcagtcatgacttgtagcttttgtttccttctggtaaaataacatgatggttggaaatggacaggaaatcatgcgtgactgtgatagacgcaaaaacaatgtcggctgaaccggtggcagtggtggagctgccgcacagggtcccatatggcttccatgccttgtttgttacagaggtaccaaactctaccacccatatatttctttattacgagcgatgcatctctaaccaccagtgggtctggtattcacaggaacaactccaggaacaaactcttatataagccaagctgtgtgcatatacacataatacttctgagtcagagatgtgaaactcggtgatactgaattactgatattaccattacacacatattatggcgttatgtattcataatactgcctggtttctctttacatataattacatttcatcctccaatatcaacaaggtctctacttttcattggccctttctccgttattagaagtagaggaagggtgggtagaaacttaaaaagatggacaagtgcaccataaccatatatggattcagcgtttttgacttagcatttagtatacaatacgagtgactgttaaacttaaagcacacacaagcgaaaatggaactagaagaaaaattacatgtacagagaaggactgaacatgagagagtatagtgtggacatcttttagactattttttggggttttcactacactaaaacaattacttgatgagcctcgatataaaaagccaaaaagaaaagaagaggaggagccccttgtgccgatcaatgaatgctgggctccccaaagacctcgctgttacacaccgggcaaacctgtgttccatatgcataaagagagtttcagttgaactgaggatataaaccatatctataaggtcaagtaacaaaaaccttgttgatgcttagccatttggaaatgcattcagaatgatacacatgcttgcacggcagattcatttgcctctcccctatcttgtacttgagctggcatatcacacacctgctcatcacaagcacacttatcactttatcagcataatcctgtgaccaacattattacaagcttgctatttacctctccccagctcttttcctggagaagatgctcccaaacttatactttttagtgggaagcgtttctatgagttcctgagacaaccccctgctttctgttcctactgcttcccccagctctactaattcctgatc

SEQ ID NO: 1384 - DNA, 30649 bp, Arabidopsis thaliana
accttgtttaaaaataagagaaagttctgggctgcaaatcttcataacttcaataaaacgcgtctttgaattgtcgtcaggtattgtgtctctcgacacaaggggtggtgtcgatcgacacctacacgatttttggtctccgaatttcttctgcaacataagttctctattttcctccagaatgctccattatctccaattgcatcccaaacttgtaaattcctgaaaataactataaaagactttagaaataacaaatagactctaaaacctataccaaaattataggtaaaagcagtaaaaatagagatatatcaacagtcttgcaatatgtcaagttttgttgataacgttcaaacattatatgttaaggttaataaaatttatatatttttttctgtaagataaataattattcaccttttaatagattaacaaatatttcatcattattatgtttaatagtttaatataagactgcagttggaaaccgagtctatcatggacaaaatgaaggttgttattgaagctgaacaaccaaaaaatctgagacaaaacatgtactcatgtacttaaaagggtttagatacatgtacttaaaagtttgagacaaaacatgggtcctaaaagtcatagacataacaaaatgaaaagcttaaaaaggaacatggttcttaatagaagcttctaatcatccatgaggcttgggaatttgaaggccttgcaacgaacctcagagtgtagtgttccagcattcttgcctaattcctcaaacatctccacagcaagtttagtccatagggactgcatgttctcatcacacaagccatcaaaggacttgccaagcgccaaacattcgatgtactttattgagtagatagcacaatcacatgcgtcaagattctccgggatcttcgtaatcctcttccactccaactttgagtagctcctcctacgttgctttgacggaataaatgaactcaacatggcaggaatcattgtcatcacaaacatgcactgtatcaccatttctgtatccgtagtcaagctcgggatgctatcataaacattgatccgtttttttggcaagtcaatgtccagagcgacccaatgattcccgttgacaaagaggtatgcatataggtgatccacatcaacaaaccatttcttgtttttcgccgcgtcacattgagctgtaccattgacttgatcctcataatgctccctgaatttgaagcacctataatccggttgaaactgtttatagtctttgagcattgtggagatcaaatcttggtccaaaaaagctattctctggttgggatattttgacggatcacgattgaatcttcggcgaaacaatgacattgcagctcccatgtgctgcattataatcaaaacaacaattattatagttacatatagtttcagccagctaacactaaatgatttaatcaattgaaagcaaaaatctttaaaaattgctatacttacatagtctttcagccatccatatttttctgttgaccaatcgcttcttggagtcattatctgccagtagaaccgagcattaaagttgctggtgttcaggccttctttttcactgcagaaaaaaaaagaatgagtaatgatagcacaaaacgtttctatgtgaagaaaaatagacacttacaaatctggttcgagccaatccttcagcctatcaaattggtcatcagaaacaggttgaagatgttcagttaccgaagaagacgatggtacatcagtgattatgcgcttcactgttgaatttcctacagacggatatttctgagaacccgctagctgtggcactcgtctcctcttactagtaataccgtccagattatctagtccttcttgaagtgctctcaatgcatcagtcgttgccttattagccatctgatctagaggattggagaatgtttcttctgaacgtgaagccattttcagattgtctgcattaaccttatcagtgacatccacaacatcatcatcaaacgtctttgttgttggagctacaactgacttcttcttctcaggttttggactatctaccttctctacctttacagctgtcttcttcatttcaggttttggtttttctaccttctctacattgacaattgtcttcttcttatcagattttgcaactttcttcttagtaaggacctttgtagcagcttccatgttcttcactgaattaacagccttcttaaccactctttgaataggcaacccatcaacagaacctgacttctcctctacaacccaagactgaaaaaaacacagtacacattcattgtaataaacgcagaattcaaatccaaaacagccaacagtaaaattaaaaactgacagctacttacacattggttactatttgcctcatattcatcattgttgtttgatgtggcagcttcattgcatactacaaggggctgagactctttaagaactctcatatcagtctccacagcttcaaaccttgtttttacactcgcttctaagcaagtaactttcttctccaacccatccaatctgctgcttgcattcttgtccatgtcactaattgtgacattcattttttccaacatattccgaatatccagcaagcttgtcttctcctcttcatcgacctataatgatgcatataacaatgttaggtaattcactgtcaacatatagacctatgtatatggaaaaatcagaaatggtaaaaacaggacctttatatgagctttccctgttctttgcttcttatgagatacatcatctgcaggcgttgattccatcactttactctcaccatcctcgtttgatgattcttgattctgtttcctcttatgtcgtgctgccacatgtgtccacgcatgaggttataaacggttgtggatgatgtctttaagcaagttgtcaagcgccgtatcatgattctcagctgagtcactccatttaggatacatgttttcttcagatacaaggatcatatggctcacacgcacctacatacatataatcacaagattaatgtaaaacgtttgtgcaagttcagtttcagtttttttttaaagacaagtagcagatttgatctagaaaaccttacatacctgtccgtgggcagccttctccttttcaatgaaagcggtaaagttaaaacgttttttagaagatctccaatcaagtagcggaacacccgtcagtgttgtttttctaaacccacaagcttctccaattccaggcacactctcatatatccacaccagcaaggcctgaacacaaccgtgaatcacataagaatccccgtcatacttgacaaacttcacagaccttaatagagagtcaaaagccactcgaccccaaggatacttctcaaaagcaacaggatcaagcactcttttagcactcgacaacgggactctagaaccgtgatgaatcccatgtactcccacatattgtaaacataatctaccaaccatcatcctcttctccaaactccatgtcttgctaatctcaaagacacgttccaactctgtaaacaatggaccaacagacattgctacccccatttcattccaaaaatctttgtaatcagtttcaccagtgtcagactcgtcaaacatatcgcaattgaggcccgttatgttctcaaactcgtagagagaaaatcttattggcctgcgatcaatcaaacaccacatctcatgcatgttgtctactcgcaactgattcgtgaggaagaaatgaactgtctgggtagcccatataaagtcactttcagtaaactttataaaaagaccaagtgtagttttcttcaactcatcccacacatctgcacctaatccgtctttgatcttcccaatttgagaaacatagcagctgtgggccatactccttttttgcaacgatgatttttcttcttcatacaagcaaagcggataactgcgggtatgactagaagacgccattcctaatcacagaaaaaacaaggttgcataagcaaataacttaggatcttaggtgccttgtgagattgacaaactaaaatcataacaaatctatcaccgaataatcctgaaaattgattaaatctgtgagaacacaacaccaaaatcaatattaaaactcaaagaaaggcgggaatttttttccaaaataaattcatccctaattggccaccataatctgaattaccagaataattatttctctttatgaaaatcctaattgaaaagctttacttgctcaagaaaatcattttcaataaacaattctaatgaaattgcccaaaatccttaccagattataatgaattgtgaattggaattatcaattgttaaccgccgattaaagtgatgctaaagctctgcaacaaaaagaatttatcattatgagaatcagatttcacattaatcaatcgaaaaaagaaaaaaatcaaatgcaaaggtggcaggttctgaagtttacttacaccgaagtcgatacctccgttgttgttgtggccggagaagcttcttttgataaggagtaaatcagaaaggggaaaatccacaaccctaatgctgcaacaaatctacagatctgcaacaaaaaatattaatcaccatcacaatcaaacgaaattcaatcgataaaagggacttattcaaaagcggtggtggcgggtcaatagtttgcctacaccaccagagaagtgaatccgggccaccgcgactcttccctgctgtttgtgtagccggaacctacgacggctacaaaatcttgtaccaaagaagagtgagaagaagcagcgaccaccggagaagagatatctcctagtcgagcagcgaccaccggagaaaggagccaccaccggagaagagaagtcggcgttacaataagccaccaccggagatttgttagggtttcgattcgaaatcaaagaagaagaagagacatgcaataggagaaaagagttttttacattttttattcctttatttaatccctcctttttattaatgattttatttcttctttttaaaagtatggtttttagtataattctggttatagtactgattaaggttaaaaagtcttttcattaaaaatgtgagtcattctagtcagccatcaattacgagagtcatttaagttattaatcctaagttatgagtcaatctgagcaaaattcagtaaggattaagcacaaatctttgattttaaaacaatgttccaccaacaaaattgacaccctccacaaggagattgtgcacaaactcaatcttagccattaacgcagcaataggactcttgttcatgttcttcacttgttttttgttctacggttagaacacacaataaaaagaagagagaaaacgcatgtaattaaaaaaaataggactaaatttctacaccttatctaatgatgaatcaaaatagaactttagaaacgacgcaaaaatttgatagtgcaaatttatccgttgaactatcccctcaaattacaagatcagtgcaatacttaggggtcgaatttcacaaaactgtctagattacactatagattattggtttcaaattaagctaaacagaaaattataaatttatctaagcaagtaactaaaatttgttttaaaatcaatcgaggaaaatgtaggctaagggaaattcttagttaatttagaattggatattaaataagttattaggatgattactaaaatctgttttcgaacttgaatcacaaaatgtaaaatcaatcaactcttgtttgagagattatctatgtctaaacctagaattctaaacatatgtgcgaatttataattttaaacaaacattaatttcgtgttcaaaaaaaaacaagaaaaaaaaacaagcattaattccagattcgattgtttacaaaattcctaaacaaaatctctttctgaataggtaattttgctcatctaagacagttgagaattatagttcaaaatcgtctaataaacttacaaaatcttcaaatcatagttcaaaacttgtacctccccaaaatctcattacccagatttaatccaaattctgaacaaaattactaaataaaaccaaattattttgtattcaacatcaatttgtctagagcttcgtcgaagcgttacaagttgattgttgagatcttatttggcgaagatgaggttcatatcacttctctgcaatttgtgacatctcttaaaacaaaatcaattcactttttaagagagattgattacacaaaatcaagaataatttacaacattattgaggagactaactgaagaacatagaaaatatggacgctgaatacaaggcccgaccctaatagagagggcagaggggcaatggtccaaatgtttttgttaaaagtttataagaagagcaaaattttctatattttactttttacataaaaatgcgcgataaattttttaacgttataaaataggttatcagttatttacaaaatggtccatattttaaccaaaatttgttttagaaaaaaatgagtaatacaaaatccaaaaaacataatttttctcaaggatccaaatatatgttgggcaatggctgcatacgaccgagaagacatgggtcggatgcaccaaggacgagaagcatggctatggtggcgccgaggaggagaaaaagtgagatgtagagattcagaagttctttcctcatttttaatacactatcttctaaaccatgagatgcaattctcaaaattctatggaaaacgaaaacatataatagagttttatacaaatatatttgttatcaaaacataactaacactctttttttttttaatataagtgatgtttacagtttttgtatacaaatgaagaaacgatataaattatgttcttttttctatattaaaacatcattcattatctaaagaaaaatgactcaaccaataaaagaataacaaaagcacctcaaaaaatcaatgatcactaaaataaagaaattaaaactttgcataggatagtgagattggcattaaactgtttttatcctactatattatttggaaagtacattttaaatgtaaccttatcttttgtaaataattacataggtgtgctattagaaataaaattttaaatagtaaattaattcatctctttaagaattaaaaagtcaaatactaatttaattaattaaattaaattaaaaaaaaaagaaatacattattaatttccaaaaaagtaaccaattaaaatcaacaaattagatttgatatctaaattatcatattaattttttattaattattatagttcacctctcatctttatatgagtaacccattcgagttcgggtagaacccgttcgggtttgggattaatgggtatatgatttactacccaatagaataatcctactatattatttgggaagtacattttaaatgtaaccttatcttttgtaagtaattacataggtatgccattagaaataaaattttaaatagtaaattaattcatctttaagaattaaaaagtcaaatactaatttaattaattaaattcaattaaaaaaagaaatacattattaatttccaaaaaagtaaccaaataaaaacaacaaattagatttgatatctaaattatcatattaattttcttattaattattatatttcacctctcatctttatatgagtaacccattcgagttcgggtagaacccgttcgggtttgggattaatgggtatatgatttactacccaatagaataatcctactatattatttaggaagtacattttaaatgtaactttatcttttataagtaattacataggtatgccattagaaataaaattttaaatagtaaattaattcatctctttaagaattaaaaagtcaaatdactaattaaattaattaaattaaattaaaaaaagaaatacattattaatttccaaaaaagtaaccaattaaaatcaacaaattagatttgatatctaaattatcatattaattttttattaattattatagtttacctctcatctttatatgagtaacccattcgagttcgggtagaacccgttcgggtttgggattaatggatatatgatttactacccaatagaataattctaaatatttggttctggttcgggtcgggtccatttgggtttgggtcagtttggataaaaagtttcagaccctaaaaattcccaaaaaatagaaacgggtattttgtatgtagatagcgggtatccaaacaaaaaaaacttttaaatttgttacgttttaataaatttaattatatttgaatatattttactaaattttgacaaacataacaaataatttttgaatagtttagttgttttggatatttaggtccaaaataattaatattttagatattaaattaatgtttgggtttttgaataccctttttacgtaacgggtaatttctggatcaatcggatatccacgggtttactaaaactgtacccaataagaaaatttcctaaaattctaatccgccatgacccggttttttggttcggatattggattggttatcgggtccgttttttcgtgagtcctatcaaagataatctaatgtagggctcaattaggttcacaaatataaccaaaatactatacaaagataatctaatataaggcccaattaggttcacaaatataacgaaaatactatacaaagactaattctaagttagaccaaaaattagatcctctaatacaaagaaaacatgtttcttaccaaaacaacttgtatacaaattttacacatttacttaaaagtacatatgttgtatttattataaaaataacatttttaaacaaagtcaatccaatgcagtattatatccaaatattgaaaaatattatagcatcacttttatactatacgattttttatgtaatttaaataaagtatacaatttaatttatacaaaatattaatgtccgtgctgtatagcacaggttatgatctagttattatgtaaagtgttaaagtgtttaaagtgtttctttattatttaataaaaatgtttttgattggctaaatatttttcttttgttttagggaaccaatttctatgggccgttcctagaggcaaagggcttatctaaaatgatgttgaatcgtttttattggcttttactaattcatcttatgtttatgtattttcttttaaaatcatttatttagtatcaccttatgatttgctctttttcctaattgaggagaagagcaattacaagaaaatatcatatataggcaatacgttttgaaatagtgactcatcgaggatttttaaaattgtatcagatatagtgactcaccaaggattttggaaattgtagacaatgtttttcataaagtttagcggggaattagtgatgcctgttttatttcgcctcagacttttattttaagaaccacacgattactgcaactgcacagcaaatcggttgtagtactttaggatcaaatccatagagagagaagtagttcagagaaatccgtcagaagagagtaaagctaggacaaaataatagcattagagggggtttgttgcaagtaaataagtaatcatctatctagtgttttttgttgttttaaaacctcttttctcttagtttttgttgctttgcattcatattttggcatatagtgttgcatttgcatttgcatttggttttattaggtacatgagtggagtttagagttttggaaggaaatggagcaaaaaaaggagctaagagaatacaaagtgaccagagaggagaagtgcaggacaatagaccaagtggtcgattggtcaaggaccagagctacaaaggagatttgaatctaccaaagtggtcgattgatcaaggaccagagctacatacgatatttaaatctaccaagtgatctactgcttggtcgattgctttcctaaaccgggtcaaaactctgtttattccgggttgatccggtttgtttcctcattactataaataatcttaacctagttttagagaaagggagctttttggttttagagatcaaaacttctcttaaggtcctttatcttaagttgttgtataaatcttgggttcttaagtttctatatcaagtacttcttttaaatttctcatctattttttagtgattatggctttacaaagatcaaaccaattcctttgcatgatcatgatcatgagtgagcagtcttttagtgttctttggttagggtagattaggatggtttagatgttgggttatggagtttagggctagattacttaagatcattacttattggttgctattaaggctagatcaatcttgatcataataatttagaccctataaatttcatgccaggaaggtgttcgatgaatttcccgaaccaaaatcttttaagtgcttttcataccttacctttgtaaattgttgattagggctattagtggctagatagacttgttatcattcttatagaaaatttgattgcctttgaaaattgttgatgattgattgattagtaaaggggctaatgtcatggaaatgtgttagtcttgcttagtgttctatggcctaaggatcattttgttataagctgtttgatgcccatagtccatctatttatcatttctaatcgatttccttaacccgagaattcgcctttggttatcacttagtcttttgttaatttcccgctttgtttcctttggaaacttgttagtcttttgttttttgctttcttttaccttgttttccattgttttttttgacaatgcattgttactaagatttaggccatgaatgttttgtagtttttattggtttttaactttttagtttttggtttttgaattttggtttttgctttttgtggtttttgatttttgttgtagattttagtttttgcaaaatcctgaatgaaaatttatttagtttttctacataatattcattttaaaacgtctttaagttgtctattttaaattttagtttttattttgtgtttaaaataaaaatctcataagtaataccaaaacaaatagaaaacaaacatagatttattgcacattaagacacatgttattgcataaactactatcatcatcaagaattccataatgatgcagaaatttcatctcgaatccctttcatatactgcattggagtattattttactctgaatattcatcagaataattatcttctgcagctatattagtagctatatggtctgaatcaaattcaacatctggatagtatccatcatcagtactaatgtgtctagtgccgaagagcctatccattatgtcgaggtcgacaacagggttgtaccagagctttgaagcatttggtatttcctataacaaaaaattaaaaattaaaatattagtttactatagtttggtagttaacaaaaagatatatgtgaaataatgggaaaacccccgaaaaaaccgccatttaatttaagttttgctgtttaatacttctagttttaaatttggaaaaaaaatacctaagttaattttggttgctttttaaaatcttcgtttttattaagttggtaaaaccgtacctccgaattaacgtctgttaactatcctaacggaaactctaactaggatcaaaacttaacccaaggtagttaactatatatatacaatctcttttcttatttttatgagtatgttgcagcagtctagtggttaaacataatcttttatatttttctgagtttgggttcgaatctcttaagaacgcatttttattttttatttcttttagtaggtcttcttcaaaactcgtcatcttcttactgtaaaccttaaatctttagcactgggaatgaattgaagaaatctctgattaggatcttctaatcttcacaattgcaaaataaaaaaatctagggtttaacttcaattgagataaacagagaaaaacaagtattggcggatttgaaattagagagctcaaatgaatttgagaagattagattaaaacccaaaccgatttaattcctcaattgtttccattgttaagtaacccatcataaatctgaatcaaagagacaaaaaatgagtaggaaaaggataattggtgaatgactgagaagagtaactgatttcttaaactgaaactgattatcacgatacatagtggttgactgagaacaaaagtcgaggaagaagatgaagtaaacaaaaaaaaaaaaaaaaaaaggattataaagatgtggtggtggggattcgaacccgactaaggagaataaaatgacgacgtttcatcacttgtctaccgcaacataaccgtaaaagtaagaaaaaaacattacttatattgggttaagttttgaccctagttagggtttcccttaggatagttaacagacgttaattcgggggtatggttttaccaacttaataaaaaagaaggttttaaaaggtaaccaaaattaatttaggtatttttcttccaaatttaaaactagagatattaaacggcaaaatttaaattaaatgacggttttttcgggttttttcccgtgaaataatatataaatattaccttaatagagtccttccaccattcgtcgtccatttcaatagcttttcgactagtcgaaaataaacttcaaaaagatttttcagagtgtaaaatttttttataacataagccattcaagatcttgacctgtcggttctagaaacgcttttcgaattctcgcttttctaattaataagctcgatctcagtctcatatatttcaagaaaatgatgaatcatactatcggttcattgtaactttggctttatatattacattaattattacatatacataattagtcaatgcagttttgtatgaaggtaggatagacgtcactagcaaaaacaaatatcaactaaatagatacctgtttgcattttgatgattgttctcgatacgccatacatatacagtagaaactctataaattaatactcgataaattaataaacacgataaattaataaattttgtcggtcccaaatcgggccaatgtaaaaattaaccaaaatcgataagataataagataataatttttttgaacttacataactatttgcatatttgatccgtcatagttgattttgtaaaatcttttatttgagaaagcattgctaagatttgtgtaaagagaaattggattaagcttcatgtttacgttcacgttaatgtcgtaaatatacagacacaatatcttgccgaaaaataaattaaaaaagtcaaagaaaaataaaaatctaacataagtatatatgcaaacaacaaaacatataaaaaattaaattaataacatttttaaaagaatatagtattgtatttacgtaaatatatctataaattaatatttattaacttatacgataaattaataaatattgatttataggataaattaatatcactataaattaataaaattgcatggtcccaacattattaatttatagagtttctactgtactaaaattaagtgcatactaaattataatgtaacatcgtaacattaaaataaatgtagttgattaaacttatcgcaaaatccaagcttgatttgcagagatgtttgcactcatggggatgggatatgtgtgtagaagaaaaatatgaagcagctttgctctttaatagaaaaaaaatatatttttaaaaaaaagttacaagaaagaaattaaagtgacggcaagtcttgaggaaaacccatacaatggggttttagttttagatgaaaatttaagtttgaatgaattggtaaattccgaataacatatttaaaatacaaaaagataaaaataaatgtcacgtaaattatttttaaaaccccataaaacttggtttttagattctatgaagaattatgaatggataattatttagtttttgcaaaatcaaaatctaaaaactactccaaaaacaacaaccattcaagactttagaatactcaaaatcatcttgttagcttagattaagcaattgtgtgtattcttggtgagttgattaattgcaaattgtggttcgataaacaattgaataatatgctacatcaaaacaaaacaagaaggcaaagtaaataaacaaaagcaataagagagagagagagagagagagagagagagagagagagagagagagagagagagagagagagagagagagagagagagagagagagagagagagagagagagagagagagagagagagagagagagagatagagagagagagagagagagagagagagagagagagttagatcgtttaggattcctccgggtatcatggttctacaataaagggttagaatcaagttcgggtgataacatggttaggtttgtttacttccaagttcttggacatacgaaactcattcaagtttggctaaccccatggtgaataggccgagagccaactaatctccttatacttcgttactcaactaaccctatggtgtatatgctgagagcaggcaacgacgcatagattgacgcattaagttcaaattcaattctaatatataaatcccaataactcaactatcgcaggttataacacaatatttcattcgtgatttaggttcaagcggattacacaagattctgccaagtataaaacgcctaagatcatgaactaggtggtgtgccagacatacatgcattaagatcaaactccactagaaagcacagtgtaaacgatcaatcaaaaccaaagaaactgccaacctaaacgagatctaaaatccgcatgaatccccttcaaaaccccatcaaacccaactagaaatctacccgctcatagaaaaggagctcatcaaaggtgggttagaataagccataagaaagagatgaaaaacactttaaaagggtttagatattacttctaggtatgtcgaatacaagaggtaaaactgcacctgaatgaatcttatacaaaacaaagggaaagctcaagggtgcggcggcaactagggttcgcttgggatgaaggtacacctagttttaggttttttaagtatatttatgcttggggccaagaattaggtttagttaggggtaagagcgtcaattccgccagttggataagtgatcaggtcgagtagatgagcttcttgttgaaactaataacggtggaatgaagaggaaacggtttgggcatgagcctagtggtcggtgggaagcgtgaggagctgtccgggttcaagtctccattgccgagtggttttggaatgattatttccaaacggccaatttctgggatatgtcttcactctccgggccatatcttcctaacggcttcatggattgctttgattcaattttgaagttaatattgactcttctaaatttccatagactctgagatatctggatttgatgcacggaaagacctttgccggatgttaaacttctaaagtttgggtattgatcgtcttttgatcctttttgctatgaaactcttaaaaccttcttggccccaaaaatacttgtttatctccttcttggctctagtatggcaccaaatgctctctgaaacataagaaaataataactaaaacgggctaaaatgtcgtggtatcaattagcttatacattcaggtccaagtaatatgaagttgctgagcaatataggggagatggaactagcttcgtactggttgatgctaaaaatactcagggaacatttggggtcaagatatgaaccgtgttgaactgttctagttacttcttatcccacttcttttgaagttatctgacattgaaatatattgagtactgccagtattttgtgttgagaagtggctaactaccacttaacattattcaaaggatagatggagaaaagtacatgaaacctaatattgagccccatctgctcgcatcatgggtgagtgactttcaactttaactaagatagttttacgctaatatataaaccaaggaataaatagcttagtggttatgcttgcatttaacattaagtttccaacttcatgcaatgttttgtttttttaatgtgctagctatgtggatgattttcttagatgtaaaacgataatgctacatgatgtaaaagttttagcatttaagaaatatgaacatgtccctacgtaaaacaacgaggttgttggtgaaaacttcaaagacatagttcttaattcgccaaagaaaggtgtaccaattcctttatgatatttttctacgacgactaactatgttaacaatctttgccggttatattaatccatccgagatttgaatttgaggaatcatgaatttgatataataattagttttgatttctttattatgcaatcttgcttgatttctatgcaccttggtgtggacacatcagaatcaaaatcatttgaaaaaaagaggcataaacatccaggatgaactgtgagagtccatcaaactaagcacaaccaaacagtaggactttttgtttatgtgtctcgtccctaccagtggatcccacatcctctatcgggcctattggcccacccttatccgactgtcggtccactatgtctgggaggttttcgtgactttttaccgatcctacaaatcaccacatgatctttctctatgctttgtcgtcactcgcatagttccgacaagcagttcccggaaggtcaccaatctttagactttcccagctcaaatatgcttaattgtggagatctctaacgatctttaaccgaaaatataattgcactttggtgatgtaggacccttaaggccctaactcttacctcttcttttattcacctaagaccacctccaacggatgggacggtgagagcctctaaaaaacaaaaaacaaaaaacaaaaaacaaaaacaaattaatcttacaattatattctaattttttagcacagattgactactaataaaactacacgtgcatattggtttgtgagaccgttccttaaataaagattttagacgctctctctcatctttctctttacttttaaatatattttttttttagttatgagagcctctgttaagagattcacgttggaggtgctttaaggccctaactcttacctttttctgtattttctgtcactttaaaaatagaaaactaatgaaataaacctgccaatgaaataccggaaaaataaagagaaggataatacaaagtccgaacgtagcacgatgcacgagcatcaactacaggcccggcccagaggccaatccactaaagccaacaattcgggcctcaaaattcaaaggcctttttaagatacaaacttgttaaggccttgtatggtactggtttttaaagttgattttggcttttgattttgcaaaatccactttttcacccattcaagattttataaaaaaataattccctaaattatagagaatccagatttttatagattctagtcatttgttcttaaaatccaaaacccacttttttgggattttcaacaaattctatcgtaaactcttttttttttgtttttgaaaaataataatttagtttaaagtaaataattttaaaacgtttctaaataataattatataaaaatcaaaaactagaaaagttaccatttaagattttgcaaaatctaaaatctccaccaaaatcaaaaacttataatatcaaaaatcaaaaaccaaaagccaaaagccaaaatccaaaatccaaaaacccacaaaaatcaacaaaacattcatggcctaagtgttagtcatattgtataactactaatgtattctgtagggccttttagaaaacaacttgggcttttagaaacaaataaattatatctttaataccaaaattttatttaataaaaaaattaaaacctaaaacctaaaacatgatgatacctcttctgcatatctgtgagtcaatttgcgttttcaacaagtaaaatcatatttttttaggttagttgctagtttttcttttgagtttatttattttttccttttgtctttcacaaattatttcggttatgattttcaatactatataaaaataagcatagtttttaagctttgcgtaggactccatcaacatctgccagggttgaaagaagctccccgacagtcgatctacgatattcgataacatcgatcaacctgtctttcttcaaatcttttgatgattcctccttacttcgccaaaagtacatgaacaatatgtagatctgctctattttgttgcatgcgagaagctttacttcgaaagcctatcaagtaaggctccatcaaagggttagcaaatatattactcccaatagaaaaaagaaatcgatcaaacaaagataaagagaaaatgttccatcaaaaaagaaaaaaaagacgataataatagagaaagaagaacaacatataaaatctgaacatagcaaaaattattctcccaaaaaacggaaaaacctaacaaatattttacaaaacaaaatccggtgaaccggatatcactttctctctttaaaacattggagtcaattaagaaagagaagttcatctacaatagaagttagaccacctccaaaggaaagagagtcttaaactttttaaaaacataaaataataataaaaagagaagaagctaaactcatttagtcacgtcgtaaacataaaacgtgattctaaggttcagacatcgatgtgggaaaccttatattaataagttacttaaaagtcttcgacgactagctaaactcattccctctagtgcttattaatgcaaagaaaacagaggtcattgactttcttcgtttcctcttgagtttctcatctcatgatcgttgttcctttcggaaaacaaaaaacattacaatggcttcttcttcttctcataactgggtttacgacgttttcacaagcttcagcggggaagatatccgtgtaactttcctcacccactttctcaaggagcttgatcgaaaaatgattattgctttcaaagacaatgagattgagagagggaactcgatcggtaccgagcttatacaggcgataaaggattcgaggatcgcggtggttgtgttctccaaaaaatactcttcttcgagttggtgtttgaatgagttggtagagattgtgaattgcaaggaaattgtgataccagttttctatgatttagatccttctgatgttaggaaacaagagggagaatttggagagtcttttaaagagacttgcaagaacagaacagattatgagatacaacgttggggccaagcgttgaccaatgtagcaaatattgctggatatcacactaggaaaccgtaagagatttttaatccattaatattgtttatatatcttgaataaatgttttttcttgacatttaacttttaaagtctgtaatactcgaggctcgaaaccacagcatgtaatattagtttcgtcccaagaatcactcgaacctcctaatcattttttttttcatgatcgttttttgttaggaataacgaagcaaaattgattgaagaaatcactaatgatgttttggataaactaatgaagttaacaccatcgaaagattttgatgaattttttggcatcgaagatcatatcaaagagctgagtttattattgtgcttggaatctgaggaagtgagaatggttgggatatggggtcctacggggattggtaagacaaccattgcaagagctttatttaatcgaatctaccgtcacttccaaggtagggtttttatagacagagcttttatatctaagagtatggctatttatagtagagcaaactcggacgactataacttgaagttgcatttgcaagaaaagttgttgtctaaacttttagacaaaaaaaacttggagataaatcacctagatgctgtgaaagagaggctaaggcaaatgaaagttcttatctttattgatgatttggatgatcaagtggtgctagaagccttagcctgtcaaactcagtggtttgggcatggaagtagaatcattgtgattacaaaagataagcatctcttaagggcttatgggattgatcatatatatgaggttcttctcccgtcgaaagaccttgctattaagatgttttgtcgatctgcttttaggaaagactctccacccaatggttttatagaacttgcttatgatgttgtaaaacgtgcaggtagtcttcctttgggtcttaacattttaggttcgtatttacggggtaggagtaaggaggattggatagatatgatgccggggcttcgtaataaactagacgggaaaattcagaaaacacttagagtcagctacgacgggttggctagcgaagacgatcaagcgatatttcgtcatattgcatgtatttttaattttgaggcatgcagtgacatcaagaaactgcttgaagatagtggcttgaatgtcactaatgggcttataaaccttgtcgataagtccctcatacgtatagaaccaaagcagaaaactgtggagatgcattgtttgttacaagaaacggctagagaaattattcgtgcacagtcttttgatgatcctggaaaacgagaattccttgtggatgggaaggatattgctgatgtcctagataattgcagtgtaagttctttgtgctcctttcataattcataagtaactctataaataagatcataaacatgctatttagtaagcaatgatttaaaaaaaattcttattggtattataaatttcagggtacaagaaaagtcttaggtatatcattggatatggatgagattgaagagttgcatctacaagtagacgccttcaaaaagatgcttaatctccgttttctaaaactttacacaaatacaaatatatcagaaaaagaagacaaattgctcttacctaaagaattcaactatttacccaatacactcagattactaagttggcaaaggtttccaatgagatgtatgccttctgatttttttcctaaatatcttgttaaacttctaatgccggggagcaagctcgagaagctgtgggacggagtaatggtaagtggtaataagttgttacattgttgcaaaattaagaataccaacgtactcatactttgctttgtttcttgattttggttcagccgcttcaatgcctcaagaatatgaatttgtttggatctgaaaaccttaaagaattcccaaatctctcgctagcaacaaacctagagacattgtctcttggcttttgcttgagtttggttgaggttccttccactattgggaatctcaataaacttacgtatttgaacatgtcaggatgccataatttggagaaatttccggctgatgtcaacctcaaatctctctctgacctcgttctcaatggatgctcacgtttgaagatttttcccgctatatcaagcaacatctcagagctatgcctaaacagtttagcagttgaggaattcccatccaacttgcatctagagaatcttgtttatcttttaatttggggaatgacgagtgtcaagttgtgggatggcgtgaaggtacgtctctttcttaagtatctccaatcttctatggtcaatagaaaaaagtgaataaaaatccataaaattccatataacttcttcattgatcttagagagagatgcaaagaacacacccataagacaaaaaccataaaatctctaaaagattgtagacctgaaaaaaatgtgaatccagatgaataaacttgctagcataccttttaggttaataggatttttcactcttgagtctcacactatgtaacatcctctatatattaaaagaaagttttttttgtgaagatgtgtcaaccccacaaagtttttaatttatttttcatttattcaattatactactaacaactttagaaataaaagtatttattcttgccatacgtttttctttccatatacagtaaaacttctataaattaatactcgttaaattaataacttctataaattaataaattcttctggttctaagttgggaacagtgtaaaaagtgacacaaatcgataaattgataagataataatttttttgaaaatcttatataaatttatggtcccatcaatatcataaattaataattgtatgaatgtatcaattatatatatacattatatgtaaaaagtttctttgaaatataattctaatatttgtttgcttaaatttgtatttattcttatttgaaatttagttttagtattttactgtatcaaaaacttttggtgttgttttctaaacatgatattatttattacttgtaattgattcttgaaagatattttctataatgaaaaaaatcctatagaaatttttgaaaagttactaaattaggaaaatctctctataaattaataaatattaacttatcgataaattaaaacctctcaaaatttttgcagtcccaacatttttaatttatacaggttttactgtactctaactcatcttaattcaatttaaccaaaattatatatcttgaacttgaagttttaaataagaaaagttctgtaaaaatattttattaaaattaaatgcattgtttctctattggaatattaaacaatataaatatatagtttatacaattcaacaccaaaattctttcatatattataaaaacttaaattaaaaccataaatctataagccttaacttacaaatgacttaaatgaaactttatttgtatagtataaatcattagaatatttgaaattaaattataagttgtttataaactaaatgtaaaatattttagtttgtatgtaatatttgggtttgacatttctcgattcaataataaaaactttgagctttttaaaaatcgttttataaaaaaaatgttcttattttttcataacaaagactaataagttataagttgtttacttttgaatattttttttcaggtgcttacatcccttaaaactatgcatttgcgagattctaaaaacctgaaagaaatcccagatctttcaatggcatcgaatcttctgatactaaatcttgaacaatgcataagtattgtggagcttccttcctctattagaaatctccataacttgatagagttggacatgtcaggatgcacaaacctggagacttttccaactggcatcaaccttcaatctctaaaacgcataaatctagctagatgctcacggttaaagatttttccggatatctcaaccaacatctcagagcttgatctaagccaaacagcgattgaagaagttcctttgtggatcgagaacttctctaagctcaaatacttaataatgggaaaatgtaacatgttggaatatgtattcctaaacatttccaaactgaaacatctcaagagcgttgacttttcagactgtgggatattgtctaaagcagacatgtacatgctacaagtacccaatgaagcttcctcttcacttccaattaattgtgtccaaaaagctgagcttatattcatcaactgctacaagctgaatcaaaaagctctcattcgccaacaattttttctgaagaaaatgattttgccaggtgaagaagtgcctttttatttcactcaccaaacaataggaagctctattggtatccctctacttcacatattactttctcaacaatacttcagatttaaggcttgtgttgtggttgatcccaagtttgtgttcccagctcgtcgttatcacgtaaacatccaggtttcttgtcgattcaaaggcatatatgggaactactttgattatgctgatcagccacattgcttctcaccatctcagacggacaattatgtgtatgtatttgattgttgtttccctcttaacaaagacaatgctcctctagctgaactcgactatgatcatgtggatatagaatttcatcttgatgataactacaatcaccacaaaataaaaggatgcggtatacgactctctgaggatgatgaaagcagtgacgatgatgatgacctaagcagtgaaactgattatagtgatgagtgtgaagatagcgatgatagtgatcttggaaatgaaattgattacagtgaagactatgaagaccgcgatactagtgatcttggaaatgaaactgattacagtgaagagtatgaagaccatgatagtagtgatcttggcaatgagtatgactataatgaagagtgtgaagaaaatgatgataatgatcttgtacttgagactgatcacaatgaagagtgtcaagacaacgatgtggagaagaagagaagtagtaagcgaatgcgggtaaatttttatatagttcacaattcttttccaagatcaaacgtaaactttttcatatagtgtatgacattggattgtttctgcagattatgtgaaaaaaagacaagtacctatagatttgctctataataaaacatcaagggtcttaggtaattcaaaaataccaaggagataaataaagggatgacatttatgtaagtggatacttaacttggaagtttaagatgcaactctttgtttatgtgtagtactcttatgagttatgataaaaactttgaaatcatgatagcgtagaggatatggaaaatgttaggtgccaatgactcaataagttttttgtataaatgcgaattatcacatgtttttagctccacacaagaaattgttttgtattctttcttttttttgctacaatttccttcaatacttggtagctttggttaacttataattaaacaacatattttcgttgccaaaaaaattgctgattttcctagaacttcatgatcaacgaattatcaataataataataataaaatcttatgaagacatggttttcaatttgagctaggactatttatcatgctccaacctttatttattttgttgtcatccgctttaattagagctaaaaaaagtcattaagagcgatctaacacgaatagttcccgggaaatcacccaatcgaagtactactccaacctttgtttcaaaccaaaaaccgatgttctgttttttttaatctatatctttctttaattttgtttctgcctacaattcaaacacttctactttcaccaaacattttactttcactaagcaataattagctctacaaatatttattttttgttggaataatgttttacattacaaaaaaaaaaattagacggttagtcttaaattctataagtcaattacaagcaatgaaattttcagggtaatgaaggtgatatacatacatagattgacatatctactctatgcttctactgtttccaccgtgaaattaataaaatcttaagagtataatatgtagacgatgagacttctctttttgactttctctccttaacaacaacttccaatggagctaacttgatagtattgtaaggtcagtaagtgatggaagcaaacagagcatatgccgtcctttccccttcgtgtttccgctcccaatataagtcagcagtgtgaatgatctctcaaagaattaacctaaacttttccatcagatgtaaaggagctgaaggaattggtatttagggaagatgtagaagagaatttgctgacagaattggtgcctttggaaggagcagaagaaggaacaggaagcttctttggtagcatttgttcccagtggacttgagggaatcttgaagcctcagacacaagtacaagaaatgagaaaatagccaagaagagacacatttgtctacacaaaacaaacgacgtcattttaatcgccgtgtgaagattgatacaaatatgaccaagtgagtaatgagagagatggtaagagatgattgtatataagagaagatcaatgaggctgcttaggtgtttggtttaggaaagatgatgtcaattggccgacaagagagaccacttttgattaaatagtttcttcatgtatagtgtatgttttaatttgacactaatactagtgtcttttggaagctgtaagagagctcaacaagattatcttaattccaacaatcatggtaacacgagtgttgttctttttatatacataaagttattttgagaattggacaaaaggtcttaaaaacagcaccattgacacttttgtatcctcttctgccaacaatggtgctatttttcaattgcttatattcggtattcgtgtaatgtgtaataagcttatgtgtgccgtataaagtacatagcgtaattattgacaacgaacatttcctttgttgaacaaaaaagtatcatttttttataagaagtttaatgttaattaactaaaagtgcaatttaggcaactcctagggacgatcaaaagacttctcatgaaccacaaagaataagattgtgatgcacactatgcattattattatcttatttattttacttgagaaatgcaaattcaaaatcttaccataaatttgtaataaaaataacttattgcaaaattaaattattgatgactaaaaaaaaaagatttgatatgatataaatttcattctataatttatgttatatttttatgtttcaaatgtatagtttatactaattcaaaaaaattacaatgtgaattttagtttggatttaagtcttaaattaaaaaatttagtgagattttggtattcagcctgcaaatggtttgttaataaaaagaacgagttgaataataaaaatgggatgaataaacaatttggtactgttcttctaatttatcttatactaggttagaatccgagtgatacatgggttaactgatttttttttttttaatgtttcataagttttttttttcaattttgtgcaaatattatgttgactttcaattgaaccaactataaattttattagaagtttggatctaaatcaaaatctattatttaaaatttacatataataaaactgttatattaatctataggcagatttttccttatttatcatctggcctgaggagtgttcatatttttacagggttatcattaggattttgcagctcttaggatcaaatagacaaaagatcatcatgttgtctacaaagagtagatggttgacactgagaccgccttttgcctctttgattcctggaaattttccttatcttttgttaggcctaggtttgtttattcttttatcttaccaagttcaatgttgaagatctcatactcgtttatacagagtaaaggactccttcatagaacagtagtgatggctttagtttggacctgtcattaccattcacgaaatctggtggatagactgattcgtttggtattcgatgaaagtataatcttgaaatgctttagtttatctctatttttaccctcatttggcgtgagtttggtcacggtattggtttcaagttcaaacctttgtgacttcaatcttatcatgcctcaagtttattgggtggtgcatctcgactctctcgaactttttggaagaaaccgccatcgctattcttgtcacctcaactgttgccaccgtcactaccaaattttgaaaaatgttcaattattaaaaacattttattttattctatactatttcaacatttcattttttttttgctaagaatgtaaatatttcatataatgaaaaagttttaggaattacatgaagtagatcctatggtttggtcctatggcaaaaaaaggattaaaaacatggaagcaaaaacaatcggtccattgatatcgataaaagcagtgacgcttttgaaatcaatgaagcgataaaacgagtctgaagttttctaaattataacacctcaagaagaagcatcatgctgtcaaacggtaaagatcgagtcaaagaaactaaaacgaaaggaagcctttcactggtaacccaagaacctgagccgtcaacggtgttgaaacaaggagcaaacaaacacccactccatctgcgtcatatcaactccgaaacgaggcagcaaacaaaagaacacatcaaaaacaaggcaagacaacatcaaaggggcttggacataaaacggagaagcaggattttaaagtaaaccgagagcaggatcgatgaaacacgagaaatgagaagacacctatgcagtttagccgtaacaagctacacgcttgatcaaaggagccagacgctcgaagctccaaacacacacacccgcaacattcagaaaatacgagaaccagacgccaaaccgatataatccgagcaaaatcaccggattgagagcagcaagagaaccaagctccaaggaagctctcagaactgacgtaaacgcaaagagacctcaacaaccctccaaaaatctactttcgtcgtcacgcaagttggatcagaatggaaagatgcagcaccacttgcctccatgccgtcaagctccggcgaccatcactcacacgcctgaagaaactcggaccctgatgccaaatcgaagaagaaagctgagaacctcagcaacagtaagcctcattaagaggtagccctttcgcagcgccggacactggagaggcaatcggaaaagacgatgaaaagctttggtaaatttgagagaaaaagtcgtcgcttaaagatatatatcattttttaagtttaaaatttattatactgtttttacatagaagtttagaatttagtattttaaagttaaagttaatttgcgtaaattcgtggaaaatagtataatacaacattatattcatatagattatatgtcgtacaacttgtttataactataaacactattgaccattatctaatttcatatctaatttaaaaaaattcaaattatgttttacgcaaaatagatttaaaatgttgcatttaaaaatatatatatatatgctcaaattattaataataagttaataaaaaatggtaatttttccaatcctcatcttagtttttcaaataaaatgctatattagtaattatgtttagttaatttggttaccaccaaatagatccataattccatatcataaaattataaccacagtgcggatacgaactactcgtgttaattactccaaaaaaaaagcaaaatcgcaagagagaccttaaacgacatcgttttcagatgaggagacaccaccaccgatgccaaatcggctccgatagcgaaaccggatccgaatccgattccgataccgacacgccgatgcgatgcatctcttgtcgagaagagtacctccctcgcaacgccgggacctgcaaggaatgctacgtcgaagccggcgaaactgaagaagaactcaaacgcgagatcgatgacctcaaagctaaagttgctttccttcgcttatcttcttctcttgatcatggaactagttcaacctctagatccttcactgatgttgttctcatcgcctctgaagataacgccggatctcctcctattcccgctcataaatccgttctggttcgttctcacatcactaaaaccctaatttctctgaaattatttgattaatttgatttgaaatttgtagaattgacttgtgataatctctgtttttgatggtttagatatgaatctatttgatagattagaaatagagagaaagagaaagaaaaaatattagggtttgttgttacttaggaaccatttggctaattttgagagttagggtctgttcttgtgttctatgttttaggaagaagagcagtgtttttgtacacttgtgctgaaattgatgatatgtgtgaatattgctaccaggtgagtcgttctccagttttcaaagcaatgcttgagaatgaaatggaagagagtctaagcggcacgatcaagatcagcgacgtatcttatgacgctcttcggactttcgtatattatctctatacagctgaagcatgtcttgatgagcaaatggcatgtgatcttttggtcatgtcagagaaataccaagtgaaacatctcaagagttattgtgagaggtttttggttaccaaactcagtccggataactctctcatgacctatgcctttgcacaccagcacaacgcgaaacatgttctcgatgctgcgttgtcgcagatcgtagaaaatatggataaacttactaaaagagaggaatatatggagctcgtggagaaggatcctcgtcttatcgttgaaatttatgaagcctatctctcgaaacaggttaatacggcagctggaggaactagtacgagcaaaactagttgaaattttctttattgtcgacctaaacaagagtagattctggtttaccttcatttcgtttttaggtatagtatggttagggtcaccaaaacatggggtttgtgtttgtgaagcactagaaatcgaccggagtttagtgttcgttgttaagaatgtattttagtggtcaccagtttgaaaccatgctaaagaaattaagaaaagaagccaatggagatattttcaaatcaaataaaagtagcaaatgaaacgttttaacactttaaatcaaaggtagagaggaacaaacagctcaaatcttccaaacctgaaaacctaaaccgctaactaaaaactttaatcaacaaccctctgttttgttcccactcgccttcccctctgccgatatatagagttcggaggttaacttggtcagacggtgtagaatcatctgccttc

SEQ ID NO: 1385 - DNA, 104386 bp, Arabidopsis thaliana
aagcttttcaacttcatttttctttctttttttcttctttggcgactcattcttccctttgatccttgcaaacttctcttttttagatttttctttctttcttccaggcagaataggttctggtggtgcggttaccaacccgtaactagaattcaaccaatacttaggtccccttaatggcatggtggctgtctcatagctgtctctccacagatctgtcgagaagaactcggatatgtaattctcagcatccaaaccagcctctatcatagcaccataagaatgctcacaaggtataccacttatttgccacttcccacatgaacattgtgtttttggtatatccactctatgaccattctcatctatatatacctcaaaaacgccatgtgtgcaacgatataccttacttctatctgcatctgtcttctctaatgcaagcatctttaaagcatatttagtaaatctaccttcatggcgcaatgatttcttgttcctcttaacaatccgagtcattccttgcctccttattgtttctagcattggaattaatgacttcgctcttgctttggtgatggttgagttgaatgactcggtagcattgttgtcaacatcctcacaacaactaccgagcttatagaaacaccttgaccaagtatgtggttcctcattcaagacatcattgtacaatgcttcatcatagcatctcaagttattgagattcttcccatactccttctcattgtaactccaagccaatttccagactaatgtctttagcatatccttcttggcatggttcttctttagattctctacaatatgcttcacacacattctatgttcagcatttggcaattcctgtttaacagcactcagaagaccctgttaaacaatttgaaaaacataatgagaacttcgttacataccaatatacaaagggaatgagatgagattcttacctttgagcgatctgatagaatgacaaaccgactgccatcctctaggttcaagtccttttttatttgctggacaaaccacaaccagttctcggcattctcagattgtaccacagcccaagcaattggatagatttgattgtttggatcgtgaccaactgcagtcaatagaactcctttcacaacaactttcaaaaatgtaccatctagtcctataataggtctacaagatccagcccattgtgttctaagtatattaaaacatacataaaacctattgaacacatcttcacctttttcatttcgatatgtatcaatgaaggcaacagaccctgggttttgagaatgaatttcttcaacatatccccggatatgagcaaattgttcctcatactccttcttaagcattttgagggcaagaagtctacctctttggcattgtgggattgtagacaccattttccaacgctctttgatatattcctgaatatccataggcataaacttctcatttagcctcaacttgtccaaaaacaacctagcaattacaggactcttcaagatctgacatttcccattaggtgagcaactatgccacgtgcatgatgtcttaaccacaaacagttgcctatctggatcatatgaacaatacactctccatttacatttcccgcccataccacacttgaatgaaatcttctccttttcccatctatcttgaacaacattatgcccgtgctttaatgtcacctctaaaatagcttctttgaactcaatccctgtgaagaatgtacttccaatcacaaacttatcacccatagcccttctgattcttctatccctcaccaaaataggatcctcgtcttcatctgagctctcgggaattatatctcggcctatcggtatctcgtcttcaaaatttgctactccatcatctacttcaaagtcaaaacgctcaagaggatcttcttcatcctttttcttcttctctttcttattcttcttcgtattcttcttacttctaacaatttcttcttcaatccgctcttcactctctgattcgttacccccattgtactcgacatcaccgtcactatatttgtaaaacatatcaacatcatcgtcaaacatctacttatcactctcaaatatcaactaatccaaacaaatacatacaattccgaacaagataaaattaatacaaaatcaaccaaattacgacatctttgtggaaattatgagactccaaccaaattacgtttcagattcgatcaaaccaagattccaagcaccaccacacgacgaagcaccaccacaagacgaagaataagaagaagaatcaaagaaaatcgaatttgatgttcgagtaatagagttgcagggttcacaccaaagaaaaaaaaaaaagtcgcaaggaagaagaagaatatgcgagtgcgaccctaataaagtttttccccaaattgtttttttttttgtgtgtctaatccctaaattgattttgttttgggttttaagaagaaaatttgaagcctctttctcatacagtggcttcaatttgggttaatagattatggtaggattatcggtttaatcgaggctaattaattttaaaacgtgattttatgattttaaatcgtattttagcagcttgattaatgttggttaattacgtgggattatatatattaggtggaattgagaagaatttaagttgattagggggaaatagaaagaggctaagagtttgggtggaacccagttgaaacaatatacttgaggggggctcctataggcagcccttttaagatatcactcgttgattatctttccgtattaatatcaactcaaactcgttccaccatataacttcattccataaaattaaatattattttgttattttcaaatatttttcttgtaatatataaaaaaatcgagggcttgacctgtggtacatcttggattaatatatttaaaaataatttgtgatttattaatttatgatattgtagtttataaaaccgatttttattatatacctttcaataagatgtagttcttataattatgaatattccaaaagcttgtaactattataatacgtttaaaaatatattcttttttataattcaaatttagtttagtgatatatttttaaaataatgaaaattacctgttttaaaaaatactttaaaagtttatatcatttaaattataataaaaatgttaaatattttaatctatactgaaaatattttctagatatttataaatctaaaatccaaaaattatgttttgaatatgttaaatcatcatttaaaatctttttttatgtgtactaatgagaaacaattaacatagttttgttaaggaaattgtttaaaatctaaactaaatgataatttggtattaaattagattgaagtttccgaattatctaataacatattactaaaataaataagtttacatatatacaatttcgaattaaatttgcctgaaatgttatggaaaccttttgaaatgatttccaaaattattgggtagttattaattttttgatttaattcgatttttttttaaaacaaaatccaagatatttatttagttgtagtaattgttaatttacaaaactatccatgtaaaaattcatttggataatcttatactacccttacaatgttgtagttcacacaatgtttcccaattaatagtatagatgttttcttttatttctcgtttatgtaattataaggcgtattgtttagctcgatcctctacacttatattttctaaagttatttttgtaataaaaaaaatttatgaacaatttgctcatcaaaatctgttaaatttttaagattttcatctaaatttttaagattttctaaagttatctcacatcttttcccacagacacatattcttctttctctcccatttttcctaatttcaaatagtacgttctgaacattttataggctactagattctgacccgcacgaacgtgcgacatttcatattttaagaaatgtgttgtatgaaatttatatttaatatagattttttgttttattatattataatatatgtaaagaaaattgtcgattgttatttatgtttgtttatgacataataggtaatattgtgaactataagtcaaattctgtagttttaaactgaaaagtagattaaaaaacatcttagatggaaaattatcttaggttataatgatgtaaagtattgttatataaaaaattatggttagagaattgcaatagaattttgtgttatggatggtgaaacacaagttaattttgaatttgaaaattttaatggtatgtgtgaaataagaatttgtgttaccatgttaaactatttaaatattgatgcattttttgtatatgtgtttgggctatatttaattggctgcttgtaaatccatattttgccaaagtaatttaaactaaataatggtaaagagaaaactctaaaatcactaaacatattatctatagttggcccatgtagaacttgtaaattgttttgtaagtatgattcgattgcacagatgagctaagtcatgttttctatcattgtatgttgaattcttttatgcataagtatagtaagaattctctaagttaaatgattcttgttatgtcaccgtaaaaatatattcaacttcctaaactattggaaaattaagattgttctattatttgctctttcttttaagtgatctaataatagaactcaaattttgttatgatataatattttgcttgcaaagagataaaaaatttagacatttacactttagaatgaaattgtatacatttatctctaactatttttatctaaataaattagtaaacttttcaaagtaatgacactcaaaaattacattttgtcatttatttattgtttaattttatattacagatatggataattaaaaataaaaaataaaaaattatagtcatcttaatataaaatcagaaatataagtttatataactattttgcttgtataaagatatagtttaatatatgacattttataatgagagtgtttaaatttatataacctcatgtatttatgtaaagaaaatatataattacgaatcaagaaattatggttcaacccatactcattttatatatcatcaaagatagcaaaatcaaaatacatctcatctttgatttgtatcaatctttggaaatgaaaacgataaagcaataaaattaaaagaagagatgattagtaagtgataaacatgcacacaaaccctatatttatagcatcagaaagtaggctactatcttttaaggttaatgacatttaaagaaaaaaataattggtagctaggatttttgaaacaaatcggaagattttttttttgtcaattaacaaatccgcaaaatatggtttattttaaggatagcaatctttaaattttaattaaaatagaaaatatttgaatttatgctagaattattttctagatatttacaaatctaaaatccaaaaagtatttgttgaatatgctatattaaaaattaaatgatggtagtttagattacatatgacaaatataataaatgttttttcttatttgaaaatcgttttttcaatgtgtaccaatcataattaatcagtttagttttattaaggaaatttttaaaaatctaaactaaatgataatttgttattaaattatattgttgtttccgaaaatatctaatagattattaccaaaataaataagtttacatataaacgattttgaattaaatagcataatttgttatggaaactttattaaatgatttacaaaaatatttggtagttttttttttaattgtagtatttgttaatttactaaattacccatgcaaaaattcattgagttagttttaaactaccctcacaatgttgtagttcacaaaatgcttcccaattaatagtatagataaggaaaatttttaaaataggtctttagacatgtaaattatataatcaaatttcctaaaaaattttatgttgtggctacagcttacaaatgtattcttttaagtttttttacctcacacttatttttatttttatttttgtgttttacctataattttgtttttggatataattaggtcggtctctaatatagtagggctatattaattgatatgcctggaggatgaataaattaaaaatctatgcataaatattagttatttaggtaagtatgaaagattaataatatataaattaaaaatatcctttaaaaaaataataattacaaaaatgccattgaataaaaatatcgcgataagtttataaattatttgttaaaacatatttatcgatttaaaattgtaaattggtattttttattatgtatattaagcacaataaaagggaattagactttttcttacataattaacatgataataattataacaacatgatatatagaataataacatgctaacatattatataacggaataatatttatatgaaaacgttaagatattcgatatgtgaataatatttactctaacgtataatttatacataatatttaccaataattgttaacggggttaacctgctaacaatgaaaatatttagtaaaaaaaataagatgtgagattttaattaaaaaaagaaaaatagagaaggataataaagtaacttcattagttcttttactattgaaatattcaacaattcctccaactaattttttttgagttttctgagcatatggagtgatattttccaatatctcttaaaaaactgtccatattaccaaaaaccccaaaaagtttaacccatttttgatgttcatagtgagcatctccaataattggcttcaaatattttttcaaaataaagaaaaaaatgattaagagttttccaatgattttcttcatttctacttcaaaaaaaatattataagtttaatcaatcgctaatttattattatttattaacaacattttttattttcaaacttataaactgtaaccatttattttataacaagcaaatgttcgataaattttgtctagagtaaatataactattttgggtaatatgttaagggattattgttaattttgccattttttctcaaaatcttttgaaattgtcatttttaattaaatcttacgaatatgccatttctaacacttaatagaagtatttaagtttttcttttggtaaaaatacttacaatataccacaaaaatcatatttttttgcataaaaaggaaaaacttcacaaactattcaaaaaaaggtaaattttacaaacgacataaaaaaaatggcaaatccataattaatttatattttaattatcttactgaaagaatgtaaaatttcaagcattattagagatagtctaaaagacaactttacttagggaatactcctcaatccaaaaaatttgatcatcatcatacggtcttattaacgaattatggcattttcacttttaataaatccaccgcatcaacgactaatccactactctaagaattttacacaaccaacacttcgacgacttacattcatccacgtcatcaaataccccgacactactgttacttacataagtaacggcttctctacttcggctcgtacaagaaaaacaccacttcacgcgcctcaatcattacgtttgttttcacatttaaacgacacttaagtgcccactggccacttccattgacacccattattactctgtctgtgtcctctcttttaaaacctaatcctctgtgaaacttttccagttaaaatcttttgcaatgtctaaagcagttctattggtcgctctctgctttttaccggctctagccatcgcggctagaccgaacaagaaccctttcgtcgtgcgaggccgtgtctattgcgacacttgcctcgctggtttcgaaactccagcctctacttacatctccggtacgttcataaacatccaagatctactttaatcgtatttacaaattcagttatggatcttgatatgttcacatttttgccaataatgttcgtatggacttgtggatctatagagttatgaatatgatctacgttttcgggttttgtactaaagtagatttgagatctttaaggtgattaggctaattgattatatactatactatgaataatataggtgcagtggttagattggaatgtaaagacaggagaacaatggagttaacgtatagccacgaggcgagaactgactcgacaggatcatacaagatcttggttaacgaggatcatgatgagcagttctgtgatgcaatgttggttcgtagctctcagttacggtgttccaatgtgtcccctggtcatgaccgtgcccgtgtgactctcactcgcttcaacggtattgcttctgacgaccgttttgctaacaacatgggatttctaagggatgcagctatgccgggttgtgcggatatcatgaagctataccaagaaaccgaggactagtttctctgttttgttaagtatgtggtattaaaatgtattgcagcttgtgttatgtgcattttatctgtgacggttttattactaatcgaaaaaaatacatattgaatctcatcgcgaaaaaaatacatattgaatctcatcgcggtggagaataggtttcgaaaacatacaatggttgcagctacaacctcatgaagtggaattagatttattccaagtgtgcttgaagttacaaacatttgatgagtcctttctctgtggttaatgctcatcctcagagacatcatgagagctagggtgagcactgttagaggcggtaccatcagagaccgataaaatgctgagcgagtctagagaagcggaaacaatgccctccaacgaagccaatcttttcttgtcgtcctctttcattctctctgaatgtttctctatgttaaaacccgagtcatcgttaccaccaaacgctaactccattttctccatatcaaagttctcctccattatcaccttagtgtttggatcatccgagtaaacaaacttcactttgttccgtgtcttcggctctaagaagggccgcgccacctataatcacacccattacactttagaccaacataacatttctaaaagtgagtgatcctacaaactttaccttccagaaaggttcaaagaacttaggaggattgtagagaacagcaaaagctaatctctcagggtaatgttcttgtaatacatgagcggtttctttcgttgttcgtaacgatacattcgccaaactataaccgtgaaaatctatcatccacaccatctgttcttcccctggtggcaaattttgtactgcattctccatacaatacacaaggtatctaatctggcctttcaccgatttagaattctgacacaactcaaaaaattctgatcacaaactaatccagagcttaaaactaaagaaagtctctgcattgtacaaacctcaacactcggtctcataatgagaacaggtcgtccaagtttatcgacacaactcgatctatatatcttccctgtctctgcttcaccagctacttcctcctacgaaaacacaactcattggtcatataaactcaaacatatcaacaatgttacttcataattcaatagtgtacccaacaaatctcctcaggtttgtattgaactctccatttcaaagtttctttaagcatcttagtagctttcttgacatgccaattccttgcccttagataccttaaaactgcatcatcggaacaaaaactcgaaagcttctccggtaatggacctaatagcttcctcacttcctcaatctaaagtcaaataacacaaatcttatcagaacataaatctaaaataatgaacaaagtttaagttacctttgcttgttcttcttcagtaggaacaggtttaacaaacccattagtcactggattagtgttcataacttctttaaaccctacaaaaattttagtttggtaaatttaacattagtttcaaaaacccaagtcaactattacagagacaagagtaatgactaattaattaagaatctaatcattaaagctaagacaaatcagtggttgtgtaatgtcgatcttaatcttacagagaccacaatcgtttttcacggaagcaaaatgtttggtcgggaggatctttgtctacaatccaaaaagtacggactcaaaaaaaaaaaaaaagccaaaggagatgactattaaatcacgaagatggacattgaagaaggatttgaagattaaaaactaaccttttggaaatagtcgttttgggaatcgaagcaaagagaagagcttagaaacgtaggagtttttgaggtcaaacaaacaaaaaaaatggtgactatgtaaagctagagaaatgacgaaaatctgttggactattttataaataaatgatactgtttgtcattgagatctgatctaatgggtaggtgacaaaatatggagtattcaacttttgttattttattaccaatgtttacaatttttagtggtaaaagtaacgaaaaaaattcatgaactttgaaatttgagacgaaaaaaatattaattttcgaaatgttattgaaatctcaaaatttaggttgattttacaataaaatggttacgttttgttgattcggtcattttaggcattgtcgttactttttgttagatgttatagaaaattaactttgttatcttttaaataacaaaaaaacggcatgcctaaaatgactcaatcaacacaacttaaccattttattgtaaagtcaaattaaactttgagatttaaatgacatgtcaaaacttcatggttttttcgtcccaaattttaaaatttgtgatttgttttgacattttttccaattttagtggtaattgttaggtttgtcagaactaaagctttctaatcccaccctgactgctctaccgtgaggttggtgagggtcaaacccgtgtgtttacgggttatttgcaggctttaaaaataaaatatataattattaaaaatatatatatatataagcgtaatatatatatatagataaatatattaattaattttattaaattagattatattaatattaaatgatatattcaaagtgtaaattgtaacttagatgatatccaataaaatattaaattttaaacctaaaataaaactaaataaagtattttcttaacatcaataactaaataaatatatagatacatagttgtagatctaaaatatttcatatatcatctttcaaattaaagatacttgtgattctccttgtttatagttgtataaagtaggatcaattatgagaaaaacacttaaaaccttgtccctttgtaagtatcggcattttttttgtgccttacagcttcatgtacttttctactttctgttttaccgttttaatcttagtctcccccaaatcttttccacctacaaattatatcactatctctttcccttcccgaaccagatcaaaattcaagctgatttttaatagcagttcttttgttttggattaaggaactgaaaattgatatttttgttatgattttggattctctagctaattcatgttgaagaattttctatatagaagaaaatccggaaatttccaacaaaattcatcaacaacatacaaacaaattaaattgaaataaatttcaaaaataaatagattagacaaaacccaaataaatctctaaacctagacaacgaaccaacaaaattgcaaaaccaaaatctcaaaatcttaaacttttatcaaatttggaaattgttttagcgttcttatattcttatcaaatcggtttaattattttgtttgggttcactttttactatcccttagggtatagatttcattattattggatttttgtgatcaaaaacaaaaaaaaaccaaaaaaaaaattgagattttctggaaatattaagaagagaaataagcgatgaagaaagaaagaaagaataaagaaagaataaagaaagaagaaggagattgagggcaaaatggtaattttgtctaacagaaaatgcttatctctataaaccaaacaaaaagtgatttattctgacttttttaacttaaatgtacccaaatctataaagccccgtaaaaagtacttttatctttatttatttttttgtcaaactatatactagttattgtggagattgattagttgttgtgtttatcttgattcataacctttagaaaatatatattttaaatttatttgaaacaattataggaaagaaacataatatgtcgggttttttttggacaaaagaactttcattcacttaaaacctcaaaaagaggaaaattcatacaaactgaaattaagataatgcatggaaaagaaagctaaaggctcaatgtgtttttaaaaagatgctcaacttggagaagcttgcaatgtttgaaaaatcttttgatgccataggagattcaaattcgaagacaagcttcgagaaaatcccgaccaactggtggtgatagacggcttgcgcgattgacgcaaatgagcttttggtagaatgctccatcgaggagactgccggtggaaagatattccaaatgccggataagatttgtcgaaatcgccaaagataatcacaaggccataaccaaaggaacattgggagactagattggtgtcgttcaatcaaatcgcagccacaaatcaatgattcaaaaaggcttgagaaagtgtgaggttgaaagtacctaggcgtgttcttcaataaagttagagagcgttgaggcttgttcttcggtaaggtttgagagattggaggcgtgttctttagtaaggtttgaaagagttgagatgcattgctcctcaaagcaaatgacgcaagatgattcagcttgaattcaaacatgtctaaccacaatccaaaacgtttcgagattaatcttacatcgaatacaaaacgagcaaatcaatccaccaggtttcgagaaggataataacaagtccaatctaaatccatcgctactttcttaggtaggagtccaaataagtaagagatcttcagaattgtacttagcacgatgaagagaaaaaacaaacctgtgccttataatagatgggcttatgccccttagtttatgtctgagctgggatagattgtaaggtgggctggatggagaaaataaacttcttgggccaggcccattacgagtgaaaaatagtagaattagggttagggttaacccttcctttgacttcttttctgactgcggcggcggatctgtggttgtggtgccgttttgggatgattcttctaccgtcatgtacttcatcggctccagcgtcaacgcagagctccgttcctgtcgcaaccaagcaaaacacttggtgaggggatctgagtcccagaaagaggagcatagaggtgctggtcttgacttcgaggagaacctgtgagagggacgaacgacgagaatcgcgaagattttaaagaaaattgatctagagacagttttgataaagatttcatttgcatcggtcgtgataatgttggatataagggtacaacttcgaaaaaagtagaagaaagccatgaaaaagaaagaaatagatgagagagtgtttgaaaacgagttgtcggagaggagagaaaacccggcgccggcaagcaggagccctaccgacgccggaaaacattgtcgtaaaggtgaccttgataattgtgtttgggagagaaaaggaatgaaacatgatatgtctaaaaataaaaataaaccttgatataagtaaataaatattatagatctatttatagtaaagatattataggtttttgttaagtgaaaaaatgaatatgcatggatcaaagaaagaattgatcatatgatataggggtcattgtgaatacgttaatccaaaacttctaattatcttaggaaacttatcctataatttaaaaaattataaattttttagggtcaacttaccattttttgaacgttgcatttgattctgccattgtatatagtattaaaatgactatatgtaaaataataaattaaattacttatctttaaaataataatttgtatgattgtacaagtaaagtaatcatgtaagtggttgtgagaatttttggactgtaaaaagagcatcttgcagatatttaatttgaaaaaatgtcatttaaattatcaatttaccattttcgtgggtttaaagcatgaaatttggatatggtaatttaaatcttcaattttatgttcacttccgatttaatcacgaattctcgttgactaagcaagttaaggcacatcgttagaaattcttctaatcgaaaaccttagatcttcaaaatcgatttctgaatttttttctcttttttcgaattcaaagtaatctctcgtctctaggtcaactgatggcgccgaaaaagaagagcttgtccctcaattggcttagtcaacgagaatttctgataaaattgaaagtcaacataaaattgaggatttaaatcacaatgtccaaagttcatgctttaaaccaacgaaaatagtaaactaatgattaacatgacatttttccgtatataatttagatactttctttaacataataataataagaacatagaaagtaggagagatacactggaaggggttcttaaataataattcatgatttttttttttaaactcttgatatacatgtcaccatatggggaaaacggccaattttgccccaaacttagttgttttatcggattcatacatatatctttgttgtgtacgtaaaactacataaacgtaagttaaattttaattacacgaataaaacaaatacggcctaaacccataaagctgttaatgttctattaacacgaagctcattaggatgtcacgttgtacacaaaacgacgtagttttgttctccaaaaaaaaaaaaaaagaaaaaaaaaaaagatgaaatcaatgaccttactttaacccagaacctattaaagctgaaagcacacttataccggctgtacaactgtaactagtgttgctaattcgggtatgaaaacctcatttaataaatggatatgtagaagagaaattgacccatttaaactcatttattaaatgtggtttcacacaaataattgggtacccaactaaactcatttatatttcttttgttattagttagttatctttattaaaaatgttaatatattaatacattaaaactaaattattcaacttaaattcatttttttgtataaatatttgtttttaactgcaaaactgtaattttcgcaaaaccataaattaatatttttccgccaaaaccgaaaacagatgtccccccccccccaaaccgttaaaccacgtttttcggctaaaatcgtaaagccgtatttttttttgttaatattgcaaaatcatatttttagccaaaatcgtaaaattgcattttattaccaaaaaaacacttttctatgaagtgaagtttttcctcaaaatcacaaaaaaatattttccgctaaaattgaaatcatgttttcccgctaaaactgtaaaccgacgatttctcgccaaaccgtaaaatcacgttttctgctaaaatagtaaacccgcatcttcccaccaaaatcgtaaatccgcatattccgctaaaatcgcaaaaccctttttaagccaatatcggaaaattgcgttttatattaccaaaaataaatattcccataaaataaagttttcccgtacaaatcacaaaaagtggtttccgccaaaaccgttcaccgatgttttccagccgaaactataaactgatgtttccccgccaaaaccataaaattacgttttttccaccaaaatcgtaaacccacattttctgctcaaatcgaaaaaccgtgttttcagcaaaaaccttaaacccgtattttctcgccaaaattgtattcttgccaaaaaatatatattcacccataaaaagctgtatattttaaataattattaattatattatgttatatgggtctaaataaattttttaatgggtcaaatataattaatatgtatttaaatagggaggagaaatgaggtataaacttaaatgaggttaaatgagtttagagtaaatggggtgggttttaaatggggtgggttagcctatattaacatcacaactgtaacaattgatataattgcagataaatatatttttattcataactatggtagttttcttccttcgtgtatgttcccaaaaccaaatccgcgaagaacgaaaccaattctccattatctcttcttcattactaattgcttttcatttactcacattcttccctacctcaactcagtttctcaagtatttctggggaagattgccttcaaattacggagctttcaaagaaaatgtcaagaatttgaagattaggaaaacaatcgcaaggcttgattaattgaagagtgtgtgatgaattgagggatgataagctcgttgattttcaaactcttcccatacgatttatgttttaagagaatgaaacagggcactatgtatataataatatattcgtttggaataataaataaaagtatggtggctcaattggtattgagtcggcagttatgtctttggagccacagattcgtgtatctgatttaatgtttcatttttttctaacattttctttgaaaactaaactacgttgtcggatttgtgcatcctaatcatcgtcgtgttaaggaacattaacatcgttttgagatttgtgggttaagaccgaccggatttcatttgttcgtgtatgaaattcaaatttaacttgagtttatgtagttttaggcacacaataaaattctatgtataaatacgataaaacaactaagtttgggatgaaattatccgttttccctcaccatatgtatgcttcaacttgtttttattaactcaaaatttaattcaataacgaaatattaatattagtttgataagatactctcttagagcatctccattgcacaaataaggagagtgtcttcctacacttaaaatataatatgtcaaaaaaaatattattttaatttttggatgtctttaaaataaagacacaatgtcttaaatgtctaagtaaagacatattttagaggatgtctccaatttaaagatctttcatatttgattattaatattttgtaaatttaatattttaatattgtttaagacatcctctttctattgtgcagtggaggtgctcttaagtgttcttaccaatagaatatgctctaaaatattacataaataataattttctcaactattttatttatttatttttgttaacaactttattagattactaaaacaagctagttttggagaatattatttacataagttataatatgcggttgattacgaacagttcatgccaatttatccacttttatattcgcattacaagacaccaaaaataaagaaaaattataaaactcatagttgtcaccctaaatcgcttcaaggtatgttaagaaggctggccactttgtcggagaagacactatcttaaccagatctgaccaatctattcaaacgttacctttcgcttcttttggctaacagagtgtttctttaggtatatcaatcaagttttagctacttcaaagtaactacgaagtccctaaaaattttcacagcccaaaccttttttcctacgtttgtatatgttctttgaaaaaaaatattcctccatggtttcgaatagtgcaagcgaatcaagcggtacggagcaggcaaatcaagcagttcatgcagtcaactgtggatcaagcgtattaggcggatcaagttaaaaaagtgcggatcaagcagttaaaaatctatgttgagtggtgaaataatagaaaagcggtttaagtagtaaaaataattacaaaatattgaaagttaatattttaaataaaataaaaatagattaaagaatatacgttggtttcttcggacaaagaaagaacccttgaaagttctctaaaatccgctggaagaaaaaaatgaaatgttaagagtaccaaccatggggaaaaaagtgacctttttagatcttgaaagcgaaaaaaaataaaaggattaaaacctatagctactaggtcttaagcttctcaccttgatatacggtggttgcttcggagaaagagccctggaaagctctccaaagtcctttggacgacaataggaaagctagagaaatgtgagagtgactactgcaaacttgaaggagaagaatgggccggaaataacgataatacccttgatctttacaatccttatcttgttttagaagtcttataacacgtggacaaagagaagcatagaaaaaacactacttacaactatatatttaattaaatacactaaaaatactaaaccctatatttctaaagttacgttctttctattttcacgtatttgttttttgtttttttcctttcctcaattgttaaaagcatcttaatatacaatttttttctctatgtcttatgcataaatatgttaaattctaaaattagtttttgtcatgacaccagtttaatttattatacttctaaacttaaatctaaaattaatactagattttaacatgttttgtttaggagaaaaaggaagaaagaaagactaatagtatgagtggaaaattttctttttaaaactgaaagttattttaatatatatcaaatatataattttatactaaaaattaaaaatgattgtttcattaattataagaatattatgtatatatattcgagacaggtgtaattatatctaattttgatttattaaaagataaatataattatgttttgtatatgttatacatgaaataaatacaaaataacacatgaaaatgactgaaacttctattgtcccgtattttctgaaaataacacgtttttttgttgatgattgtcatttcattttttagtttataaaaaaacataaaagaacccccaaactaggcatgaccacggttacggttattacgcttacggttataaatttttttaaccttaaccttaaccattatatatacggttaaaatggttacggttaaatacggttacggttgtatacggttactgttatttgataattatgatatagttaatatatgagataaaatattatattttttaatctttataataaaataaataaataaatagtaatatatcaaataatatttattttacgtgattatatgttttaaataatcacgtaaacaaaaacaatactaaagaaaagatgttgtaagcattaagaaacagttttaagagtataaataatagataatatgaactacttatgatttgatttatggtaaaaagagtagtagagtaacttcgatcgtagtagtgggcatattaaacgatttaaagtactattttagtgaaataattatttatttagttaaccgcgtggttacaactatacacacttacaactatatttttaaagttttaagaatacggttaaaagagcggttaaccgtacggttaaccgatggttttgatacggttacggttagtatattttcttaaccgtaaatgatcgattttcacggttacggttattaaccgttttatacggttacggttgggttacagttaataaacgcttcggttacggtccgaattacggttacagttagattttggtcatgcctaccccaaacactccacaccatatgtagttttactgtttaaggtatttcaatcttcttcttcacaaaatctgagccgcttatacagtaagtatgcattttcttttttattattatttaattaaagtatctttttgtaccacctttcattcgatgaatggtgacaaaaccacagttcacccacactgtggttgacccaccctaaattccactcaccattcacaacctatatgtgacatttttttttaaatcatagttttatttttaaaataaaaatcacagcataaaagtcatagttgaaaacacatatttgtggctaaatctatatgttcgagtacgtgtatgttcgagtgcgagtatgtatgagcacaaagtaaacgacacaaagagtttattaacgagttcggtttatcctacatccctgggacctagtccagaacaaatccactagaacaagattacaattacaattgcgtatgatacactacattactatacctatcattcttttctagatgaataaaccaccaataaatcttacatcatatctggttggacgacgccacacactttgtgtgcatctctcgagtactctgaggcgtgtgcattctccatgaagcgccatcttagtatttataacaattgatcaacccctagaatagacaatttttctattcttcgctaatatgaatttcccttttttacaacaaataagaattgacaaaaaaaaattctttataaataaggaaatttatcttcatgttaccatcttgaatagtatatttaagatgttcatctagctcagcaactgcctcttggcttatccaagttggcccaaacttctgtattcaaactcttcaaagtagtcacacaactcagcttcatgtactattccatgtattaatgtcggaagtagcacaagaacttattcacacgtctgatacatcctccgatataactgactgcaagtttcttgattcaacacatcatcttctcttctttgtgtgaacaactgatacaagtaatgcttcattatctctgattcatttatcagagtcacttcttgtatcatctttaatctcatgacatgttgagatagcttctaaaactcagtcaacacaacatcttcaatagtataatgttaaagtaaaagtctaaatcaaaagtcctaaccaatcacctcttaaactagcaaattaattaagagccttaagtgtaatattttcccttaaaaaactcctcctaggattcattttatgccgagttaatcacaaaattgaacgttaacaatcttaatatcaaagcatttatgtttccatattttttttaaaatgtaaaatttattttaactaaaaaagtactttacttttacgatatatgcaaccgtgtgtttaaaaagatgaaagaatttagaagttatatattgcttaaagtcattcaattgctatgttctcaagccaaaccaaagacgtcgtccgtcgtttagttttggtgagccctgcatctaaactctaaagggaggaaagctaatttcgaactatattgccatctatttgcttgatgagagtttgaggaaggtttgaaccaattatacatttttctaatgttagaaaacaaaacatttttcccccacatgttgtaccacaaccgtctcttctcttatcagccaaattgctcatgttgttcaaataaggttaaacgaaatggcataaggagaggtcgagactgcatgcataataacaggatttgtaatagtttgaggctatgccctattttgtacctaacaaaagtggcaagtagatgtttggttttccaacattggttcctatcattttcagttaacgacataaattccttattttcattgttaatatggtttcaaggtatttggtgtctcctaataactcaaaagcgtatcatgcctaaatctaactgaagtttgcggtggtggaagaactggatcggaaaagagggattttgttgtaagatatctaatgaaacttttgctcgagttgatagctcatttaaagaggaagataaaacctttacaatttgtagccgatatctattcttattcgatcacagcgaggaagcaagttaaaatagaaaaactcacatttattgggtttagggataatcaggcgacactctaccgctaagttatatatatatatatatattctcccatcaagaaatagaactgactaatcctaagtcaaagagtcaagaaactcaaggccactattcttgaacaacttggattggagccgggctttctttacgcactacgacgagtatgaaatagaaataatggaaagttggattcaactgcccactactctcagggccagcttagaggatgtgccaacggtgcatttgtacaggatccactatttttaagtgagatttctttaagcaattaggatcctattttctcaaaagttatgtaaaaaaggtccaaacctatgcacatataatatataaactgtttttttaattacgctcaaggtcccacttttctctttgtcggctctaaatactccaatcacaaatagaattgattatggattcgagcaatagcaaatggtttcataaaactgtatgattctctcgatctaaatcaatctggttttacatgaagaagatttgactccgcatgttctattcgatacgggtaagagaaatgatattcttttcttaaacttataaaaatagagaaataaaaaccaagtcaaaatgatacggataaatcctttattcttgcgtcaaagatctttctatttccaaaagaactggagttacatctcttttccaattacattcaagagtttcttatgtgattccacactctttaagacctcgaaaatttgacaaattccctttttttaggaccacttgcaagataacaaaaaaaaaaggaatgattaccacacgattaactattttatttatgaatttcatagtagtagaaatacttgtcttagcaaaacaaaatttgtagtagacatagtagcagttttcggaaacggacctctcctgaaggtaattttaatgtggaacccgctgctctagctaattgtccaccttttccgagtgtgatttctattttatgtatggacgtgcctaaggacatattggtaactagattcttctttttgatcaatcaaaaccccttaataaccatcttcctctttgatgaagaagctttcaaagttgaatcatcaacatgtttattgctttcaaccatgtttgtttcaagatcagcaacatcatgatcttctgaaacaacatgtgtgtctccgagattctcgatgaatccaccattatacttaacctcatacgttgatctattacgtatgtagattctgcatagaactttggcccgtaaaaacaagctccatatgcaattagtattatgtatattatcaccggattatgaactctactatatacaatacaacacttgtagctagcttgttctaagaaaggttactaacaaaattaactaataaaacacagcagaactattcagcctgagcttctcgtgctctttgtactttcaggtcatcaagataattctggtagatataaaacccgaaccccatgaaggcaatgagcatcgcgaccatcttaacctcagtcagcttgtcgtggaacaccgcaatggctgcaagaggcgtaacaatgagtgagagtgtaccaataaggttcgaaaacagcgaagaaaccagaaatataagcgccacggctcctacagaacccaattgccacgaaaccgcggtcccaaccaaagtcaaaacataaatgacttgaccctcgtgaaactcttccatctccacactcaacaacatccattccccgctcgcaaacaacccgataaccgcaacacaagaagccacaagcgacgtatagatttgcatctcgagaaccatagagaacgtctcactcttgagaacattctcgaaagaaaactgcataagagagagctgaagagaatagataagagaagcaaaaacagtacataaacaaccaatcaagtaactccacttagaatctcctgatgggctattggaatcatcgtcaagagaaaccaacacagcagagacagagagaaacaacacagagaagagaatcaaacaagtgattttctgagaattgatgtaataagagaagacaccattgaaagctaactgtgaagaacaaagaatcgaataagttgaagcagagagatacaaaagaccaaaagagtataaaagattgtctaaaccaatagcaaaaccaagagaaagataaatccaaaccagagtcttgaaagaacaagaagatgaagaagagtgtgaagcaggaaggaaacaaagagggagatagagaatcggaaaaccacaagtttggacaagagtagagatccatttactgtttccaccttcgttgtaataaaaccgaccaagaagaacagcaatggcttgtgcagagatgaggaagaagatacttataaagacaagaatccaccaatgggttcgttttagtttcatgagttgtgtaggaacactagttcttcttgttccttcatcttcttcctttagcagtaacattgcttcttcttcatctgttacccaaaagaaaaaaacacataaagttttcatcttttaagaaatttatcatttttatgaaaaccccaattttttgtttttgacaattttaatctggggattaagaaaaatctgggaattgggttttgacaattaatcagtttatttcatttctagaatcgaaactgaaattgaagtaaggaacattaaagagatatacccattgtgaaggaagatttgttgactgatggatgaatcgagtctgcttcaggattgagagacaagtctcgtatcttttctccggcgaggacgaccaatcatctcataactccctttttgcttgaagaaaatctcatatcttcccacaaaaaacagaacctatttgtgatttaatttaaatacataaatgaaggattttaccaagatatcctctcactttaatttgaaaaccaaaaaaaaaaaaaattcagactcaacacttacaattttttcgttttttcctcactcaaagaaacgagttccgagagaaaccgctctctctctctctcgattctctgtgaacacaaacaactcctctccctttcactcaaattctcaacaacacgaaccctaattctctctcttttctctcagaatcgtttcttctcctctaatcctaaccctaatgccgccgaaaacaatgccgcctctaaagaagaggaagagaggagttggaacgaccgtgaaatcaacgacggaggagactgcgacggcaacgaaggagactgcgccggcaacgaaggagactgcgccggcaacgaaggagactgcgccgacgataacgaaggagactgcgccgacgaaggagactgcgccggcaacgaaggagactgcgccgacgaggacggaggagccgtcgctgacagagcaagatccggagaatgttgaggaagaagagagtgaagaagaagagaaagaagaagaagagaaagaagaagaagaggaagaggaaggggaggaagaggaagaggaggaagaggaggaagaggagaaagaagaagaggagaatgttggcggagaagagtcctccgatgatagtactagaagcttggggaagagacctccgccgatgagaatatggatgaggagacatcaactgcagtggaaattccggcggctatggtaaggatttcgagtcaattctcagtctttgaatggtttgaaactggtagaacaggataatactatgatttgtggagaatactgtcattactaggatatagctatgcgtttttgggtcatactgtcaatactaggaaacaactacgtgtatgatttgtggagaatactaggatataactatgcgtttttgggtcaaactgtcaatattaggaaacaactacttgtatgatttctggataatactgtcattactaggatataactatgcgttttttggtcaaactgtcaatactaggaaacaactacgtatatgatttctggataatattgtcattactaggatataactatgcgtttttgggtcaaactgtcaatactaggaaacaactacgtgtatgatttctggataatgctgtcattactaggatataactatgtgtatgattctatgtaccatcggtagtaatatgaatgaatgtctgttgcaggagatcgacgaggaaacagaagcagtaccacccttgagtatgtatttcccgccctcggaatatgtgaagaaaatcaagctttcaactcggtgctatattcacgaattgttgactacattcgataagttggagccgccgatgagcaagtccgagaggttatggtttgagaaccatcctagtttccaacatatcttccacatgccaagagacccgaaccaccgacttatggggatgtggatgctccttcttcgcacggcgcgcattgaaaggaagaaagaagcgtggttcatcgtcaatggcgttccaatccgatatggaatattggaacacgcattgatatcggacttcaattgcaagaactataaacttggttacaaaaatacggggaatttggatttcaagaggaagcatttcaaggatactgttgtgaaacgcgaagacgtgagagagaagctcataggaatggtaccggagggtgaaagatcaaaagaaaggttgaggatgatggtcttgtatttcttaagcagcattatcatagcgcctatcaagaccggagataaggcacctcaagtggatgaatttttcctcaaggtgatgagtgatctcacgttctgtaggaattttcagtgggggaggtattctttcgattacatgttaggaaccatctcacacacggtgaatcattttaatggttcagtcaccaacaacgagaagtacatatggccggttccgggtttctgtcttccgatggaggttagttacaacttatagaataggtgattgtttgcaatactgataatactgggaatactatttgtgatttaaaattgtttttttagtctgtagcttcttgcattcgaggcaatttcacagttgagggaaaaatttattgaggaaattgcagaagcagatccgggatgtcctaggatgtgcaaggtgaggttcaagaagaaccatttgaaaggctttcctcttgataccatttatgcagaattgggtacaactcaggttagttgtcttaagatatactgtttcacaaatgatagttattatattttcttataataatccattcatactgtttatctttacaggtcattgattctatcgtcacacttggaattgaggagcaaaaactcatgaaagcaatcactgaagaagaagacgacgttgacgtggctgatatggtggttgaaagttgggagaagcgtcgtaaagagggccgtctaattaggtttgatgagctctaccagcaggatattcaagccctgcagatcatcgcaggtccaaagattccgggtgcggaggatattcccgcagtgcgtggacaagaactcccgagtttggtttctgtggttcagatgattgaaaacttggataagaagatggtagaccagatgaataaaattataataatgatttctgatttggatagaagagttgaatcgttggaagcattcaaggatgagcagaaagcaaaggaggaaaaggtacatattgataattgcgtaatactaagtaacactatgataactagagtataattgcgtaatactgatataacttcgttcaatcgcagaatcaagatgagatgaaccaagaggaggctggtgattcgagagagaaggatcaagaggaggatgttgttcaagagaaagatggtgatcaagaggaggatgttgttcaagagaaagatggtgatcaagaggaggatggtgtctcgaaagagaaggaacaagagaaagagaaggacccgaaagagaaagagaaagagaaggacccgaaagagaaggatggaggtccttcaaaacccgtggaagcaaacgtcacgagaaggatcactcggagaaccaagaattgaacttggttgtctttgtttggttttaggatttgaatttggaatgtttggatttaggatttcaagctttgtgaagatttgaatttggtatgccgttttttggttttaggatttgaatttggaatgtttagatttaggatttcaatttgccttgtggagatttgaatttggtatgccgttttttggatttcaatttggatatgaattggaaattgatattcaaggacttatcgaaaatacaaagaatacaagagaaaactaagacttaacgataatacagagaatacaagagaaaactgtgaatacaatggaatactgagaatacaatagaaaactaagaattgacgataatacagagaatacaagagaaaactgtgaatacaatggaatacagagaatacaagggaaaactagataaccataatactgggagtactagagaatactcaataaaagtcttactaaacaaaggcagaaattaagttcacacaaaccaatcaattcctcactctccacaacaaatcctccacaaagtccccatctttttctggatctcatccaacttcgaacgcatttgttggttatagtactccaagctttgaatcttttggtgatggttatcaacttgctctcttaacctattcacctcttctaccatagctttatcccaaagttttcgaatgtgtaacccatcattctacaaaatatgaattctaacaagcttaatgaattattctaaaacaatattgatgatatcttcaatttaccttataattggtgcattcatagaatctttttcctttgtcaccatctttctcagagattatgtcaaggatgcgtccaccacaaggacaaattggcggaattccctccatcattgccacttcttctagttgttgcattatcctctttgcgctcttcatctcaccataccatgggtcactctcacacaatcgatccatagctgattgagagagaaggaattttgagagagagagagaatggagaaatgattttgagatcgagagagagaatgattttgagacggagagagagaatgatttgaagagagagaatgaattttgagtgagagagagaagagatatttgtttggttttggggggaatttggttttggtgggaaattttaatggatttggggggaaattgaaattggagagaaattaatttttttggagaataaggtgatttccacgtgtgcgccgtaatttatacacgtgcgccgtttttttatatgcagttgtaccctaattattggttgtacaaaatgtccacgtagttgtattttcttgttttatagtttaaacagttttacatatcattcaaaatgatttatctagttgttcagttgagagaagtctatcactattaaattctaaatgtttagtgcactcacatgttaacaatatataaaattgcaaaatttcaatcctaagttggaatttatatcaaaagtgagcttaaaagtacaaggaatatgtaggatagagtctattaacatgtattttcaacaaatatttttcctctttatttaattcgtttaaattaatttttaagagttctttatctctttacagtctatttaatatttgatgtttcaaacaaacataaattcgaattttcatatcattcatagtttttcttgtattcccagtattatcgtcaaatcatagttttcacctgttttcttagtattatcgttaaacttgaattccgagtgaaataaaatatagttttacagaacgaaagtgtagtgttacatagttgcacacaacgcgaataaggtttacatgattaaaatcaaatactacgggtgccaaataacaaccattgcagagactgtctcggcctccttttgttctgagtcctttgacgttttggacgtctttctccagtggatggaatcctaagcacttttgttctgcccttcttctttttccgaggcagaggtaataccttcaacgctttgatatcatccgggatatcccactgtgatctacccggaactaaataaatagtcccataatacgccaatgcccacaattccgcccaataatacttagaaaccaattcatgtaattccatacctcgagttcttgttgtatcgctatcgaatacaatgaaagcggctaacgcatgaatacatggatacttttggatatcaaacaccttgcaactgcaagttttgaagtgcaagttgaccaaatattcgttcccttcaactccccggacattgtactcgagccggaatgtgtttagctctgttacttttagtttctcagcatccacccataaattatgcaagtagttctccactaaaggcacaaacttattatcaacagatcctgaagcggcatctttgcgatgttattgaaccaaaaagaaattttggccatgatcgcatctagcatgggtattaaagaatacttccttgcattgagaaaaacagaattcaactattccacacagttgctggtgtccaaattgtatcgttcccccggaaaacaacacctaccccatttttctttcacggttgaatcctccaaataattcaccgcggtaggatatctcaccttgaatactctatactccctctcaaattctgaccaggtataaatccgacttaactccatgaatctccaagcgagtacgtctctgttgatgttagtggaatgagctttgacattttgggataaatgccaaacacaatacccgtgatgagccgcagtatacgcattacgtatgcccttgatgaggcttgaatttctgtcactcataaataccaattctggagtatcgggtacaacacttagcagcttctcaaagaaccatccccaactagcatcattctcaccgtcgagtacgccaaccgctatgatataatgatgacgatttggatctcgagctgaggcaaagactagaacaccaccatatccgttcttcaaatgtgttgcatccacaattatcactttcctcatcgcttgaaagccttcaatgctagctcccaaagctatgaataggtattggaatttcccgctctcatccaacttcatatatgttactgtaccatcatttaccttcttcaacatgtacaaatagcaattgatatccttgtagctatcttccgcgctaccttttaaatcacaaacggcttgtcttttccctctcaatgcggtggagtatgataccttcacacctaatttagtctgaacaagctccatgataaccttaggaggtggagtttccaacagtccaggaaacgtatcatgaagaagagctgctactaattcaggggtacctttcctcttcctcatccttgtactactcttactaatccgggtacaactatgcatcttgttgtaccttctaatagagtaaatacttgtatcttgaacacatgaagcttgtatacgccagtcacaattcgcttttgaacacgttagaacataccgctccttatcagactttttaataacataatcaaaactgttagcaaatgcacctttgtccaccacttcctgcaatgctgccctacttggaaattcttgtcgcaaagtcaaaccgataccgtcttcccattctttcttaaactgactagattctacatcaggcggtggctcaacgtattcatcacccctatcatcatcatccctatcatcacgtgatccaatctcatgatcttgagtatcatcaaccaccactattgccccatttagttctgttccttgtccgtccaattcgcctatcacaatggttgcattatctctcatttcatcctcatttgaacccaaaccatcatagttcttaccaatagaacttttattgacgacctccactctcgacaattcctcgggcaattccggtggagtgatgacgtcaacagtcaaaggatatctactaaccatttcacccgaagatatatagacaccgacatcctcatcatcactaatgtgtatctcttgagttagtcccaacatcactgcattgtacttcatttgcaacttaaccttactttcatctaatccaagcttcgagcaaatcctactctctaacatggagagagttattttcccattcatcatcaagctgtacgctcgatctttccatctaaaatatatgatcaccttctccaccattgtatcctacaacaacaatacaaaaactctgtcagatatactagttatactacaattctgggtaacacaagtataactagtcatactacacctatttgtataatacatgtataactaataatactacatgaaaatgggtaaaactcctgtaccaaataaatactacatgaaaatgggtaatactactaaacccaaataaatactacatgtaaatggttaatactggtgcaactaagtcatactacacatattttttaattgaatcatgtgcagttctacgcagttctaccagatgtatttcctgacaagagctcaaatcgaatggattcgggttcaaaactgaaattcactatgattcagttgttggaaaccatttcttacccatttaaaaatctattcaacccagaaagtatgcataaacttccaatgtgcatacccaaacacaatttgcttaatctcaaatctaattgacaaaatctcttagttctaatcttcaattttaagcttcattcagctcgaaaaacttaccttttctttctatgacgaagaagctcgccgaagataaggatatggcaacaatggtgagcgaattccggcaagagagtagacgatgagtgagcaagagagcgatgagtgagctcgagagagagaggagaggagaggagagagagaggagaggagagagagtatcgttttctgtttttttttttcaatatagtttttttttaattatttagttttataatagatattataaaaagaaggaggaggggtaatttagtctctatacatctcattaaaagagaaagggatatagagacaataaggggagttgagagacttgttgattgcataaggggagttatgagatgatttctcggcgaggactttattctatagataaactagcatcgacaaataaactgaattcgaaccaaaaccgaatcaaaaaaatcgacccgaaccaaaccgaattaaaccgaaaatttgaaaataaccgaatacatataaaattctataagcaaaaggaccaaaaccgaatcggtgtcggtaacgaatcgaaaatatccaaaatataattatattttcaaaaatattagttatttctataataaataattaaaaagacatgaatatataaataaaataataaaaatactcgaaaataaccaaaaaatatccaaaaaaaaccaaaatattcgaaaatatttaaagcaaaataatcaaatagatactaaattatgaaccgaaagatccagaaccaaactgataccgaaccgaaatttcaaaataatcgaatggatattaaactttaaaaccgaaagaaccgaaaacagaatggacatcaaccgaaaccgaatggataaccgaatgcccaggactgataaatcataaagtacaaacaaaacagtagagagattacaaaggccattaaagcccaaaatccatacgactgcttgagccgagtttgatttaaaaaaaaaaaaaaaatctacagaaataataggttctacaaatttgagaaaacaacaaaaatttaaagataatgggtaagaaaaaactcaaactcttatacatgttttttttttcctttttataaattaccaaagatgatctatagttccgtacttttaccatttgacaaatctcttaacaatgagtgtaaccggcgagttgcccactcaacgattttttttaatgaacataaaacatagaactatttcgactagccaaatggcgtgatttagtaaattttgcactagagaagaatcaatatctaacctagacttacaagatgactcctctttttatgaaaacgtaccacttagttacacatctaaaatgttaccaccaagttctggttttatggtgcgcatgttggttcatggagtcagtgactacaattgctcttccttcggccagaaggcccaaactagaactggtgtagacgtcaattgattggtttatagtactacatgatagtgatcacgaggttcctttgtgaagtttatttcttagagttatttgatcgcaataaaactcgcacaacagacaccctgaaatagttccacaaacattgacaaaacatgtcactataagttactatcctgtcatgtcactttcattaagttccaatgccttctttgcaccttttttagatttaataaaagccactcataaaagaaaatttaaaaatagtaatagaaattcgtatagccacgtccttaccactaaaatttgttgttaatttatactaaaccacgatctactcaataaatagccacgaaaatgaaaaaccaaaaatctttgcttttccatggcaatttcgttgttccgtatgcacaagttagtcacataagaatcaatagtaaattttgctatgacatagtcactatctatttgtggtcttcttgcatgcactaagtctaagggattaaaactaagtctgttgtcctcgaccaccaaaaaagcctcaacagcggcgacactggctattagcttgtatatacttagtctatacttgtacataatagaagtgattaagggctcggtatagtcccggtttattcatctaattaagcacaagtatgaatagatagtgactatgtcataacgaccaccacaaagtctaagggctcggtatagtctcggtatatacttagtctatacttgtgcataatactggccaagacctccacaacgaccaccaccaaatatacctccaacactgccaaaacgtccaccaaaacggccgccaatacctccattacaagaatagccaaggtatgaatctctcattagtagagccgtcttaactacaagttcctttcctgccatgtcactaccattaagttccaatgccttatttgcgccttcttttagatcaatgtaagcaaatctgtaaaaaaaacatgggtttttactaaaaactttttagttaacctttaaatttacttgtcataaatttgaggaaatcacaaaccctttgatagcaccggttcagggtttgttggaataaaaacccttgtgatctctccacatgcactgaaatgtttacttgatatcatcctccggaagcgaagagccaaatcctttaacgtaaatcgtttgaacactaccaccaccagtgagatcagtccaataatttcaagagagatacattatctacgtacacaagaacatctaacaaaaacatggaaaaatcaatttacctgcctctctcagcaaccacttcatcattagaatctttatctgctggatctagcttctgtcgtagcatgtttacattttcataaacaagtaattagagaaccgtttgatatttatataggtacaaaaacacaaaaagtagcttgatcatagtaaaaaaaactatatatacaaagttagtgattaaaaaaatatacaaaactcaagacatgacaagaatgagatataaagtatatcaccttctcatcatgagaatcatcttctaattcttcctcatcagaagattaatcatcctcagaggaactgctcgctacgagattcttggtttcaggaacttcctgatcaatttaaaagtaaaagcaaagtcatatttacataattataaagtaagaaggccgcaattgtataacaattttgattaggaaacggaaacaaagctctatatcatctgaagacgaactgtcagatgagtcctcgctatctgaagcagccatagcaagagtcttcttggcaggaacattcttaccctgaattgtttaaagataatattaagaagctacttcatgaaaacattaattgaacgtaaataatactagaatatatacttcactgaataaaaaaaattcataaagagaaaaaaaataaaaacaaaataaagttataccttcattgaggttaacatcgcctttagatctgaatttgtcgcacacaaattcatctttgaggtcaacaaatctacatttgtcgcacacaagtccatttttgaggtcaatagatccacttttcttgctaacaaatcgacctttgtttccatcacctgaagaaagttggtgaatccttccattgtctcctgttatttaaattgagatgatgattacttagttctaggatttcttgctagactttcccattgagaacgattagaagttttgagaagagcgactgagagagagagagggacgcaaaattcagttttaggtctacgatttctttttcctttgttcttttaattttggttagggttatcttataaggaaaacgtgttgcacaagtaaaatatacaaatactttgtccctttcttattatataaaagaactatgatagtgttgggattggattgggcctactcgtcccaaggcccaaaccaaaccaaaggcccaaaacaggtttcgagcccagggttgagaaaagcggagaaagcccattatgggatgatcaaccacctttgttaaacagagtattaggtcgaggggtagattcttcaaatctcctcgacgtgcgtcctacacagagtggtataaatacggaatagcatgtcttgtcaaagaaagggggatccaggctgacacacaaagacagagagacgctcctcaacgttcacaagctcctcacctcgttccaagctcctcaagcaatcagctcttcctcgtcaacaagctcctcagctcgtcctggacaacaagcgatcagctcgtcttcgtcaacaagctcatcaactcgtcatgcacaacaagcaatcagctcgttttcatccttggatcgtccagctcgcaacccatccttggacacgaagctcatcttcgggaaccaggatcgtccacaagcaatcagcttgttctcatcttggatcgtccagctcgaaatccgtctttggacgcgaagaacaccttcagatgtcaggatcatcttaaggaattaagctcgtccttatacgtcaaggccgtcctcggacatcaagatcgcctttccggccactatcccgtcttgcaccaactatcggctcgttctttctccatccatactcgttaacaaatcatcctttgtaatctgtccgattcgcctaagtcgctagctcgttattaacagaaatattctttttcctgtccccagagatctcattttcatacttgtgtgattagtgcataaacagatagtccgtctagtcgcggtaatccatgttacgcttgcagatcgaaagtgttagaaaacgttttaggtttgcacgcatgtgttgggctcgtttagcctcatggttttaggtctagcgtaacatccctaattaaattgagttttaattaatttttcaagaaaaaaagtttaaattattgttttatttggacaacttctttaaaattattgttttttaaaattttgtaacacgagaatagattagaaaatttgttgtcaatggtcaagaaacaaaatgaacaaaattagctatcgtttgtctttatgtcgatgaaggtagtcttcttgaatgcactaagtctgttttcctcgaccaccaaagaccaaaccctcaacagcggccacagcgaccataacctccacaacgaccaccaccaaatatgccaccaacaaagccaaaacgtccgcgaaaacggccgccaaaaccaggatatctaccagaatagccagggttggaatctctcatcggtagcggcaccgtctttacaacaagttcctttcctgtcatcttacttccactaagttccaatgccttctttgccttcttttagatcaatgtaagcaaatctgtaagaagataaataaaacattgcttcttcagttaaccttttctctctagtagtagtcacaaaaattaaggaggaaataatcacaaaccctttgatagcaccggttgaagggtttcttggaacaaaaactctagtgatctctccacatacactgaaatgtttacttaatgcactcttgatatcatcatcctcagaaaacgaagagccaaatccttcaacataaatcgtttgaaaactaccaccaccagtgtcaatccaataatttcaagaatcaacacaagaacatctaacagaaacaaatctcccaaacatggaaaaatcaatttacctgcctctctcagtaaccacttcattagaatctttatctgctgaatatgaaatactagtaggcagatctagcttctgtcatatcatgtttacattttcataaacaagtaattagcaaaccgtttaatatttatataggttaaaaaatgaatacaacatctaggttgatccctagtaaacaaaatacatacgcaatactataaactcatgacataacaagaatgagatataaagtatcaccttctcatcatgagaattatcttttgattcatccttagatgcaatgctctctgccttcgccgttaaagaaccatttttatcagctgcatctagatttttggtttcagaaactccctgaaaatattagttataggaaagtaagttagcgtatatatactctaaagagaaaaggtctaaaattgcataaaactaaaaaaaggtaacagaagaagagtcttaagacttctttgcagtatagttcgatagtatctccaatgtccaactctattttagagtaaatatagttgattttgctctattgtatatcttcaaaatagagttacacatacaatggagcaaaatcaacaatattttctctaaaatagaggaaaatatagagttgggtattagagataggtcttagtaaaagaaaaggaaacaaagcagtgtttgaagataataagaaaatcacgaattgaataaaaataatactagaatatattaaacatataaagcaacttaagtttcaactttcatatagtcatactgtaacgaccgcgtcccgcgttcataaaaaaggccggtttgttttaagagaaaactagatcatggtcgaggaacggaccaaaatacttagtaggaagaacgagaaagttcaagccgaaccagctaggtgagctggacaagctggatgaactagctagctaagctaggtgagctaaaccagctgtaaaactagctagctcagctaggtgagctgaccgacagctcgactgagctcggtgagctaatcaagtactgacccagctgggtggtccggtcagctgacactcgagctggtggactgtggtagctcacgggtgaagaggtgtctcggccaaaaggtgtaacgtcgagcgggtaccaacgaacggttgcatcgcccaaaggatgcaaggaacagatgtgacctttcgaaaggatgcaaagaacggatgtgacctttcggaagggtgcaaggaccggatgtgatgcttcgggaagcatccattcgcctcctatataagggaggacgcccaaggcatctcacatcatctcacaacatgcaaaacaccataaaacattcttaaaggagttccaacacatcctagagttgttggtcggaaagggggtgcggctcggcgagtataactcgaccgaactgatgcgcatgctacctcccgatccaacggttcgatggagtgtagaggatggagagggtagaccgttcggcttagagacgaatcggatctggtagaccgatcgttggatcagatcggccagaccgatcgtcagacggatcggatcggccagacggatcggacagaccgatcgtcggacgggtcggatgggacatgccgatcgtctgacggatcgggtcggacagaccgatcgtcggatgggatggatcgagaaaagtgttcgaggaagcacaaggataagtgcatccgaacacacccaaggatcgcccatggatgcaatcttaccgataaagggagaaagcaccaagaatgggtaaggaacgtgattcaccatataggatcaacatcgcggccgccttcatgtatctatctcctcagccatggtgaaaccgatcagagatcggtaagaccaaagggtgactcgacggataaccaacgggaaagtccacggtgggaaccgatggacaaaacggatgttggacccgcgagcaaacctaaggccgacggaagaaagatttcatgggctagcctacgatgatccagtggatgaatccacggacccttgggtgtgataaggatatcgttcggaccgcatggatggatcattaagccgaaagctttatcgaccaccatggaccggacgggtaaacggttagtaaaccgtgggcggtcgtagtgttaaacgaccggaacggaaacatggatggttcgataagccgatggctcaatcgtccaccatgtagccggaggggcgtacgtttggagaacgaatggaccaataagccaagagcttgattcggccatcgtgaaccaagggaatcgtacgatccccaatctctatcattgtacttagaccagtggggttggttggttgtatggctaagtaacgatagggattggttcatcaattcacgaccgatgacgagtcgttgaacgaatggagtaaggcgacaaacgggctaaggaatcaaatccgcatattgaccaaggtatgtaacgatctagcttattagttaagatagacgtttggtaattgaccgtgaaagtaggataaaggaatatgcgattgttttccttagaatagttagcgaacatatgcatgtcttgaccgagtaaaggatcgatctatgtctaaggaacaaagacgatgaaaccggtacaagagttggttagaattaaaccaaggttagaaagacttccgctgtgtaataagagagcgattatagattttagcctcgtaaaggcaattctatgttgcatagcgaaaaattaagaggttcggccgggaagaggcgcgaacttgagtacaacgtcgccggacgccgagacgtccgggacggggtctcacaagttggtatcagagcattcttgatcctaggatggataggtgctcgagaaaacgtcatagtgagagtttggcggataaggaagttgagggatcgatgtgtttggaaacggaaattgttaccgaactcatgatcgggaaccaagatattatccttttagtcaaagcttttaacatgacgggaagttggttgatatattcggagatggaccgatatcaacgaaatttggatctagtcggaacttgactaagatcgggtacagacttagtcgggatttgactatttctggggttttgatcttatcggagattgaccaagatcatgaaaaaaacgacaaggtcgaaaagagacctaagtctagaataatgatcgagtccgggaaaggaccaggatcagaaatttgatcgaatgtcggaagagacaaagatcagaaaacgttgatcaagtccaggaaaggacaaagatcgggaaataatgatcgagtccgggaaaggaccaagatcggaaatttgatcgaatgtcggaagagacaaagatcagaaaacgttgatcaagtccaggaaaggacaaagattggaaaacgttgatcaagtccaagaaaggacaaagatcgggaaatattgatcaaggccaagaaaggacaaagatcgaaaataatgattgagtccgggaaaggaccaggatcaggaatttgatcgagtgtcgtaagagacaaagatcaggaaacttgatcaagctcggaaatagagatttgatcaaatatgatatctaaagtctcggagagactaaagatgggaaaacgttaaggagtaaacaagatcttacatccgctgaattcgaggacgaattcagtttaaggggggtagacttgtaacgcccgtgtcccaagttagggagtaaacaagatctctcacccgccgaattcgaggacgaattcagtttaaggggggtagacttgtaacgaccgcgtcccgcgttcataaaaaaggccggtttgttttaagagaaaactagatcatggtcgaggaacggaccaaaatacttagtaggaagaacgagaaagttcaagccgaaccagctaggtgagctggacaagctggatgaactagctagctaagctaggtgagctaaaccagctgtaaaactagctagctcagctaggtgagctgaccgacagctcgactgagctcggtgagctaatcaagtactgacccagctgggtggtccggtcagctgacactcgagctggtcgactgtggtagctcacgggtgaagaggtgtctcggccaaaaggtgtaaggtcgagcgggtaccaacgaacggttgcatcgcccaaaggatgcaaggaacagatgtgacctttcgaaaggatgcaaagaacggatgtgacctttcggaagggtgcaaggaccggatgtgatgcttcgggaagcatccattcgcctcctatataagggaggacgcccaaggcatctcacatcatctcacaacatgcaaaacaccataaaacattcttaaaggagttccaacacatcctagagttgttggtcggaaagggggtgcggctcggcgagtataactcgaccgaactgatgcgcatgctacctcccgatccaacggttcgatggagtgtagaggatggagagggtagaccgttcggcttagagacgaatcggatctggtagaccgatcgttggatcagatcggccagaccgatcgtcagacggatcggatcggccagacggatcggacagaccgatcgtcggacgggtcggatgggacatgccgatcgtctgacggatcgggtcggacagaccgatcgtcggatgggatggatcgagaaaagtgttcgaggaagcacaaggataagtgcatccgaacacacccaagggtcgcccatggatgcaatcttaccgataaagggagaaagcaccaagaatgggtaaggaacgtgattcaccatataggatcaacatcgcggccgccttcatgtatctatctcctcagccatggtgaaaccgatcagagatcggtaagaccaaagggtgactcgacggataaccaacgggaaagtccacggtgggaaccgatggacaaaacggatgttggacccgcgagcaaacctaaggccgacggaagaaagatttcatgggctagcctacgatgatccagtggatgaatccacggacccttgggtgtgataaggatatcgttcggaccgcatggatggatcattaagccgaaagctttatcgaccaccatggaccggacgggtaaacggttagtaaaccgtgggcggtcgtagtgttaaacgaccggaacggaaacatggatggttcgataagccgatggctcaatcgtccaccatgtagccggaggggcgtacgtttggagaacgaatggaccaataagccaagagcttgattcggccatcgtgaaccaagggaatcgtacgatccccaatctctatcattgtacttagaccagtggggttggttggttgtatggctaagtaacgatagggattggttcatcaattcacgaccgatgacgagtcgttgaacgaatggagtaaggcgacaaacgggctaaggaatcaaatccgcatattgaccaaggtatgtaacgatctagcttattagttaagatagacgtttggtaattgaccgtgaaagtaggataaaggaatatgcgattgttttccttagaatagttagcgaacatatgcatgtcttgaccgagtaaaggatcgatctaagtctaaggaacaaagacgatgaaaccggtacaagagttggttagaattaaaccaaggttagaaagacttccgctgtgtaataagagagcgattatagattttagcctcgtaaaggcaattctatgttgcatagcgaaaaattaagaggttcggccgggaagaggcgcgaacttgagtacaacgtcgccggacgccgagacgtccgggacggggtctcacacataccttcaccgataccaataaatccacctttgaggtcaacgaatccacctttgaggtcaacaaatcaacctttgcttcgatcatctgaagaaagctggtgtatccttccattgtctcctgttacatagtgtttcgatcattaaaacactatgtaagaaaattaacaagagaaagaatgaatttaattaatactctctcaagaacaataggattcctctgaatccaaccttgttctcaaagtttttcttttgcttcttcagatttactttggtctctaaatcatcttctggctccctcttacctaaaagaaaaaccaacaaaaacgttaaaatcaataaaatgtttttaaaaatcgacatacttcagagttcagcagatagagaacacaagctcaaagatcaattaaataacgtatctcctaagccaaagcagtacgagcaataaaggagcttttaatgtagcaaagagagagcgacacaaaagaaactcaatttcttaccttcctttaatggtttcgtgggcttaatcacagcaggagttgcttcatcctaaagttgcaaaaccaaatcaaggtcttttaaatttgcgaagaagccattaatagagtaaaactactaacaacaaagaagggaaccataattaattaaggcgacgaagattgttactttggtggtggatttcttacttgacttgtccattgagaatgataagaagaaaagagaagagcgaaccctaaagagctactacgtaagatatttttcagttttaggtctaaattgtatttccttttatttttattatttatgtattattctggttaagggtataataagaaaaagaaaaaactaacaaaaataccacatctttctaaattttttccaaaataccatattaaagttattattcatgaaaatgaaaatttgaggaataacggcattatgatcccgtctccaagaaacagtgtttaccaaagctttcttaactttttatctccaatcccacccgacgatataaccgcaattacccatctccttgccgacgaacaattcaagctcgcccctctcgtgtcgccgaaaatctcggacgtgaaaccttcttcaatgtcaccttgtcttttgatagtgaccaacttgtcatctaccgattcgctcgtggaaaatcaatcaaatagtcgtgacctcacaagtatcaaaatgcttaatagcttttgtttcaaagctctcatagaacctatatgtccttttaccttatctatcttactatggtattagggaataactcttttatatatgttttaaactttgtgatctttgaatcaccacttcttgaataaatgaaaacaagtatttgtccaaaataacaaaaaaccttcctcctttctaaatctactacatttttatttcaaaatactattttacccaaagcaaatactaagttattaagtttttctctttctctttcttgattagtattttttttcttcatcttttttgtactactttttcatcttcttaaaaactttagatctaattccaaaactctaacaatatcgattttgaatctagattttgagaaatataagaaaagatctcttttttgtccccaaagataaattggctacacgccaatgtggttttggtccacaattttctgttccatgtccacgacatatgtcccccatttgaacttatctcgatctacttttgtgtttgacttagtcgatttgaacttgtctcgatctatttctatttattcattcgatctaaacttgtctctgatctcatcctattattcattcgatacgatcttgtcccgatataaaatttgtcccgagtgtaacaaaaattgtcctcgattgcaattaatgcaattgcttccgtttctctctccaacacatctttattctcacaagggtacaattgtccacaaaatgtggtagaaatgtcaatgaatttttgattgtcgtataattggaaaggttttgtcataatgtggtaatcgtagagttcttccttccaacgaaaaacgtagagttcttccttccaaagagatggattacattagtgtcaagtgaaccttcaacccacgggcttgggcccacatgctttgacattagtgtcaagcatgttttcattaatactctaagcacgctaaagatgacaagttctacaagtttagataatacaaaaataagattacaagcatctaaggatgcaacataaaaagaacatgaatagacaaacgatgagtctaaaagatcttggagacaattgttgaggttgccacaagcaagaaaacggttagtcgggatcatgacaacgaacacttcaggcagtgagagattacccacagttattagacatagtgacactgaaaagcatccaaaaccttgatactcgctgatgcgtgacactctacacgaagtagtgaaaggattgtggagctcgggtgcttgctcggcttagtagcctgaagccaacgacattaagtttcatagagagttctctccatataggaggagggttggaaaaaatgttcttcaaatttcaaagaagatggattagagaaaacttttaaaacaggtagaatttgttttcacgttgattcgggatctctcgacaaaaggtcatttaatgtcttgctaagctggatacaaatctggaggatgcgagattatttggcaaagagtcggctaagctattgatcggtataagagaaacatgccaaggtgatgcccattgtcacattgaaactgactcgaatgtatagatacgatactaaggattcttgctcttatactcttagacagaagagttttggattaaagttttgaccatggtttgagaattataaacagagatccaaagtaaggatgtcgacacataattttgacgaatgccttttcgtacaaatcacaacgtcgaaacatcaataaaattggaataggtaatagacatagagaaacaaacatggaccaagatagagagatggttgtgccacatccacatgtgttggatttaattaacaagcgttacgggcctgactgttgttgaagctcacagaaagttctcttcacccacactagagttttggcgtgcgcggacgacaacctcaccagacgaggcgcaactgacagtacaagaaactgaaatcttgccatcagtgtcacgcccgtctccctcaacgttgagacggcgtactttcaccttgcttatatttttcctctattccactttcttaattcaaatataaaatcgtcttaaaaataaccttaaatcattgaaaactctttaataaatcgtataagaagataacaattaaagaaaataaacccgaggttcccaaaatacaccataagcgagacggacttgcgcgactacacacgattctcaccgtgacctggaggaaaaggggtgagtaaagaattactcagtgagaggatcttttccgcccagtggaagtacgatacgcgattctacctttaaaacacaatcagcaatcacatagaaaaagacacaacactcatatagtatgcatcactatgcaagactataacacacatctcattcttgcttaagcaagctctctacatcaataccaggttcgatcatctcccctgacctttgaacctatctagttccactggactcgtcagtcttttattgagctacaaagaacccatcaatttaatgtagaccattttccactgttccacttttcatcatctcaaaagatggtaattccactttcttatataacacatataattacttgttatcacaagtacaataattcaatcatcctataatactagaacaatcatcatatcatcaatcctaattatcaattcattattactaagcaaacatatctattcctatgcaatgaatcttgaaatataaaaatagaaacttgtaatcgaacccgcagatcacaccctcaccttggccacatgatgatgtagaacacttgtttcagctgcccttaagacaccgtaataactcttcagtgaaccatccaaatttcgtcccgatcggattagtttccgacctccaaacgttgctgtgaagaacccatctcggagcagctccttagggcttagttttgcaatatttttgtagttgcttggcccaaaagaaacactcataacttctcagtcataaacccgatttaaacttcgtcagttgctatggattattgacaaattaatcttttcaacgacatcttactcattatctgatactccttgtcatgacgggattctccctcgtaaaccacaacttgaaactacacttttcccgttatcttcttccttctttgattctgttttgctttgccctaacctaggatgctttgatcttcttctttgtcaattgcctttactgttgtgaatcatatcttcccctctcaatgtttttcctttccggtgatgatgatcccatctctccgtcacgtctcgcctttgtctccggtttcttcttcttctttgcaactaatcctcttcgcatccttctcttctccttggccatatcacaccctctttgttgggttgccttatatttctccattggtggttcagctctctctcacatctctccatagatgattgatcatcatgaaaaccacaaaacggtggctcacgatctctttcaagtttaggttttgcgtttctttttgatggctttcatgaagaaggtgatacatacaccaatatatactcccacgtttagattttaagttattagggaagatgaacctttgatgggctaaaatatggagttgggtctcacaatcaccgatgtctgatgatggaaatattttgaggaaacttgtgtatgtgtagaacgaggtagttagtaagaggaaaagcatgggctaagtattagagatgggcttagaggaaaacaatgatgattagaatattggtttgtacgaagccttattagtttgtgtattaggtttaaaatcgatatgtacacatatatatttgtatcgccaccttcaatatgaataacacaactgaatatattcagagcaatctttgactttacatgatatcagagcctacctttagcctgtgaagattgctttgattattgaaatattacaaaaatccagattgtgaatcaagcatgactggaactgaagataaatacacaaagagctccgggaaactcatcgtcggaagttcaggtggtgaaggagctttgatgtctccttatcatcttagctcaaccgacaataccggccaagtgttgacaccaattctgttgaataggaacaattatgaacgatggtccaaattgatgacgaattccttgcgaaccaggcgtaaggtagggttttttaatggaagtattaagcgaccagacggtgatggagaagatgtagaacgatgggagatggtgaactcgatgatcatcagatggatctacagtagcgtggagccaaagctacgatcatcaatatcactagttgaagatgtttctgagatgtggagtagtttgaaatctcgcttctctgttagcgacgggacaagagagcatcaactccacgctgatctcagcgtatgcaaacaagatggacaaacggtagaagaatattatggacgattgaagattatttgggatgatatctcagatatagacaaaggatttatctgttgttgtgggagttctagctgttcttctatgaagaaatacaagaagaaacaagatggacttcacatccaccaatccttaatgggacttgataatcaaagatttggcacaaccccatcaaatctgctatcaagacttcatgaactaaatttggagagcgtttactcacaaatagttccagaagagagacacattgaggcaacacgagaaccacaacaaaagggaggaatcgttggtttttcggtgtccgttgcggatagcttcaaacaacaatccttgacatgttctcactgtgaaaagacaggtcatgagaagagccaatgttacaagatttttggttatcctgaatggtggaacgaatcatctcaaaacgcagggagaggttcatctggtagaggtcgcgggtccttgcgaggcagagaacgtggtcgtagttcttcgttgtccgcctcacatgtttctggtgccatgactacgacaacaagcgggtcggcgtcgtccacaactggtcttctgcagctctttgatagtcaattgaatacattggccaaattcattgagaaatgcaagaagtcaaatggagcaagcaaagagggatactctggtaagagtgaaaaactgattttgtatggaactcatagtgagtttaatgtgatcattgattcaggagcgtcacaccatatgactggtggtatgaatcttctaacataaattcataaaatagatccttgccctatcaaattgccaaatgacaaggtcacttgggcaacccgatatggcacacgaattctcggaggacaattgatacttcgtcacgtattctatgcccctgaattgtcaattacacttatttatgtgtcataactcttacatgacattgcgagtgctgtcatatttactaaacagttttgtgtgatacaggaccaagcttcgaggactttgattggagcgggcactgaacgtgatggggtttatcatcttgctggtgcggttattcctcaaataaatcgtgtcaggacagttgatgctcgggatttgtggcataggagaatgggtcatccttctccaaaagttttatcttttctttcagatgttggtgttttcaaaaatagtattagtactttagaagaatgttgtgatgtttgcttcagaccaaaacaaactcgtgtttcgttttcagaaagttcaaataaagtagatgatttcttctctttaattcactgtgatgtttagggtccttatagaacaaaagctacttgtggagcagtttactttctcaccattgtagacgatttctcgcgagctgtttggactcaaattctcattgaaaaaccatcggtatccacaatgctcaaaaactttgtggcatgggtttttcgacaatttgacaagaaagtcaaaacaataagaacggaaaacggtacaaaattcatgtgtatgagttcttatttcgcagaaaacggtattgtacatcaaacttcatgcgttgatacaccacagcaaaacgggagagtcgagaggaaacattaacatatactgaatgttgctcgagcattgttgtttcaagcaaagcttccaactcgtttttggggagaaagcaatcaagctgctactcatttgatcaaccgaacgccttcaatcctacttaaagggaaaacaccatacgaagtattatttcagaatcctccttcttatgatgatataaggatatttgggtgcctttgctatgcaaagctagtaagacgttcgaatgacaaatttgaagatcgcagtgctcgatgtctttttcttggatatcaatttcgaaagaaaggatggttagtgatggattttcaaactgaaagaatttttgtttcccgagatgttgctttcgaggaggaatgttttccttactctgagagtgctctagcaagagaagatgattataacagtccaaattcgactatcgctagtcgacagggtgagtttcttttactcccagatacaagctcgatcgatccagatgcaagcctgctcgatccgagatcaagtcaagttacagaagagaatcaaccgatcgatccagaagttagcgtgatcgatctaacaaaagaaaaagtttcagacaaaaaccgatcgatcgatccagaagattgatcaatcgatgcaaacattccagatagagatggatctatcgatcctgactccagatcaatcgatcaggctgaatcgagtgactcgatacctaaaaaaacataaacaagtgcagaatctaactttgaagaacttggggttggtaaaagaaagaggatgaggctcgtacttctagagccatatgtcacatattcgggaacacaacttgataaaccccctcacacttcaactgcctccattcaaatctcctcaagtaagtgtctctatcctctcactgattatgtatcaattgatcggttctcccctcctcagcaaatgttcctagctgcaataagcgctaattcataaccaacttcctttaaataagtgatgagtgatccgcgatggactaatacagttaaaggagaggttggggctcttgaaaagaaccaaacgtgggatataatgtcgttaccggaaggcaaacatgctataggttgcaagtgggttttccgaattaagtacaactctgatggatccatagaaaggttcaaagctcgtcttgttgcacttgggaatagacaagaggaaggaacatattataacaaaacttttgctccatagtaaagatgacgacaattcgtacactcttgaaagttgcttctgctcgaaattgggaattatttcaaatggatgttcataatgcgtttttacatggggatctagaggaaaagatatacatgaagcttccttcgggtgttgaaaatgtggatccttcacaagtgtgtaagctcaaaaagtcgctttatgggctcaaacaagctccaagatgttggttttcaaagctctcaaatgcatttatagaattcgggtttgtgcagaactacacggattactcatttttcacatacttcaatgggaactcgtgcttgtatatcttagtatatgtggattatttcatcgttggaggcaatgattccaacttaactacggagtttaaaaggtatatgagtgaatgttttcacatgaaagatttaggtcctttaaaattctttctcggatcaaagtttctagaggaaaacaagggatatacatttcgcaacgcaaatataccttagatattatatttgaatgcgggctgctaggagctaaacctgttgatactcccattgaacagaatcatactctcgccaaagaagatggtgaattctattctgacccaactaaataccgcaggttagttggtcggttggtttatcttgctattactcgaccggaccattgctatgtagttcatcttctaaagcaatttctcggacaaccacgtacacgtcattgggaagcggctgttcgtctggtacgatatctaaaggggacttgtggtcaaggcttattgctaagcaaggatgatgatcttcatttgaatgcctattgtgattcggattttcaaaagtgcccaaaaacacgtcgttcactgtctggttatgttgttttacttggaaaatctcctatatgttggaagacaaagaagcaagaacgtatgtcactttcttccgctgaagccgaatacagagctatggcttatacttatcagaaactcatatggctcaaggaattgcttcttatctttcagattccccatccagaaccaataattcttcattgtgacaataaggctgcactacacatcgcaaccaatccggtgttccatgagcgtacgaaacacattgaaagagattgtcattttgttcgcgatgggataaaagatgacattgtgtctactcgacatgttcgtacgaaagagcaattggtcgattttcttaccaaaacccttggtcgaaaacagttgcagtatctacttggcaagatgggtgttcgagatctccactgtccatcttgagggggagtattagagatgggcttagaggaaaacaaagatgattagaaaatgggcttgtacgaagccttattagtttgtgtattaggtttaaactcgacatgtacacatatatatttgtatcgtcaccttcaatatgaataacacaacagaatatattcagagcaatctttgactttacattaagcgagatggagcaacgccatgtaggagaacgatgagcggagctgaaacatgagacgacatcaaggatctttgggctgagcccgagaatagatctgcccacgggtggagccgagatttagtagtagtcttttcagagggtggaaaccttccagtccaaccacacacaccaccgttagaggctgtgagcttcacctcgatctccattcgatggttgagagtgatggaaaacctaccataaaaagaaaaaaaacgaaaacaaaattgaaaagagagtatcgcagggaatcccaatgtcgacgagccatagcttcatcagctttggagaactgtggcaaggaagctttctcgattatggtgcatgggttatttttataaaatgggttttttctgaaattattttttcattgtttgttagttatgaattgtgattgaaatttatttttttttaaagattattttaggattatttgaaaaaggaaaaacgctttgaattacattttatgtaattttaccttcaatttgcaaaatgtagatcaatccaagaatatcgaattttattcgtaatagaattctttatcacgcatttcaagtttttaaaattttgataaataatatattaaaacgaatttttatgattataaatttaaaattactcttagattaatatagaaaattttaatgtatgtatatgtaaaaaagctgttaaaaatatttataattatattataaattaagttcgaattcataggtttgacccgcatttattataaactagttaagagtaaacaattacaaaaaaaaataacatttgaagagttgttttctttttcttttgcagaacatattgtagtaacaataacaaaactaacgacataaagtgtttgaagtaaataaatcattatatttttaattatctaatatattaaggatctgttaactactacgaaattgcatatattacacagtgagcagcctctttaatttgacgaagtaaatcaacatgtttggtttgacttgcacccggtttgctttcttcaacccattttattatatcttatcggagttggaatcgggacttttggtgtcatatgaaagactgactaggtcatcaactttagttgtcttatatttattgataaatatgagtttatgtgaacaatgcaaaatgtttttaggcacatagtttgttttttctttgtagcggtatgtgttcgacacattcatttttatattcttgactaacaaaaccaatatagttttacgatttggataatccaacttgattaaagacctacgctttattctctgtgttttttttttctcgcttttatgcacatgattactttgtactacataatatatatatatatatatatatatatatatatatatgattttaattatttgcttaattactcttttcctttttctacaataattgttgaaatttatcaacgtgtacaataagtttataaacttcatgtgaatacataaacatatatagaaacttacgtgaatagctatcactagctatgtctaacttcaagagaaaacactaatttaggtatataaccatattacaatagagaaagtaagattaagaagaagtaaaacccgttttacttatccgccacgttcaacaatatcgacgtacgaccattacttagtattgataatttaatgtttctttcattataggtaaaaataatttatggattcaaggtttaatagttatatagaatttaaataagtaacacaaaacaaacaaggaagtaagaaaaaaagataacatcttgacaacattgataatttatttattgttaaagaaaaacatttcctcacattgagcttgcaaattcaagagcatcttctaccacatccatgattttagatttcgaattcaccactctacagttcaatcttatttctccttgtttccctgttaaaggtgaaagactactcatccttatcattgccttcgcgaacgcatcgaaaaatttcccttgaccatcagcgtattctcggactaaaggaagagtgtctgaagcatcagggctagagaataactcttggtcgctctggataagtcctttgttctccttgaggttcacataatacttgttgtcaaagagtgttggcgtacgtaaatcaaaatctaccaatacactctggtttccattacgtggacattgttttctgagtgtggagaggtaagatttatcaagggttgggtcgggtaaaccagtgttactgaagttataaagccgatccattatgaattgacattggtttttgccaaaggtgtgaccacctaaccaaatgaaaatatagaacgaataaataaacttgaccaataatcatattgagttattagtgactacaactatagatgaaaatgttgccaacgaaataacgtaccagaaagagcaacgagatcagaagcacggtcgagtccgacgtttttgaatctatccttaagttggttaagggtaaagaatggagctggaaggttatcattagcaagatccatgaaccctcttaagctgtctcttcttccatttggaaccctccatgaaggacctcccgcctaaagtaacaattatatttggtctaattatctctcatcttccttataaattaaacaaaatggtctagaaaccatttggatagcatagtaaaagatgcataccaaaacgacagattcttgagccgcgatggcgagcaaatcagcacatgaaacagttttaggacatgctttctccacggcagccttcattttgtcgatcacatcgaaacctcgagcggaattagcgttcccaaacgcatctttctccgtcctaaacgatgtggtgttgtctaacaatatcgatgcatcacatccctttttcaaaacaaaatatttttcttcacatttagtaactaacaacattgtttacataaagaaaatcttaacatccgtaaacagttgatcttagattctttgaatttaaatataaacaagttatactactacatgtatcacactatcgatagcataatcttttcacgtgaatccgaagacagaatatttgaaatccaaaaaatatgagttcactataaacatcttcgagcatactttgacacagaatctgaaactcgagataagaaagcactacaatctatgtagacttgtactaataatatcaaattaatgtctttgagaagttgttggtccattttatatatagcctctccagtctccataattcaaccaaaactagtcaaaataagtataatcaaacttccaaaaaaataatttaactaaaaagacataaattttgtatgtaaaagtaaatttctattgtttttgtaaatttctttcattcctgtttttttcaattttttaactaactaaaagaaagccaaaatttcaataacaaaactaccaaaataatttcacagtttgaaatgaataaaccatgaaacaaactatttgagtcgaacaacaaaacaaaaagtctatcacatttttatatcctaatttcaagtttataatatccataaagcattccctcgcgctctttattagggctacactatagggaaccaaaagagttaaaatatacatgaatatattgattctaatggtatcttacattaacaaagcagtcgtggaaatgaagacgaaggatgcttgcagcgatgcgagggtccgatcttagagcattgacaatggtagtggttgcaatgtcaaagacttgcggacatgttttatcgtaaaaggaagggcttagttgagcatgagacaatgatacctgaataagaagaagaagaaatcccaattttatcaaagaggaatgcattttcttagctcttttaagagaattatttggttatggtttaatttgagtgaatgtaggtttgtcttaacgattctttttataggccaaggttctagcttggcggcttttacttttgtggattatttgacatacttttattcaagttgtgtatccgtgaatagtatattacatatggaatgttatactttgaataagacattgttatttgttgaatgactctgtacaaagtggtttaaaagcatctgttttctttcggctactaggttttaaagtctaaaaatactttaattatagcgtattcttattcagaatctctttatttcacactttaaatacatttaaactttctcttctgtaaatagggttatttatcagtgttttctattgaaattagacgtttttatctagccattcacgtaagattatgtatccatttttttttttggctataccaatactgtatgtttattattttttgtgcatatacagtaaaacttctataaattaatagtattaggactgcaaaattctattaatttaaaaagctattaatttatcgataaattaataatgttataatttattaatttatagagagagtttcttaatttcataacttttttaattttcaatgaaaatataagatttttttactaaataaaatatctttctagaaccatttacatgtacaaaataattttcatgtctagtaaacaacaccaaaatacttgatacagtaaacatattagaattaaatttaaacaaaagctaatatgaatttaagcaaaagaaacattactaaaaattatatttcatttgatttttttatattattttataatattatggtactatatgtatacatagcatttttcaaaaaaaatattatcattaaatttatcgattgtatctctttttacattggtcccaatttggaatcggaaaaatatattaatttatagagtattaatatatggaggttttactgtatacttgtcttttgtgatttgttttaacagtaattgttgggaaaaaagaaggaaaataattgtcttttgtccaaaaaaataaggaaaagaattgtagaaaataaggaaaagagtggataaacttgtaaaattatgtatggtatattaaaaattagtcatgtaacacacgacgaatatttgatatttagtagttaaaccatttggttactgaaaatatagagattttagaggatactgatctgcgttagaaaggatctgctctccaaaagaacgttaattttatttagtcttggagagatatacgagtaacggtttctgagcatcctaactattaaaaaaattgaatcatgtgtctaaaagtgaagaaaacacatagaaagaagcaaagtgcatgtctttacttatattggttttgttaggcaagaatataaatatgaattgaaattgtaaagatgaaaatgcaaaaagttcttagaaaatggggaattaaaaaaaacttagtgctagcacatatcaatacaaaaacaaaacatgtgctagcactaagttttttttaattccccattttctaagaactttttgcattttccacataaactcatctatattgattattaaaagacgactgaagttgatgacctagtggcaagtccttcgtcgtatgacacaaaaagtcctagattcgaaccaaaaaaagaggacaatggagtggttgagagacccacgagactaataatgaaatgaaagaaagtttcatggtttgacaaaagcaagccgggtgctagtcaaaccaaagaggctgctagtgatatcattcgtcaaaccaagggggctgctgtaatatgtgagatttggtacttagtagttgaatcatagatatattaattaattgaaagtacttacaagaaactttcactacaaaaacattattcgtaaactaaagagaagaaaaaataacattttttctttgttttggtaaatgatttatgttaatagagtgttttctggtaattctaattaaactaattagaataatctaacttttaccctattacagtgtgcatttttttgttccgttttttttatcaacaatatttaacatagaatccaactacaacgtatatataaacaataaatttggaattccatgatatatatacccttgtatcgaaaagaaaaatccatgaaaactatactaactattatctttaaaatacacaatcttttttcttgcactttcagaataatacgccaaacagttgaaagacattaacaaaacgttaaatctcatacattttttcaatttaaaaatttatactaactattaatcaaaaaattgtgagtgtctaccagcatttcagaccttggcattatcaccaatactaatagttccggaagtttttctattttcttgggtctatgtaaagataaattattgactttggagaacactttttttgggttctttagttctaatttttcttggatcgtacggtatatttagaaatcacggaatgaaaaacttcacgagaatattaatcgagatccaaggaacattctcccattaacggaaaacgaagccaatgtttagacgttagctcaattggagccaatggcagttaaatcggttaatataaatccttcaggatatcattgtttcattgattactcctgtaaagaaactgataagtttttgcgcatgggatggttttatacattatcaaatacggacatccaaccatgggtgttgccaacctacgtagaagtttcacatgtctacacacaaaagtggaagcatttgtctaggtaataagatgtatgattggccaaaacaaacgaaaaatgacgttctatacaaattactcagatctagtgaaaatggtaactaataaaattgtcgataaaaaaaaaacaaaaaataaaaacaaagaaaaaaaaacaaaaacaaaaaattatactaaaattaaatttacccacatataccattaattaaagcattacctcgaatagtaataacgccaaaaacaaaggaatgtcgtctcctcacactctttcgctcctcattccttctctaaacatctcctattctctcttgacaccgttgattccaaatcgagtagctagaatatagtcaccgctttttatgtgtgtttgtcactttcaaacatcaagttcgtcatcacggtataattataccaaaactataagctttcgttacgttactatacatacccgaactcaagttttttcatgttcatacccaaaattgtagataatgtcgaaaatctacattgatcgatcgtcaaatcattatcaaaccataaacaatgccaagtcatctcctgagtcacatatatatgatgcgtctagctagagcattgttgttactatgttgcataaaaacggtcggttcaattcttcattcttctcttctactaatgttgttttgctcaatttcttactctaaacacctagttttacaaaagaggtctagtaacctgttaacactaaaaaaaaacatccacaactctatgtttttcttctcaagtcaaacactcttgaacattgttactactatgcttcttattagacattccaagaaaaatttaattatcacttgtatagcataggaatcaaattgagcattgacaattaaagtgttgtagactttaaaacctagtagccgaaagaaaaaaaacagatgctttaaaccactttgtacaattccatatgtaatagactattaacgtatacactacttgaataaaaatatctcataatccacaaaagtaaaagccgccaagctagattattctgcctatataaggaatcgttacgaagaaacctaaattcactcatatctaaccataaccaaaaacattctcttagagagcaaagaaaatgcattcctctttgataaaattgggatttcttcttctccttcttcaggtctcattgtctcatgctcaactaagcccttccttttacgataaaacatgtccgcaagtctttgatattgtaaccaataccattgtcaatgcgctgagatcagaccctcgcatcgctgcaagcatccttcgtcttcatttccacgactgctttgttaatgtaagataccaccagattcgatatattcatgtatatattaagtactcttttggttctttgatggttttatcctaaaaagtgagaatgctttacggatataatcatatatatgaaagttggccaactctctccatttgggtgacacatcatcacacaagaaaatgacatgtgtcattttacattaattataaaaaaaaaattagtacaactaattgaggaaaaatcaaaagtcttttgttgtgtaaattctctattaatctcactcttaaatgaattttctaaaaacactcaataaataaaaaatcataacaatgtataaagtactactttcattctattctaattatttttttaattttttttatcaatagttattaatccataatggctaaaatttacttatgttgtagtttagatgtttgctacctaacctcatattaatttagtaattttagttggatattttcttattattacgttatgtgattatgatttatcatatgaccttctttctgtttatttttgtgcgttctaataacttcgtaacattgatatacaattttttcacgtagtggtcatctgagacattagacatacccacacaaaaacacgagactctatatggctatatgaaagggaagagaattaaagtgttgacttaatttactagcatatcatgatgtggttggtgtagtagatgacaaaagaatatatggaataaaaaattgtttgttacaattaagttaggcaagtttcaaaatacataagtaatataactacatattaatatatcatataatgttgttgtgtgtgttcatgatagtgaaatatttgaataataggtatataaatatttatattataataaaattgatatttcgaattatagataaatttaatcatagaaaattataactatataaaatatatatgaatttattaattacacattaacatacacacacaaatgaacatcaaaatcaacaaaagactataatcatatattccgacaattttaaaaacaaaaacccatgcgtagcatgagtgttcatttagaataacgaattaactaataataacaaatacgcaggtaatattataaacattgtatatataaagatcataagtttatatattatctatatgtggtgtaatcatatgtataaaagttggtcaactctcttcatatgaatgacacatcatcacttagtttttgcctaatgtccacttaataattaatgtaagttaatggtttatggtgatttattatttaattgtatatattataaaattttacataattaattgtatcaagaataattttcttttattttgtatatctttttcttaaattaaattatttaattgattttctcatactcttggatatttttccctaatttttataattttaagtcaaaatatgattaaataattgtatagtggattagctcatagtttttgtagtttgttctttttctatataatatatgaaaaatggtgagaagtacttgagaattctatcatcaaattcttggactcaaatcctctaccattttgtcttattgttttggtttaaggttaacacagatgaaaaaaaattctgaaaataatgtttactgagaaaagattttgtaaggaatctaaatgcaaaatgcaaaaacaaatgttgatttatggagcttagtatcaaataggatttttgtcttcttgcctattaaaaaactaacctaaaatcttacatttaaatacttttaaattacgaaatataaagtgaaagcccgcacgtattgcgggtactcatctagttaacttgaaataaggatagacatttcggttagttcatttaatgtctaattaattaattaacttgaaataaagatagattaattatataataaaaaaactgaatattgatacagttattatcgtcacaataaaacaatattcagtcacaataatttttttatgacgaaagtgaaacgtattttagaatgtcacaataaaatcgtcacaaatccataaaggtcttaaaaagatcacaagacgattaacaacagtaacaattcgtcattgattgtgacgacgttaatatagtcgaataaacagacacagttcgtgacgcacgatactgtcataatttttgtcacaattttttcgtaaaaatatttgatttctttttgtcttaataagatacttaaaactatagatttcttttgattgtttggttttgaaattttggctttcttttggttgattaaaacaataggaaaaaaaaaacagaagttaaataaaaattcaaagtaacaaaaaaagttatttctacatctgaaaatttatgcgtttttggataaattatctttttggaagtttgattttgtttgttttgactattttttggttcaatttggagtggctattattttctatggaccaaccaaaccacttcttacggaaattgagatgactattttattattacaactctatatagatattccagtgctgtcttatctcaagtgtcagattttgtcgtcaaagtaaagtcaaagataaaattctcttcgattattagataataattagtgaactcgtatcacaaaaaacaaatagtgaactcatatttttcttttttggattattagattacatagatgtctttgatcaacaaaaaaaaaattacgtagatgttgtggcgtagtatagtagcgcattaataactagatttactatttttcttgcggtaaaaagagaaaaacaaatcagtagatgcaggtaaaatatatctatgtggaagtattaacttgatctaacactaattgacaataaaaatattttgtttggataaagggatgtgatgcatcgatattgttagacaacacaacatcgtttaggacggagaaagatgcgtttgggaacgctaattcagctcgaggtttcgatgtaatcgacaaaatgaaggctgccatcgagaaagcatgtcctagaaccgtttcatgtgctgatatgctcgccatcgcagctaaagaatctatcgttttggtatgcatcttctactatgctatccaaatggtttttgtagaccattttgttaatgtttaaccaaatatgtttactttaggcgggaggtccttcatggatggttccaaatggaagaagagacagcttaagaggttttatggatcttgctaatgataaccttccaggtccatcttctacacttaaacaacttaaggatagattcaaaaatgtcggactcgaccgttcttctgatctagttgctctttccggtatgttattatctcatttgaaacattttcatctttatagttgtaatcactaataactctatatgactatattggtttaggtggtcacacttttggcaaaagccaatgtcagttcataatggatcgtctttacaacttcggtgaaaccggtttacccgacccaacccttgataaatcttacctagccacactaagaaaacaatgtccacgtaatggaaaccagagtgtcttggtagattttgatttacgtacaccaacactctttgacaacaaatactatgtgaatctcaaggagaacaaaggacttatccaaagtgaccaagagttgttctctagccctgatgctgcagacactctccctttagttcgagcatacgctgatggtcaagggacatttttcgatgcgttcgtgaaagcaataataaggatgagtagtctttcacctttaacagggaaacaaggagaaataagattgaactgtagagtggtgaattcgaaatctaaaatcatggatgtggtagatgatgctcttgaatttgccagctttatgtgaggaaatgtttttctctaacaataaataaatcatcaatgttgtcaagatgtttctttaacgttacttatttataatctattaaatgttgtgtacaaatactaccaaagaacaacgtgcaactaaaagtataggtgacaagctactgtctaaagctcaatgatcatctacacctaaccaatgatgaaacaatacaccgaagcaaacagagaatgtagaattcaaataaggtgatatgtttctacgcttgtaactatattggcaacatttcacaacaccaatggtttcatcagagatctattgagactcgttgctgcaaaacaaagaagatggatatataagacttcttttgattaaccgtttggtccaacagaaaaacaagtttgtgaagtctgtatttttaccttatctattggcatttttgttctcactgagtcaatcaatgaaaaatcaatatctgccacgacaatgccggtcgaaacacgatctgcaacagcaacagaatcaatcatttcattttggtaagaagagacttttgtgtttcatagatcaagatatagatgatgcctttgatcatttcaggattctcaccaggtaaccttccaactacagttccccacggatcaatgatcagtgtgtcaccataactttctcttttctcattatgctttcctgcttgagcagcagctatgacctgacgataaaccaagcacggaaatcgaacagagactgttaatcacaaatgcaatgagaagttaaagagggagataagtgtataatgacatacataacattgagtttcaattgctcgggctcgaagaagaatctcccagtgtgcctccccagtgaccttggtgaaagctgatggtactagtaaaacctgcagagcattaagacagacattttatactcaagtctgtgctttttttctgtaggaactcagttttatcacatttttgtttcgtcgttttttcgcagagtttcgaagcgcacgtaatttagaccaaacaggatttaagcttgtgtgattctaccagttgtttccttgactgagtttcctaaacaatactggtagatataaagtaataagacaggttcacaataattgaattacattggatttacctgagctttctgttcaaatctcagttgctgatatatcttagggaacctcaaatcgtagcatacagtaaggcctaagcgcccgacagggctgtctacggaaacaatctttgtccctgacaaaatacaggatttaagcagcacatcagttcatagacttcttaactgtgatggcagaggttgcactaaaaaacaatctgtagagattatcagcgtaatgatgtgacggaaaaagtgttatcgatcatggatctcagtggtttcgcgcttattatcaggttgtgatacaacttaatgtactctaaacatcttattaagactcaatattccacaaacaaatctttctttactctcttaaattcatataactcaatgcatttttccaaaagcaagacgcataacagattttttggaatggactactttgaatgttcagacattctatcaagattagattagataagaacattctagtcaggaagattgtacgaaacaatgtttacctggaactgtaaagctgctttctttgtacgagcttccaccaggaacatcaacatcaaaccttcaaaaaccagaagttgttcacttagtgatttggaccatatacagaatctaaagaaactcaacatttaaaatctgtgatagatatgaacaaatagttttccaaaatccaaggagagtctaattgtttacaaatgcattttctgataagtgtctcggatcattccagcatcatcgatcacaacatgtgtattacacaaatgagtatcatcaaatctctcttgaaaacctccaagagacaaccatatatttgaatccctgcaaacacacaacatattaaaaaggctaagcaatgcctaggaaacaactcagtgtacataagcaaaataatatcgtttacctggcgagagagcaataccgttccatcactgggccatctaatggttcagcaattttcacactctctccttccttatctcccacaaaagagaagttctcagggaagcaaatcagctttgcaccagccaatgctgcttccttttaaacagttacacatactcaaagattaataaaacactaaacatagtaaaattcggataaaaatctagacttaaaatttcattcacttgagaaagtactaatcttcttactttacttcaaaaattcttcatacactagtaatctcagagatttaaaagactaacaaagttgtaaatttcacataaaaatcgagactttcaaatttcattcacttgagaaagtactaatcttcttactttacttcaataatcttcataaactagtaatctcagagagtaaaaagactaacaaaagtagtaaaatttctgataaaaatagagactttcaaatttcattcactaaagaaagtactaatcttctttcttcacttcacaaaatcttcataaagttttcaacttttggatttctacaacttcaaaaccccaaaattgaaactttctgaagagttttgaagtaaagaaagaaaaaaagggttgaatccaaaacatcaaatctctaatcaattgaatcacaaagtctaatacgatttattgaatttcgaaatgaaatcttgagtttggagaggattacttgaacgagacgagagcaagtggcgaagttggtcattagatcattgaccgatgtcatttgagcagctgcgacacgaactgttttgtttacagtggtggccatggttagaggaatctgagaagagagagtgatgcgtgtgaatagagaaggtttagtgaagtcgagagaaacagagtaagcgttcatcagcagcactcagtggccggtctacttgggtttgttgaggacgattaaacccgtcgggtcttcgtcatacgcaaaaaaaaaaaaaagttatttaatttcttacatcaaaaatctatatataaataaataatttacataaaaaatttggaagttggtaatttataaagcatatttttaacagtaaaaatataagtcataaaaatttactctatatattgtgagtctatgtatattctaattttattttcatcggtgaattaaattggtttaccagtataaatgtttaaaattagtattaatcagtcttatcgtcgagtttaatgtttttattaataggatatcattttgaataaacgaaaaaaagacgtgctaattattaaaattgtaaaatatgatttagttggtcccaatttggtgttaaaaaaaaaaaattagttggtcccaatccccgttctaaaaattttcgtttaatccgattaatctcagtttagtcgctagattgaccttatccgcttcgattaatgactaatccttttaaaaattaattatttattattttttgtttaatccgatttctttctgattaatctttacctaatcttatatattcttgattattttttaattgtaagtacaaaacaatttatctttttgttattcagtcattagttttagagtttatgatgtaattaatttaagttcgaaattttaataaaaatcctaaattttgtcttaaaaataaagttttatgtatttactatcgttttgaaaacaatattagattattatattttaaaacaataaaataacctcaaaagtttgggagatttgcaaaactaccctttttttactaccttttgcaacaataccctattgttcatttttaaaaatatctcttcccttgaacagaatgaccaaattaccctcatctaataagaacatgtaattggaaactgaaagtttcccgccaaatttttggcgccaaaatttatttttcccgccaaaaaaaaatttccgccaaaaaaaaaaattcccgccaaaattttttctcgtaatttttttttcccagccagaaaaatgcttttaaaaatccttgtacattttttaaaaactcttttaaaaacgttgtaaagttttttaaaagctttgatagttgctaaaaacccttgtaaatcattttaaaatctcttaaaatctttataaagtctttaaaaacataggtaaatactttaaaacccttttttaaacctttgtaaatcattttaaaactttttacaagatttacaatcgtttttaaagcataagtaagtggcattgaatgatttacaaaggattttaaaagcttataaaagggtaaaacatgatttacaatcgttttaaagcataagtaagtggcatagaatgatttacaagtgatttaaaaagtgtttatatggtttacaatcgttttaaagcataagtaagtggcattgaatgatttacaagggattttaaaaggggttaacatgatttacaatcgtttttaaagcataagtaagtgtcaaataatgatttacaagggattttaaaaaaggtttgcatggtttacaatcgtttttaaataataggtaaatggtatagaatgatttacaaagattttaaaagcttgtaaaagggtaaaacatgatttacaagagttttaaaaggatttacaaagattttaaacctttgtaaatccttttaaaactcttataaagtctttaaaagcattttttaactctttttgaaccattttaaaattcttgtgaacctttacaaaaggatttaaaaagattttcaagagtttttaaagggttttcttataatttcttttaaaatcttttaaaaactcttgtacatcatttaaaaccctttaaaaatctcttgtaaatcttttaaaacacttttaaaccctttaaaaatctttaaaaaactcttgtaagtcttttaaagccatttaaaatcccttgtaaatcttttaaaactcttttaaaatctcttgtaaatcttttaaacccttttaaaatcttttgtaaatattttaaacccttttaaaatctcttgtaaatcttttaaaatattttaaaacccttttaaaatctcttgtaaatctatttcccgccaaaaacaaaattttacgggaaaaatgttttcgaaaattttttatggcgggaaatttttttttcgaaaatttttggcgggaaaattttggtgggaaaattttggcgggaaatttttttttcgaaaatttttggcgggaaaattttggcgggaaatttgattttggaatattttaggcgaaaaatattaatatttcattttgttaacctaaatcaatttacaaataggggtaaaatggtcattaaaaatataaatagggtataaatgaaaatggtaaatagaaaaagggtagaactgaaaaggggtagtgtgaaaagggcattagaaagaatttttctaaagggaaagtttcccgattaatctctgattttaatccgattttctgattaatcgctaggtccatatcgagcgtccaattaacgcatagccactttttgaacaagggtcccaatgtggtttttgtcatctattagctattttagttctcatgtaaaataagtatgaataatatatataacaagtaggtaacattatcagttttccatatttcataaattatatttttattacaaaatgtgtaaataatttattaacattctgcataaactcttataatttaggcgctaggtctctaccaaacgtctatactactgcctaacgattgtataagcatggtatgtatgaatttgtgaacttcagaaattttactgaatctagaaataaatatgtaagaaaaacaaaactcaccaaaatgtaaatagaaaaaaaaaattacgtcgaacaaaaatggttaacctataaatacatgaggaaaaatcaggatttggctcgacagagtagaacagaagttagggtttttcaattggagttttgacgatggaacttcgtatcgggaataagttccggcttggtcggaaaattggtagcggcgcattcggagagatttatcttggttcgattctctctatgcttttaccaaaatatttgataatattttttccatgtaactaggtcactttctgttccaagtggtttaatttgacgacttggtttgcttacaggaactgatgttcaaagtaacgaagatgttgcaattaagtttgtgagtgttttaaactttgtagaactgagtcgaatcgaacacgttttggtttggttggatcatgagaatattgtttttgttggcgtgttgtgtaggaaagtgtgaagactgtgcatccacaattagcatatgagtcaaggatatatagagttcttcagagtggaagtatgaaatggtttatttacagtctttgttaatggttattcattttcttgttggtatatgttttgttaatgtagatggtattccaaacatgaaatggtatggcgtcgagggggattaaaatgttttagtgatggatttgcttggtggaagccttgaagatctgttttgtcattgcaacaagaaatttagtttgaagacagttctcatgctagctgatcaaatggtaatatatatgctttggatttgattcattgtcactgttaatggtgttttggatttaacctacttgtttattaaacattgtgtttagattaatcggctcgagtttatccattctaagtcgtttcttcatcgcgatataaagccggataattttcttatgggtaaggctggcaaatcaggtaatctttcttcatgaactctcaactttgagtttgggatctcatgactattgtatcatcactctctaggtctacattatagactttggcttggctaggaaatatagagatagctcaagctaccgacatattccatataggtaacaaggttttctatgtcacatattcctcatattggttattactgaatgcttttttacgtatgagttgtttagggagaataaaagtctaactgggactccggcgtatgccagcttgaacactcacctagggatcggtatactcttatcgctatcgcagatcttattctttcttttcgcgtactacgttttcttatttcaatatttctaaacttggtagagcaaagtcggagggatgatgtagaatcacttggttatatcctcatgtacttcctcaaaggaaggtgaaaatcatggagtaacctctctttatatccttcttcttgtctatcattccatctcttatcctattttattgtagtctcccatggaagggactaaaagctgggaataagaaacagaaatatgacaagattagcgagaagaaggtttcaacttccatcgaagtaagttctttgtatatggtgacacatttagaaacttctatgagtctatgtacttaactttgcatcattgtcttcgtagacgttatgtgaaggtcatccaatagagtttgcaacctacatccattactgccgctcgcttaggttcgatgataagccagactatgcctatttgaagagactgttccgcgacctttttattcgtgaaggtgattcattttcgatatctccttgttcctctcaggatatattaagttaatacttctgttgccaccaatggagtatttgtttatctcaggttttcagtttgattttgtgtttgactggacggtgttaaagctgcccgcaatcacaatgccgaaaccctccaccttgtgcaaatgcacactcttgatactttcaactttttgatcccgttcatgatacacagatgaacaatacaagattgttttgatcgataaaagagttctagttaaaagcataatcataaacaatatattcctgaatcgatatgtatcagctatgtcactttggtgttgccttcttacagaattaaggatatgaatcaaaaaatgtaaacgttacgtacactcttcaatagctagtagaacacaaggtaaacaacacaagcataactgaatttgatacacaaacaaataaaacaatgaaaacatatcacaacctgaatgatcaatttagcatgtattgatcccgtctttgcagtccgtggtaaggttatagaacgtctcgacgcgagtctttcctctataaaacacctctgtatcaacagctactctcatgtacccatcaaactcaactggtttcccattgttcaagagactagtctcattgtaccattcactcttatttccccacaagtagctatagtcatcaagcaagtgaaccttgtactgagacctcaacttgtcaaagtaattataaaacggttcattagttgcaacgtacaaattcctccacacctgaaccaatcctttaagtttggtcaatatcgcatcaggccatgtgtctgcatccaaatgtggccatagcttcttgttcttcgctttctcgcctctaaccacatgaacagcatcaaaatcccagtccattttcccactaatctcagagacaatattcatcaacctcttcgacttccacaacgcatgccacggcctctcaacatacttcgatgcttgcccttcacaaactctataccaatagttttcaggctcaggagtatcaaactgcctccatataatcgtactcttatctttactaagctgcaaaggcgacactctatgcgtcttaaccttcctaacaggaactttccgtttatgcaaccgattccatttcttccaatctctcaagaactcaccctcttcaacaatcgaagccgtctccttaagatgctcgaaatcaaaataataccgaaaatccttaccttcctcatctttccccttagaactataactcgaagacaaacacaaactcaaatccatcacaaaagtcctattcaaatacattgcttcacctaaaccacacaagaaactccacatatactgattcatacccttacaataatcaccaccccgcgaataatacaaatacttccctctccggaaactcgtctgcgaaccaagagtcggaatcgtatcattaatctccgaatcaccaccgcgagctcctcgactcgagctcggtctactaatcctaggcctacgagcattaacaccagaatgccaaccactagtatgaaacactttataagtacaattctcaccaaatccaaacctaaacctcctgaaatctctgtatctcctccatgacttctccttcttattcctaaacctccaagaaacatcgcattcgtctagtttcgatccgttaaccggagtttcgtactctaagaacacaatagatttaaaaaccttcaaattaaacctctcaacagcaactaaaactctcggatcagaacaattcacaatcttcaaatcctcatcacaatctatagagttcttcacagtcatattaccgattttcgcctcggatttctcaatcgtcgcctccgtgacttgctctgtggagttcgacggaggtgatgatgacggagatgaagcgagatcttcgccggttttgagaatcgaaccgtcgattttgaaagttgcgttttcggtttcggttaggagtttggtgagtgctggagcagattcaagccatggatctggtggttggtaagttactgcgattactgtgaagatgagaactgtgaaaacgaagactgagaaacagacattgcttattagcttgattagattttgtgcgattggttcggtggttagatctgattccttcatggatttgagaagatccagaagaatcgcagagatagaagagagagcaagatctgatgcgaaatcaatggaagctttttggtgtgaggaagaagaagaaaatggactctagtgaactttttttagtcttttttttttttggacaagtcttctttttttcttactttgatttttaatttgggaaaaatgtgccaacttttaaatttgggaaaaaaaatgcatgagcttttaaaatgtaatttaaatcttaaagtttggtttgactttgtcaaaaaatagttaagtttcgttgactgagatattttaggcataccgtaaaattttcgttaatagaaaaataacggagttaactttccgttaataatctaaaacgacgtcgttttaaaaaaaaaaagcaaaactttgccaactagagttgaaccactgacctctcaattaattagcaaaacgctcaacgaccgagccatagtaaactattatacatatcaaagcttgtgtatatatatactgcaattaattgaaactaacagaattccattgttcctgagaaaagaagaaaacggcgtgaggaggtggtggtgtgacgagggaatctcgttcaacatgagcttgaggtttcgatactgtagattgtctctgtctagtgatggttcgtttggggagagtaacgatctcggattcaaaatcgattttacaattagagatctgtttatttttgttgattttatgtattgcgaattcttgactacgtctatgtttcggagctcatctctagatctgattttgttctaaaaaaaaattcaaactcgtgaggatttaggtttgattagtctcagcgttgtaactgctcaccgccgtttatgtctcaggcaacaatggagatttttaggtttgttattttcagttaattacgtgtatgtatataagtgtataaagtatgcgtattaatcaaatattactttggcgcagtggttggcagttggtaaagagtcttctaggtccacggttcatctctagttggtagcatttttcgtctttatttttattttgaaaaacgacgtcgttttagattattaacggaaaattaactccgttatctttctgttgacggaaattttacggtatgcttaaaatgtcccagtcaacaaaacttaactatttttttataaagttaaacaaaactttaagatttaaatgacatttcgaaagttcaggcttttttcgtcccaaatttaaaagttgacgcttttttttgacatttttccctttttaatttactatttaatttaggaacgaaaataaatgagagtgattttgaattggtttggtttagaagtaaagtaaatggactgggacgtttgagccggtttgatttgaacgttttacttatgtgttctaaaagaggatatttggattaatgattttaggaggtttcagtataaatatttcgaagttgaacgaataaaaacttttagaaattttagttcatgaaatagtaaaataaaataggaaaattgcacgtatgctcagtggattcagtatttagattctaatttcccaaaagtttcagcgctactgttgcaaaaataaaaacgcgtgtatccctatgtctagtagaaatctaaatgtagctcttatatctctttgtgtaaggcgaatagtagaagatcttgctttggatattttggtgggtgaattaaatttttatattattttgatagttttcaatcgaggcgtcgtttcggtccaatctatatttacctcatgttttttcttcgtctctttcattctaattggtttgttatcggataatttgttaccgtacacgagtttttgtggttcagaattcgtctcacgtgttgcgagtggtgaatatattaactctattatgaatatattaactttattatctgttatctcattatctcgacatttcattgcgagaggacctatatctatattaactctattatatgctatctcgttatctcgacatttcattgcgtgttttgaaattttaactcctaactggtttgttatcagataatttattaccgtacacgagtttttgcggttcagaattcgtctcacgtgttgcgagtggtgaatatattaactctattatgaatatactaactttattatttgttatctcattatctcgatatttcatattgttttactctgtgtaatatctcgacattttattgcgcgtgttgaagttttaacctctaacatatttattatcagatactttattatcgacattgcggttcagaattctacattttatttactctccctatgtgtaataaatcgacatttcattgcgagaggacctatatctatgttaactctattatatgctatctcgttatcttgacatttcattgcgtgttttgaagttttaactcctaattggtttgctatcagataatttgttaccgtacacaagtttttgcggttcagaattcgtctcacgtgttgcgagtagtgaatatattaactctattatgaatatattaactttattatctgctatctcattatctcgacatttcatattgttttactctgtgtaatatctcgacattttattgcgtgtgttgaagttttaacccctaacagattgattatcggatactttattaccatatacgaatttttgcggtactctcactacacgtgtaataactcgacatttcattgcgagtggtgaagccctacaactatattaactttattatctgctatctggttatcgtcttctactattgggcatagttttatttattcttattttctatcaagaatcttctaatataacctatgataccatatcaaataacgtattatcgactaacctaattatcttcatacttgtgttagaattaaatgttgcataatcattacgtatccaacaatatctctgctcagtagggataaatatgtcagaatttgttgtcgggaggagaaagaactaaatataaaatcatcactcatactttcctaatttcgcattcgtctaagcatagaaatttaattcacccaataaaataaaccaattccttgttcaaaaaaagtaataataataaaatataaacgaattctacaaatgtgtaaaatataacttcattcataatttaaactataattgtacacgacaaaacccaaaaattatcccatctattttatttgaatatttaatacttttattttttagtttaaagaaaagtatttcattgaattatatttggtccgaaatacatcttttttgaattgttggtatatttaaacccttgacttaacgaacattatggaatcaatgaacatcgttaaataataacaaaaagcatatgtattcatttttgaacgtttaataccttaactttttagttagaaaaagatatttctctaaaaatactttatcttttaattattagtatattcaaatccgtgatttatcagccgttaacagatgttataaaatcaataaaatcgttaaattttaaattcacatatataaatagatatatacaaaatagagaaatattttttttttcttaatctaatatttgtatgcttaaagacacaaatagagtatttgacttatcaaggtggtttagaatttattcaagaaattgatttgatatttataggtgctatgatcaaactaaatcttaaggagatgttagtgattatatgaatataaatacgacgtttgtattctaccacttgatttgttaatttcgagaactctctgatgctcaagtcaatttttacctgtacactataatatttattattattattaggtaattgaaaatattgtaaccaaaaaaggcaaatgctcgtacgattatgcactgaaataaaatgacctgtaagacttttccttcgttatatgagtgttagtaataaagggagtgttggtggaggtattctgaaaccggagaatgtgattgacgatgcgtttgtacgtgagagggtgaggttggagtttccgaatggggaggatggagagccagttatcaccataggggaagaggtgttggaagccatgaatgggctttggaagagatgtatgatagttaaggtgctagggaatcaaattcctattttggtgctgagtcgtaagttacaggagttatgaaaaccgtcgggggctatgacggtgatggatttgccccgtcagttttttatgattagatttgagttggaagaagaatatttggcggctctaaccggaggaccatggagggtttttggtaattatctgatggtacaagattggtcaccaaattttgatccattgagggatgatatcgttacaacgccggtgtgggtgaggttaacaaatatcccagttaactattaccatagatgtttattggaggagattgctcgtgggctggggaagcttcttaaggttgatctgaatacgattacttttggtaggggacggtttgcaagagtatgtattgaagttaatttagccaaacctttgaaggggacagtgttaattaatggagataggtactttgtggcgtatgaaggtttgtccaagatatgttccttgtgtggtttgtatgggcatttggtgcacacttgtccaagaaatgtgtcagtaaggagtccggctagagcatagccgagtacggagagagcggcggtggtttcatcaccagaagttgaagaaggattcacagtggtgagacagtcggggatacgggtggaaaaaccggcgcaaaagatggtgtttgcggcgggttcctccggtggtcgttcaaatcgcagtttaagggaacttcctaaaaatcagggggtggagatatcaaatcgttttggtgggttagaagaagatatggtatctgctgagataggggaagttgccattttagaagggtcgaataaggagaataagtataaagggaagaatatgcggaaggagtcgggtgtcacgcaagttaaggaagctcaagttaatgtgaccttcaaaaaaggaaaaggcgggaataaaggcgggccaaaatggaaacgaaatggagggttgataattatggagcccaatgggccaagacagaaacaagggtctgtaaataagcctgttagagggttaatttttgggcccacgaaaggtgaaagctcaaatctagttggggatgcgttatcagctaacggaaaaagattgagagttgaacagaggagtgttggtcgaccaggtggagcctttgttagtggtcttgagacgcgttcaggtgagatggacatgagcatggagttgcctcagaatatgaaccaaatacaacaaagtaaggaattgttgtgcgatacggcgatcgtggtgtaggaaggattggtcgtggagagtactggtgtggagatggcgtgacgctattcctcggtagtttggtgtttaaatctacaatttttaatggattgtctattttggaactgccggggggcgaataaacccaattttcgaagagcaattcgctatatgttgaagaattataaaacagattttcttgctatgtttgagactcattctggagggaacagggctgagaggatctgtcgggggttaggcttcgataattcttatagagtggatgcggtgggtcaaagtggtggtatatggttgttatggaggtcgggttttggagacttaacaatcatagagtcatcagatcagtttgttgttgtacggttgcagagtgattctgaagttttaaatattatcgctgtttatgcggctccgtctgcttcaaggaggagtgggttatgggagaagttaactgagataatagaaaggcttgacggacctgttgtgatcgggggcgactttaatacaatcgttcggcttgatgagagaacatgaggcaatgggagcatgtctccggattcccttgaatttggcgaatggattaacagggtctcgctgattgacatggggttcagtgggaataaatacacatggaaacgagggagagtggaaaatacttttgtggcaaagaggttggatagggttatgtgttgtgctcatgcgaggttgaagtggcaggatgcgcgagtgacacatctacccttcttggcttcagatcatgcgcccttatatgttcaattgtgtcctgttgttgaacgtaatccaagtagaagaccatttcgttttgaggctatgtggctgtagcacccgagctttaaggacttgctcctactgaggcttttactgttttacgcctaaagcttaagaagtggaatcgagatgtgtttggggacgtcaagaagaaaaaagaggagttgatgagggagattcaagtagtgcaggatgctttggatgtgcatcaatccgatgatatgttgcgtaaagaggaggatttaattaaagcttttgacgtagttttggagcaagaggaaataatttagtttcagaaatcaagggagaagtggattgcgcttggggatcgaaatacaaattatttccataccacaactattattcgtcgcagacagaaccgtgttgagaggttacataatgaagagggtacatggatttttgatgctaaagagttggaagcgctggcggtgcagtattatcagcggctgtattctatggatgacgttcttcaagtcgtgaatcctctaccacaagacgggttggagcggctcacaagagaggaagtgttgtctctgaataaaccgtttttagccactgaagttgaggtagcgattagaagtatggggaagtataaagcacctggtcccgatgggtatcaaccaattttttatcagagttgttgggaggttgttggtaactcagtgattcggttcgcgttagatttcttttcctctggaattctaccgccacaaacgaatgatgcattagttgttctcatcccaaaagttccaaaacctgaaagaatgaatcagtttcggcctataagcttgtgtaatgctattttcaagatgattaccaagatgatggtgttacgtctgaagaaagtaattgggaaactgattggtccttcacagtctagctttattccggggaggcttagtctggataatattgttgtagttcaagaggctgttcattcattgaataggaagaaggggaggaaaggttggatgttgttaaagcttgacttagagaaggcttatgattagattcgttgggacttcctcgaagacactttacgagctgcgggtatggaggagaggtgggttcaatggatccttcaatgtgttgctggcccgtcgatgagtgttctatggaatggagaaaaaacagaaggttttatgccatcctaggggcttcgtcagggcgatcccttatcaccatatctgtttgttctttgtctagagcggctttgtcatatgatagatagggctgtagctgtcaaagagtggaagtcgattggactgtctcaaggagggccaaaaatctcgcatatttgctttgcggatgatctgatcttgtttgcagaagcgtcggtctctcaaatccgagttatacgcagaattttggagaccttttgtatagcttctggacaaaaagtgagcttagacaaatccaagatcttcttctccaaaaatgtctcaagagatttggagaaattgattagtaaagagagcggtatcaaatcaacaagagagttggggaagtatctaggaatgcctattcttcaacggcggatcaacaaggatacgtttggtgaagtgcttgaaagagtgtcttcaaggttagcgggttggaaaggccggtctttgagttttgcgggtagactgacattgaccaagtcggttttatctttgatcccaatccatacaatgagtacaatctctctgcctcagtcaacgttggagggtctggataagttggctagagttttcttgttgggcagctcagctgaaaagaagaagttgcatttggttgcgtgggacagagtttgtttgccaaagagtgagggtggtcttggtattcgaacgtcgaagtgcatgaataaagctctggtttcgaaagtaggctggagacttattaatgatcgatatagtctttgggctaggatcttacgcagcaagtatagggtgggtgagttgaatgatcgaacatgggtggagaagaaacggccttgttcgtcaacttggcgaagtgttgttgcagggcttcgggaagtggtttcacggggcagtcggtgggtcgttggaaatgggcgtgatattctgttttggtctgataactggttatcgcatgaggccttaataaacagagcagttattgagattccaaactcagagaaggagttgagagttaaagacttatgggctaatggactagggtggaagctggataaaattgagccatatatctcatatcacactcggctggagttagcggctgtcgtcgtggattctgtgactggtgcgagagataggctgtcttggggttattctgcagatggtgttttcacggttaaatcggcctataggttgctgactgaggatcatgatccaagaccgaatatggctgctttctttgatcgtctgtggcgggtggtggctctggagagggttaaaacttttctctggttagttggtaagcaggtcattatgacgaatgtggaaaggatttgaaggcatattggggatacaagtgtctgtcaggtctgcaaaggtggtgatgaaacaattttgcatgttctaaaagactgtccatcaattgcgggcatttggcgcaggctagttcaggttcaaaggagctatgacttttttaatggttcgctttttggttggctttacgtcaatctaggaatgaagaatgctgagacgggttatgcgtgggcaactctgttcgctattgtggtttggtggagttggaagtggaggtgcggttatgtatttggagaggtcggtaagtgtcgagacagagtaaaattttttagagacttagctgctgaagtaagccatgcgcatgcaatacatagtcaaaatggaggcttacgtactagagtggaaagattggtagcctggaaaccgccggatggtgaatgggtgaaactgaacaccgatggagcttctcggggcaatctggggttagccacgacaggtggtgtgttgcgagacgggatagggcattggtgtggcgggtttgccttggatataggtgtttgttcagctccattagcggaattatggggggtgtactacggactctatatggcttgggagaggaggtttacacgggttgagttggaggttgattcagagttggtggttgggttcttaacgacggggattagtgatactcattcgttgtcgttcctggtgcgtttgtgccatggcttcttataaatggactggttagtccgggttactcacgtgtatagggaagctaaccgtcttgtggacgggttagcgaactatgctttttctttacctttaggttttcatatgttagatgttgttccgccctttgtggcgatgattgtagaggataatgaccgaggaactgcgtttccgaggcatgtccgaacttgatttcttttctttagtttcttaataaaatgcagggagacattcttctccctgtggcttactaaaaaaaacaaactaaaacacgtgttagattttttcgaaagcaaagttaaaaaattatatctttccgaatcaaaattttaaaacctatatctctccaaaatcataatccgacatttgaaaccccatgacaagaaaaatattggttcaagttatggtcctttgaaatgatataggttcaaatatatgatttgataaaggtttagagaagacaagaaaatgtcttttgatgactgttggcgcacgcacttcgaaatacattgatgatcataaaggatctacgaaaggatagaaggtctatcggacagttctcctttaccaaaataacattgtaatgatcctaacaattttgaatgataaatgagagaaacatgcgtggaagcttgaccaaaaccttaaaatttgagaggatatttgtactaggttgtacaaaattgagagagacactcaagtaatcatatcggttatcaacatatgcttatgtaataatagttggggagatcatatcaatattttgtcaagatcgacaacgataatactacagatcagacaatgatatggtcgtacaacaaagaaactaatagtcgtaccatgaacaaactactagtggtaccaaatagttagacaaggtatcacatacagtcataatcaataaagtaattatcgcttgcctatatatccaaaggctaataagcagtaattagttattagatttatcaaaaacaattcatcattggatttataataatctggtcatagtaataaaaatggctacagacggtaaataatttgtctcgacgatggatgtttggttttgttggaaatgacttgtgagtctatcttttaaaaaattattgagttaaaatgtaaattatcatcggataattagattagttttatgcgatcatcggcgctcacgggtataagagatgtttggtgaatttttgagatgaatggacggaacacgtagtgcagaatatgtaacatcatgacacagttctcataaacaaaggtaatgatttttggtggtaaatacctaattttaggggtaatgaggattcgatgggacatcaaggattttgttgttacatgtggggaaaacaaataagatttagtaaatttgggcggtttttatggtcggactttggagagcatatcttggcaaatcgtattttatatcgtaaaatctacgaggtggcgaccatgcgggcgcataaacaccatttatcataaagatggacatatgtcgctgaaaaatacaatacttctcgcgactggtggacatttgtcacgatggtaatgttatctgtcgccgctgacacttgtcactatgcatgtttgcccctccgcctatagatagagggcaaatctttatttcggagaatgagaagtgtctagaggtagagagaggagagagagagagagagagagagagagagagagagagagagagagagagagattgtccgtatgttgttccgttgtttcactaaaggatgtttataaacgaaagccaaggaaatctgagaataatcaacaaagatctagtcggtagtcgtgaactataagtctcaaaacatgtgaatgtggcacatgatttatttcctttatttaggtcttatccagaccgacacagcttatatttgtggtacaggttgaaaagttttaggctatggtcgggagaaatgatactcgaagatggactaactaatttcacttgctttgtgatagtaattttggttggattgtctacgagtatcatatgtgatatttcaagacagtctgaagtcgtagaacagttcaggggtgttataagataagtctaagatcactagtcaaataattaagtgtaagtagtcgagagtacacagttggatatcgtaagtaagtatcgaatgatcgagagaagatgaagaccaagattaagtcacatattattgttaatcgtcgtcaatttagcagagagatgacatttgttttattgacacgcgcacttgtcaaaatacatccgtcatttgtcaaaaaatctattcgacacttgtttccgacatttgtaaatccgggttgacacttgttcgattggcaacacttgttaaattttacccgtaatttgtcaaaacctatccaaaacttgtccacttgtctctgacatttgtcaatccgggtcaacacttgtctaattggcatgaacacttgtcaaaaatccgtcacttatttacttgtctttgacatttgtcaatccggattgacattttgtccggttaacatggacacttgtttcatataaacccaatattctttaactatattattttatccatgaatattaatataataactatgcttctaatacaattagtgtaacttgttaaatttgtaagttaataattatctcgtaaactaccctaattttacctaaatagtttatatacgaattttcttttgcaaacgttattattttttttataaaaagagtatatatacaaaataacctttgacttgaaaagaataaacaaaataaccttggaacaaatagtacttgtctactacagaaattttggcaatattagtctattttagcctttctctttcttcttctttctcttatttatttttcatgttctttacgagactttagctatggagttctctttctctcttcatctttaacacaattcatctttttcagattcaccatgtcattttctttttctatttctatttctctctccctctcctagaatatcttcaccacctctcataaaatatatcatcatatctctttattttgttcacccacatgttccctctttatttttccatagaaatctctctatctctcattctttgttttctctttttgcctgaattctccatcaatgtcgttgtgatataagagattagatttgatgttaaaacaaatgtctgattttaaaatgcatgtattttaagaacaaaacatgttattaacactgatatattaatatttgtcatgctatccaacaaaaactcatgaaatatataaatattagtcatgttatccaataaaaaccgatgtaattttgtaacaattctatatgtttcttaaacacttcgcgatttataagagaattgcatgctttttataaatatatcgtgctatttcagagaaacacattatttcagagaaacatatatatcgtgtatatatatcctgtatgtatttaaaagaattgcatgcttttttgtaaatatatcatgttattttagacaaatacataagaacttattaactacaactaccgatatttttgtaaaaacaagaaaatataaagatattttagtattttatccactttaataaagattatttatataagttttttgacacaaagttattctgtcaattttatggttactttctaatattaccgtttaaaatcttcgaaaaaaaagacaccaaaaataatttaaattaatttgagtaaaataatagtaacttttttttacatcaaacagcgaaaaaaacaacaaaaagcaaaaaaaacaaaccataaacaaacttttacaaaaaaaatgggaatatgtttttgaaatacaataaattttgttttctgtctctctccaacgtttttttttcctgcaggaggtaaggaacagtggtacaataggaagcagccgactctgtattcataaaacgacaaatactctctgtctccgtacgtccatgagccacgctaacaaactcttattccccaaaaccattttcttctttctctctgctctgttcttcctttagtggtctgtgtatcataaagatttcacctttttcatgtttgaagagagtacgaagaacatcaagttcatggattttgggttttttcctggtgatttgagacaacgaggttcatttactgatctgggttttaatgggtttcctctaacttcctctgtctctaatggatttcacttttccggtgaccgtacaacaaacccttttcttaaccttcgaaagcttgatacgacgtcgttaatggcggatggtgttgatatgggtttgtgtcaaaacctctctaaaatgagtatctccgatgaaagaagcaatttttttaaccactctagtttttccggctatggatgttaccaaggtcgtgagagctcctttcatggtgaagcttctagctctatgcgtggttttgttggttatggtgatgttcatagattcgaacaagatctgagagtaagagcgagctttcatggtgaatctgctatgagtagttatgttggtgatggtagtgattatcatagactcagatttcttgccttacaagaagcttctaaccctaaccctagatgttttacagagaacatgtctcttcttaacagagattacatgttggagttggagcatttcaatcaacaaatccggcgagacttttctctagttccacagaaatctccactagcttttcatgaagagaggatcttgccaccattttcagccatgggaggttctagagagcttgatggttctgctaaatgtatgaagaacaaggaagactcactagatcttgcttcaatggttgatagctatggttctgtgtacttaatggcaaaagatcaactgggttgtcgattattacagaagtttgtagacgaaggaaattttgttgatgtgatgattatattcaaggaagtgattaataatgtcattgagcttggaacggatccgtttggtaactatcttatccagaagcttattgaagtctgcaatgaagaacaaagaactcagattctcattaggttgacttcaaaacctggacttcttgtcaaaatctccatcaacaattatgggtaagcttcattatccattttcacttttgtatataaactatataatagtaattgtataaaagcattttgaatttaaatgatctgaaaagtaaaagctttttgtcataagcacaagaactaaggagacatgaaattttgttgcatatatgtggaggaaagatgagatctttctttcttcgataaagatgaaacctaagctatttaaggaaagaaagaaaaatgagatctttgtgaagaaaaaattgtcagatttttgttgatggaaaaaaagatgaattgtttttgctgatttagacaaatcttagacctttgaaaagaacattttaaatatttttcagaccatttgacttgacttgttgatacatgtttttggaaatctttggttttgcttatattatgataaaagctgaatcttgttggtttgatgttttcaaaatgagtccaggacacgagtggtgcagaagttgattgagactgtgactacaaaggagcaaatcagtctggttaagtcagctcttgtaccgggatttctctctttgtttagagaattaaatggaaaccatgtgatactaaattgcttgaaattctttagtcctaatgataacaaggtttataacataaaactcttccttaaatagttcaatcatgttcttgataatgttcttttaaaactcttgatgatatttttgcttgtgacagttcattttggaggctgctactaagttctgcatagagattgcgactactcgccatggatgttgtgtgcttcaacgctgcgtttcgtactcggttggggagcaacatgagaagcttgttgatgaaatatccagaaactctcttctccttgctcaagaccctttcgggtaacaatacttatatatatcaatatcgttctacaagattcaatactgttagtatcttatgtatagttaactagtgggtctaatgaacaaaacatgccttaagtgatagtattatttaaaatcatataatgtcactatgttccacattgataatatatagtttgttactaaaatacttgtatgtgtatgtgaaaatgatgacaggaactatttggtgcaatacataatagagaagaaggttggaggagtgaatgtactgtttgagctaagagggaattatgtgaagttagctacacagaagtttggtagccatgtggttgagaaatgtctcaggtattatccagagagcagatctcagattgtgaatgaactcgtctctgttctaaacttcggatatcttcttcaagacccttatgctaattacgtgatccagtgtgctctatcgaaaaccaaggttagttagtttagtcatgtgatcggtaacagactcgaaaacatagtaacggaactgattggattgaacagggctttgttcgagcgagcttggtggagaaggttagaagatatgaaaatctgaagatgactccatattgcaagaggatattctccaagaatctctggaagaagtgagttttagatgatgtaacccctcacgcaaggaatgtgttgttgttttgcttaaactaggatttgacttactcttttgatcctttactagaagaagagctcttttgttgtctctctctatctatgaactttacaagaagaagagagctcttttgttgtctctgtcttttgtttgggtgttttcttctgttgttttttgtagtcttgaaattgaaactgtgtccatagatatagacagagattgatggagatggtttttgtggttagatatcggctcagtgttgctgttttcaatgttatcggtttatagtaaattgaaaccaaataaaaactatttatgctttggtttggttgatagacatttcatttggctaaaataataataattataacactaaaataataattattacgcgtaatcctcatttgcagtagttgatgattttatgttttgtttttagcactatcttgtaggtctggacataatatccaaacccgaagaatcgaccgaatccgacccgaaaattctaattagaactcgaacccaaaatttttaaatacccgaacaggtttaaatttccaaatccaaaaaacccgaaaccgaacagatactcaaacatatctcaaatataagtatatattagttatatttatactcatatattttagttatttttgtgtatttttaaatatattcaagcaaaattacttatgttgttttgataatttttgaaattttcaagtaatttaatagggttgtacacaaaattttgatattttaatatagaaataaaccgaaccaaaccctttaattaccagatcatgtattaaatttctaaacccgaaaaacatgaatctgaaatactcgacccaaacccgaccctaatacccaaacgcccaaagctattatcttggatcattatggcttaaacttactcgctgacatttttgacaaaaaaataaaaagaaaaatactccttttctttagagcttttacgagttcttcataacaacaaaattatttgactttagataacaactctaaattacaagttactttttttctttttctttgtgcaagtacaaacctactaaattacaagttactacaatccaaaacttgttcataaaacacaccacatcttctccaccgcgataaccgcctgaatcttgtctcctacgtttccttttatgtcaaaacaatgccacaaaacgcagagcaaaataattcttctttaggcaagcatgtgacgtctgcgtgctgattcgtaggaaactgggctcttcaatgggccttattttcggcctcttgtttaaaactttctagataagctcttcccttgtgttatagctgaaagctcttcccatggtttttaactttaaggggtaggtaatttggtttattttcggtttcggattggattaggtttatttggttggtaataaactagatggatccaaaatcaaaggtagtattattcggtttagttatgtttggtttggatttggttcgaaaaacgaaacaaattaaatacaatagagcatgaaaccaaacttaccgtcatttgaagattgatatggagactacatgtaaattttcgaaataaaaaaaattatatattaagggttttgtacaacaaaattttctaactcatccacttttgcaattttatcattcacctctaacaaacgcagattatatttatgaagtccaaaataataagaaatatgattcttatatgtatattgttaacgtttttatggtcacatacattagagttgtaagattttgaatgtataattaaactcttggtcaaaaggacttcaatttaacatattatatatcaatattttacaaaactgatgatagcaaaaacaggcaaaaaatattaccttgcgtattattttagatttcataggattaatctgtatttgttggaagtggaaggtaaagttgtaaaaatggatgaattaaggattttttttgcagaaaactctaatattaaatactaggtagattgaatcattgtttccggtccagttataaaccgaacaaaaccattcgggtcaaattaaagtgtaaccaaaagatttgtgcatcgaatatggttcgacttggatttgtttgagttcggatagttcaatatggttaaaatacacaccctatgttaagaaactcaaataaaactcactattttgaaataaatgcaagaacgcgacatacttttgtatctattaaagagaaaaattaaagaaagatgcaaacattctatatatatacaaaagatgcaaactagtatgtatttcgtctcttaagtaacttttagaaataaaacaactatataatactaaatactaggtagatcggatcattggttccggtccagttataaaccgaacgaaactgttcgggtctaattaaagcataaccaagagatttgtgtatggattatggtttggcttggattagtttgagtttggacttcggatggttcgatagggttaaatttttttaatacacacccctatgttaacaaactcaaatataaaactcattattttgaaattaagaatttctatgatttctcaaatttcagtttctactcaaattcaaattttatcgcacttgttgtaaaaacgatattttttctttgaatataatttaacattagatttaaaaaaaaaaaagaaaaaatcacaagcaaaaacattgacatattttttgtatctattagtgagaaaaattaaagaaagaaacattatatatacaaaagatgcaaactattatataattcatcacaaaaactaaaattccatgaaacaaaaatattaacccataatcaaagaaacaaacactacaacgtgtaaagtttctgcttggtagagactagagagagtcagagaagagacaagttcttaagaaaaggcagtggagatagagagcattgttgggcgagcttgtggatcagaatgtaaacacaaaagtgcaactttcaaaatctctaagacctcctctttaatctccggtgtcggttccggtagccggtggtcggaaatgcttttcagtgacagagttgcatcgggaggtgaggatgaaagagttgaaactagatctcctggatgctctcctttgatcacttcaagtgttagaactccaaagctatacacatcgcatttctcagtcactttcatcgcataagctagttctgtcacatccaaatttcacaaacatgttagtcactatcattatttttatttatgatatatactaaataataaatcagatttataagacttataggaattgcattttaaactaactcaaactataccaaaatgaatcaaatagaaatgcttagtacttgaaatttggcaaaaaaataaaacgaagtaaaatcgattttctaaccaaaattcatgaataatttatgtttcaaaatcaatatattaaatataaatataatatcattacataatctaataataattttcactaattcttttttttttttttttttttttgtaaattttacatttatttaaaagctgaaccaaatccaaacttaaaacattatttttttctttctagaaattagactaggaatttcattacctacaaaaattttggtttttatttggttataatataatgaattctagttgtttacttaatttgcaacaaaattttggttaaaaactgaaccaaatccaacccatagtcaaaaaaaacttcaaaccgaaacaaaacattttggtttttatttggttaaaatttaacccgaataaaccaaatctaaccataatttcaacccgacccgaccataaccgggtcaaatccacaaccaatttatccaacgggtcaaaaagcgtacctggagcaacatagccgtaagtaccagcaacggcggaccaatttgaagaatccggtttaagaagcttcgcagtaccaaaatcagagatcttcgcttcataatcctcgccgagaagaatattcccactactaatatcacggtgaacaatcgccggagaccgatcatgatgcatataagacaaagcatgagccacacctttcacaacgttgatcctctttccccaatctaacttcttcgcttcatcatcattctccaaaactttcctcaagcttcctctctccatgtactcgtaaaccagaaacgtgttgcggcgatgcgagcagaatccgaagagtttcacgacgttccggtgacggatctcggttagtgctctgatttcgttgagaaactcttgttttgttgatggatttgagattgatgagtctgttgtttcgtttagctttttcaccgccatgattgcgtttggtagctttgctttgtagactttgccgtgtcctccggttccgattaggtattttggatcgaattctcctgttgctttgatgatctcttggtatcggactttgccgtcgaagctgaagattgataatgtttctcctcctgattctgaatctgtatgctcctcgatttgttttgttcgtttacggaaacagatgaagattccggcgcagacggagaggattatgattgctccgatgatcggaactagtatgtagatgattaggtttcgatccttgtgtgatttctttgaggatgtgattgaacatggcttcaagccttgtgtggtgttaacactaccacataagtctttgttaccttcaaaagcatctggaggtgcgtttcgaaacgctgcgttatctggaattggaccttggaggttgttgtgtgatacatcgacgtgtgttagtgctagcatatctttgaaacttggtgggatttgacctgagagattgttgtgtgagaggtcgagtctttcgaggttttgtaaagatctgaattgtgatgagatctctccgtcgagctgattgtagctgagatcaagcatttgtaactgagatagctttgttaacccctccgggatggtttgatccaagtcgtttctgctcaggttcatgtagtagagccttggcaaattgttgagcgttgggggtatttcggaactgaatcggtttgaggatagatcaagatactcaagattggttaagagtctgattcctgaagggattttgcctgatagccgattcccgttgagttggagttttgatatacggttgatattgctgattgattcaggtagctcgccggtgatgcggttggaagatagatcgagctgacttagctgtgtcatgttccaaatctcaggtgggatggctccagtgatgctgttgtttgagaggatgaatgcaaccagcttttgactttgttcccagttggctgaaagttgtccatgaaagttgttgttgctgagatcgatgaagttgagagtcgggtaaactccgaaagcctcagagatatctccggagaaactattccctttgaatcttactctgatcaagctcttgcaatctctcaagcttttaggaacaggaccttcgaagtgattatcatctagcgtaagattctcaagctttccacctctacagatggtatcaggcaagaaaccggtgaagttgttggtgtcgacctgcaggacggtgagctctgtagagttagcaattcccggtgggatgggaccagagagctgattatcacgtaggaacaaccattccaacgcggttaacttgccaaaagaatcgggaacaggaccggtgagtttgttctcacttatctccaaatcaatcattgattccatttcgcctagttccggtggaatcgaaccattgagttgattcaggtaaagatgaagaacggctagggttttgatgtttcctaaggtagaaggtattggaccggtaagcttatttgtgtggagactaagtgtatctaaagcggtcatattaccaatctcaggagggatttcaccagagagctgattttcaaacatattgagaagagttacattcttcaaattcccgaaactagaagggattttaccggtaaggttgttcctatctagacatagctctctaaggttgggtaagtttcctatttcagaaggaattgaaccagaaagagaattgataaagaggtagaggttaactagtttggtaaggtttccaaaagaagaaggtattggtccggttaaaagattgtcgtatatagctatctccgtaaccttagttaaccgaccgatctcagaaggaatcgatccgtttaacttgttttcaactagatggagagtatctaaattactcaaatcaccaagttcaggtgggatttcaccaactaactggttaatcgacaaatcgaagtattcgagtttcgagaaccgtccccataaaggagagatggttccagagaaacggttcatactgagatcaacaaaagtgagattggggagagacgagaatggaaaatcttcgaaagtaccttcgataccggtattagtaagattcaaccgtataatgctcccgagtgagcaggcaacaccataccaactggtacaaaagctgcttgtgtttggattgacccaagaagatagctttgatgaacttgtctggtttgtgaaagttgacttccatttcaaaagagcattagcttcttccaccgttgcagaaacagcaaaagaacaactcaaaactatagatatgatcaaaagaacttgaagatcacgaggcttttctttacaagccattctctctttgaatgaggttagtgatatttttctttctgggtttgttttgttcatacagttgcagattatctctctacggtcttttataaactgaaaattgatttcgttgactagtccgtgatagttgactatgggttgtcacttgttaatagaggacaaataagtcaatatcttgaattctctctttaattattagccgtttactttgtcaaacaaaatcttcggaaattatcacttcacacacacattcacattaatataaaaatagtttactgacttgtttaagttgttgttttctacttttgtataaagataatgtatgagttctttgaatgttatattataatgtatttaaaaaaaaacacttatataaaagttattgacggcaggattggtggatttatatggactgacaacgatggtcaatttttcattagcaaataaaatatgggttagtcatgttcatttggacgataagattaattagttttttcaacaatgggaaaatgcattgatgttacttttagtatagtaatataatacaaatctttcttaaaaatatctcttaactttattgtgtgattttttaacaacttgtaccataaaataagaaactatttttcttataagaatgtaaatatcatttcaaaaaatgaaagatatagaaattacaaagtaaattctaaaaatatggtcccataccgtcccataccaaaaaagctaaagaattatgaaagtatatacattcgaaaatcaaatcatcactaaattcttaagtagtaaaggttacttaagaatcaactcgataaaaaagactcacctaagcagaacatggctagaaacaagagcagtaagggaaaaaaagatcttcagactgactagaatgcttagcggaagtccctttaacgtaagttcaaacctaaaaaatacgaaacttaaataaaacacggacgcctcaagagtcaagatcaccatatgtagatttaacatctcgaattattattattattctttttttttattttttaatctcgaatttccttatcactgtaaataacaaaagaggtttagttttatttttgtcaaatatactttggtaaaaataatagaaattcaacttttagggaagagatctacgacaaaaaggattgacttttgaagtcttgcacaaggtatggtcatgtacaatcaactggtcccctcaatgtaatctcatggaccttcttattgtattgtatgttttttttttctttgtattgaattgttaatatattatttcttagttcaagtatgtaaatcctaaatagttattaagatagcattcgttataattttctttggaaaataatgtgtgaaaccaagtcattttcgtatagaagaagccagacaaaattagaaaagaaattcaaagacaactagaaacttgacaaaaaatagaagaattgattgattgaggtatagacttagtgcgaagactgaataacaaaggttagcttgcatgactagtaggtaataagatttacgtgactctattggccgagaaagaaaagctccaccattgtttacacgaacacttaatttttcaaacgtaaattgtaatcatctcgaccatcatcaaaatcctaactattcaatcatttaaaacgcatataaaaccaaaaatttataatccataacgaaatcattctcataaaaagttaacaataacccaattcgttgaaaatccgaattgtgtattatctgatacttatttttacatcataaaaagttataattttaagaacatcttatggtttattttttaattaactcttcttaatatcatattcttcttattctatgacatatcacgtatgtcatctcttctttagttttcgtttttattattcaatataattctgttaaaataagattattatatataaaaaaaaggaagaagaggaaaacagtcctttgagcttttgtaacgcgttttctcttgtttttaaggaacaattaagggcttgattggttttccctctgccatccgcaaacgctgcatttgcgggtggtagcggttgttagcgattggcaccaatcatacaaactgctagataccgctttggaccgttcgaaatcgccagatttcaaaatctccttcccacaaacgtttgtgggcggtagcggttagattttttttttttttaattaattaaaagaattatgtcttccacccaaaccctatatatcttattcttatcagaaaaccctaatcaatatattaaaactctattctctcaattacgacatccacccaaactgacgaaaatcaaaatcaaaatcaagaatcaacgtaagtatgatctatcatttcatccattcattagctagtgtaattctctgagtatttcatggcatcgtcattttttttattttttatttttttgagttttttgattgaatacatgttttaatttgttttctcgattagaaaatcatttggtcagacgagatgacccgtttcttgttacaactttatcatatgtatagaggcaatccggaaaacccgcgagttcaacgttatttacagtttatcacactacttgatgcaatttttggtgatgtaccaaatgcataaagtattaagctttttcttacaaaatttatttatttttgaatttaatgttttatttatggttttaattattaagcatgtttaatttttctaatattttcaatttatcataataatatattgtattttttcttttaatagtaatatattatatttattttggttattttttatttaattactattgcactcgctggtttaccagtcataaaactcccgcaaacgcacccattatcaaacgttcaaccagtcgttcaaaacgcttgataacgcttgaaaccgcaaccgcccgtttccgcaaactcccgcaaccgcaaccgcacccgctgcgtttaaaccagtcaggccctaagtaatcaatttcttaaaacagacaaacaaaaaaccttaaaacgcttagacataatgtcattatttttaaattttcccaaattgtagcaattacacgattgctagagtctctcaatatacctattttaggtgtccctactggctattggctactgttagggtttctaattaaacccatctagtattctgaccaaacactcttctcctctctactgccaaactatatattataaacaagtatagttgtgatattctaaaatatgttgtactaaccatatagaataattagtatatatgtagcaatatgaataatattttgtactataatgtaaacaattttttggtccagttctgcatatatataattatcaaatattactgtataaaaatgtcaaaaattaatatttatgatggatattagaaatattaatattaatgcgcatgttaattagcctgactagattatcctatagattagacggtacatgtattacttttccctccatatatttagtagagcatgtgtttgaaatagtcatacaaaatgaatccaaaaactgttatgagcaattcattctacaaacggatgctgtaattcctcacaaattatgaaatgaatgtagagttgatcaagaacaacgtgtttgaagattggatcaaggaaaaaaagataaagattcgaacaaggccactaattaagggatcattataggaaagagaccaccacctacgctcaagttaaagtataattatagtcaaactttttgaatgttatatttttaataccctgaaactgaagattgggacgactaggattggtggattatatatggatcgacaacgatggtccgttataatatatataatataatataatataatattatataataaaacgtagtcaagtactcatgttcatttgaatgataatttaaggtagattttttttttctccatcattttattgaaagtatccgtatatattgatggattgatgaaactatttgggaaaagatgaattatattcaattagtttagaggttttggttagttcgggaagttgctaaagcatatgcggtggtaggagtgcctcggagattagtgggcagagaagagagactaatctcatggagtagactaagtgaaggttggtgcaagttgaatacagacggagcgtcaagaggcaatcccggattagcggcggcaggaggggtcttacgggagagcaatggggaatggcgcagagggtttgcaattaatatcgggatatgctcagcacctcttgctgagttatggggtgtatactacgggttattcatggcctgggagtgtaaagtatcccaattagagttagaggtggactcggaggttgttgttgggtttcttcggacagggataagtgaatctcacccgctgtccttcctagtacgcatgtgctatggctttatctcaagggactggatagtccggatttctcacaagtatagggaagctaatcgtctagcggatgggttagcgaactatgcattttctttacctcttggttttcagtttttttatgtttgtccggatgctgtttattcggttatgttggaagaccggaacggaatgtcgtttccgcgtcatgttcgtttgtaatttcttttagtttgaataaaaaataggggacattgttccccatcacttaccaaaaaaaaaaaagtttagaggttttggttaaactcaaattgatatcactttagagatttaagttggtttaatttaatttagtctaaattggtgagttaaatgagtaaaccattaacccattgcaacccaacttatttgatccatctaatcatttgattcaataactcatttgaaccatcaactcatttgagtcaaaattttcaattcattaaaattcatgagttgagttgaattgggatgaccaataaaacgacccattttgacacctctaatattgacaatgagaatgtcattcaacattttgaatggaaatattttttagaaagttctaattttaatttatcactataaataaatatattacataagaattgttttggagtttattattatcaacttatttatttttattttttaacatcttgtaccatgaacctgaaaaaataaattaatgaattttctaaaacatggatgcatatatgtcgcaaacttttataccatcatagatctaacatttcaaatttcttagttatccaaataaactcattttttctggtgaaaaaagaaatatattattccctccgtttcaaattagttgtcactttagagttaaattttgatttaaatcagttgttgtattatgttttaatgcagatttttgacaaattttccaatgttatttttatttttgtagtttattaattaattgatgataatacaaaaaaatacacttattagagtaaaatagaaaaacatatattttttaaatatacgtaaaattttctttaaacgacaattaatttaaaacggattggagtacacttcagggaagagcgatctaccacaaaaaaggttgacttttaaagtcttgaataaataatagtgtttccaaactaattggcccactcaacgctatgatgtggatctctcttgttttgaatgttgtttgtttagtctttttttgtttttacctttcttaatcatattaactttatgttaatttcataactttatgtttagtcttttttcttttcttttcttaatcataactttttgtagtatatgagtagttattaacataccattcgctataaattctataggtctatttcactataattatatgtgagaaaattagaaagtccacaagaatgaaaaggagaagtcaatgaaacaaagaaaaaaccaaaagagaaatcagtgacatagacttggtgcgacgaccgacgaataaacgttatcttcgggtttgggttataagactaccaagtagcaactgtattacaatagttgtcttctggtcaaaatgtagttagaaccagtcatattgggttgtggcattaaaatgggctaaatttatttttacatatattgcaatatgataaattacttttacaacttattacaatgcatcttatcataatttaacaaattatacattgatattttggcctaaaaacccaattgatattaagcttattcgataccatgtctatgagaccacacttattgcatattacaagcttcaacgattaaactccaaagtaccatttaaattcattttgacatttttgcggctagctctctaacaaacttagccgcgaccattgccgtcatgtcatcagcggtatcacgctgtggattgtactcaacaacatcagcccccaccaaatctccctgaaggttgtgtaatatgttaaggacgtctcggaaagaaagacctcctggttcgaagtgggacactccgtgcgcgaatcccggatcgagacagtcaacatcgatcgagatatacacgcccttcactccttcccctagtttctgtacaaaccacattcaatatatgacttaaaatgtaccaaatgcacaaaacatctatagggagtgacaaagtgtcttataaaccccgaaccaaattccttaaattgaaacagaaacgaactttgggattattgttgattttgccatttttcatagaaatcttttgaaattgccatttttactaaaagtttaggaatatgccattttataagacttagaaatgtacgttatttggaattttttt

SEQ ID NO: 1386 - DNA, 83922 bp, Arabidopsis thaliana
aagctttagcatttaaaattattggattgatattttggtggttacgtgatgaaaaaaggttgctttttattaaggtctttgagaatggaaataaaccttttaccttgtagtattgcaaatcttagttagtgtttatcatgtcaacccaagatagttgcaaaaaacccatatcatttcagttctcatattttttcaagagtggatttctacattgatatatcctataagctcttctgacaaattatttcttgcttatctctgggtttgttccgtccctctactttatgatatctggatcttagttacctcaatgattgcacttaattaagttatgagtcgatgctaaaggaaggtgtgatcaatttactatgaaatgtgattctagaagtgttttgaaacgggcataataaacaatatttttttcctaagtagaaaataaatagttactaaacttgtcgctgggtatctacaggttttatactcttatggtgttgtctactgcattatttgaaaaaccagcgtttaaaaatctgatttgcaatggtcttgtacttgctgaggatgggaaaaagatggctaagaaattacggaattatccaccacctttggaagtcatagatgagtatggggctgtaagttttccctataatatgctcttgtgctgcgttttgagctttttcaaatgttctctagctaagaaaatcttggcagtgtgtgtacgtaataacttagtgactttacatgaaccttgataggatgctgtgcgattgtacctgataaattctccggttgtacgtgctgagccactacgcttcaaaaaagaaggagtactcggtgttgtgagtgattttggtggttgaatttattgctgctttattgctgtttattcgtggttgttgtctgaatttttttctggtcctgcattgggattcactaggtcaaagatgtattccttccatggtacaatgcatatcggttcctcgttcagaatgcaaagagacttgagactgaaggtggtgtgccctttgttcctactgatctggcaactatacagtcagcaaacattcttgatcagtggattcactcagctacgcagagtcttgttcgttttgtccgcgaggagatggatgcctatcggctttacactgtaaggtttttacatgttattttcagcatgatatggtgttcgcattagaaaaccgccatcactgtctcctggtatttattacatcttggtttttgtttttcttgtttaggtggttcctcgtctcttgaagttcctcgacaatctcactaacatatatgtcagattcaaccgcaagagattaaaaggccgtacgggggaagatgattgtcacactgctctttcgactctattcaatgtatactaaaaatagttgcagagatatattgtttgtggtcaccatgatttgaacacttgttatatctaattattgtctattttcaggtgctccttacttcttgcaaagtgatggccccgtttacacctttcttcactgaaactttgtaccagaatctgcggaaagcgtgtaaaggttctgaggaaagtgttcactactgcagtattccaccaagggaaggaatggtaagactcaagtccacgtctctatatccaataagagaataaaagtaatctgaattttgcctgcttatattttctttctgtgtttgaataggaaggggagaggattgagttaagtgttacgaggatgatgaaaatcattgatcttgctcggaacattcgtgagcgtaacaaactacccttgaaaactcctctaaagtgagtgttggtacttgatcgttttcagtttctgctttgttaacctaaaacatgaaaaaaaattcacacatgcttatccttgttgtatcagggaaatgattgtagtccatcccgatgctgatttcttaaatgacataactggagtactaagagaggtctgtggtgttacaggaacagtagtttatcttcttgaagttttaactaatattataaatatgaaactttttgagattattgagaaccatttgatatcagccaatgatagctatgtggatttatcctgtttaattttgcattgcagtatgtcttggaagaacttaacgtgagatcgcttgtaccatgcaatgatactctgaagtatgcatcactaaaagcagaaccagatttcaggttggttaagttttctgtctgtgtttttctttaaaccgctgagctcaatgtgctttagcctttccaaagggatgtagagtgaaattttacatgttcattcctgcagtgtattgggaaagcgacttggaaagtcgatggggcttgttgcaaaggaagttaaagaaatgtctcaaaaagatatcttagcatttgaggaggctggggaagttactattgctaaccacttgctaaaggaaacagatatcaaggtctctcatgctatgatgttttcctgtgagatagcgttaagagtatgttgttaatagctaaattctgacacatatctttcatgtgttgttcagattgttagggttttcaaacgcccagacgatttgaaagagaatgagattgattcagctggagatggtaagaagcgtaattaattatcacttctctgttggtaggatacacatataatacttgctttctttcatgatgcaggtgatgttttggtgattctggatctacgagcagatgattctttggttgaagcaggttttgcccgtgaggtaaagatatataacttctctaatagtgtactagtcctagatgaaaccaaagcaatacattttcttataacttgtatatcttctgtggggttcttcttcagtatcttaatattttatttgcatataaagcgatgttgtgcttatgagcttagtttccctgtgttaaagattgtaaacaggatccagaaactaaggaaaaagtcaggtctggaaccaacagactttgtggaagtgtacttccaatcattggacgaggatgaatctgtttctaaacaagttctagtctctcaggtaactagtttttgtttgttactcaattcatctgaacttaaattctacttgaaatttacgaatgtttcattgcttgtacgtaattatttgttcagctatggatcaaacgaaaatttatgtttccaacatgaatgtcttcaaccacatgccttaattctgtctcatcactgttgtttgttgaacaggaacaaaacatcaaggattcaattggctccactttacttttgtctagtttaatgccatcacatgcagtaagtcatcaacactcccatatctgcttatttatttgcacggcagaagcttaatgtttatcctcctatcttttatgtaacaggtcataatagccgatgagacattcaccccaaaagaaacatccgatgagagtgtcaaaaaggttccaaagttgtcgtataagataagtttggctagaccggctttgaagttcaatgaagaggctgttcttgctttatactcaggtgagtcaccatctcatcacaatagattctcactgtcaattctctctcgctttctgtttaacgtgtatatttatggttccaggagatgtgaaatctgcaaccgggcttcaaacatacttgttatcaagggatcattcgaatttgaagtcagagttccaagccggagatgggaaggttcgttagttaagcttttgttaacccaaatcgtttactttatcattttaatgtatcttgtatggcagataactgtaagctgcattgaaaatgtgcctgttgcgactgtggttcttggcgaacatctccatttgagtgtcggcgatgacttattgagcaagaggaacgcatgagccgtccctccggttttgtttgatttattgtggtaacttgggatttatttcccttatttttcttcttccatatcttacctataaactacttatttagattgttgcaaaaagttaaatctcagtgttgagactctcttttactcgttctatttgtacaatactaaacttttattcatctcaaaatttatggttggacagatatgtgattgagtccagtgaccaaagttgaacattgattttagtacagagaaggcaagaatcttgttaaaatctgaaattaccttaacaaaatttgattaatgtttcggttgtcatttgggtcttaaaaccatgggattcctgatgcctatgtccatttaattatggtcagcttttggacaagcgacatgggcagcccatagtttttaatattacacttatgaagtattgtacttatatttttaatattaaacttatgaagtattgaaattatatcattgtgtgaaacacttaagacttaagtatggagttttgaataaatgtgttcatgatatcatgtattatttggattcatggactgtccaatctattatggttctttttaggtttcgtctaatttagacattgctcatttgggcatggacaacccatttgatatcctacctttaaaggatccagattttcgttaaaagcattgaaggtaacattaaatcttagaaactatgtctagagagatcagagatgtgttagtcaagtgacaaaaaaaaaatctgatcatattcgttcatggaagagacccattgtcaaatcatgcttcctttaccacccttcaccaaagttacgtgcacttaatttacgccatttaacttcatttttataattatgttttcatacatttcgaaattgtttataagcaaatcaaatttgaaaataaagcaattaaaaaaatagatatgatattaagattaaaaaacataaagtaataaacttaattagacctatattttagattttggttagcatttttttttttttttgcggatttatgctagatcggttttgagaatcagggtcttactaacatgtgtagtttcaatattaatcgatcagaatcaaggtcatacgttcatcatcatcacatatatatttccgtaatattttctaacttatttttcttatctataagatcttaactaaaaacgataaacatgtgatgatcatgatacgtttgtggtatatatatgttcatgatcatttacttgactcggccatcagccaattctttttattcacgacacaaaagtaatgaacaatgcacggattcttcgaaatgaaagaggatccgtggcacaagcttctagttttaggatcctgcacttgaaatacaaggttcctttacctaaaaaaaagagagagagttgtggatgaaacatatggaaggagatttgcagtttcatcatcgaaacatgatatctggatctgaacatgtataaaagaagacatgtgtgtcaaactgagagtggagatgtgttttgcctcctcccatattagcaatcacatatatttctttattcaattccattatgttttttttggtttttgtttttaagtaactttcctgtatatatattactgattggttactatttgtacgatacatatcaaacagataaagtttaatttttcgaattacaagttacaacaggaaacacaagatgacacacaatactccttatattatatcttcatacattatcataatattaacgaggattaacgatgatgcaaactacatacaaacttattgtacatcactcacagaaaaggaatgctaaaagtgactaattttaatataacatttatatatgatcgaaatatgttaggaagacgaggggtaaagaatccatgcgcggccagatttggctgtgaactgcttaaacctaccataaaacattactattattagtacgaattttcccattggactccatcgtcctgcaaacccataactcgcgtctttgcagccaccatcgctgatgtccacacgccgttcacagctgtacccggtagtgaaaccaacgtttccatatgcactgccattacaaaacttattttgttgataattcttaacttctaattcacaatcaattcataatgagtgaattatatatatatatatatattatatatatatatatgtttctttttattttataaatttatactcgataaattaataacctctataaattaataaattcttccggtcccgagttgggagtagtataaaaaatgacataaatcgataaattaattagataataatttttttgaaagtcctatgtaaatatatggtccatcaatatcagaaattaataattgcacaaatatatcaactatatatatacattatatgtaagaaatttcttaaaaatatatttctgatatttttttgcttaaatttgtatatattcttatttgaaatttagttctaatattttactatatcaaaacatattggtgttgttttctatacatgatattattttttacttgtaattgattttagaaagatattttctataatgagaaattttttcaaagttattaaattatgaagatctctctattaatttattaatttatcgataagtaaaaaatctctctaaattaataaaattttgcagtcccaacattattaatttatagagattttactgtatatatgtttcttatacgattttattcacgtcctctttttttgttaggtgaattacgaatacttgggttgtcaaattgtagaataatgtatcacctagatgacgtattttgtttgaaaatattttgaaatttttagttattatggatgcatgatatgtaatatagagatttatatattgctgaaacaatttttttatttggttttggttaaagaatcttgagatatagaaacatacctgataacttcgagagtgatgttaaggacgttgaaatttatcggatcacgttgtagattttgcctttcggtgattgaaatgagaaagatacatatcgtcaaaaaggaaagttgtgacacgatgagtccactctttttaactttctttccattttcggaatcatcatctcctccttctttctctatcgtcttttgttccgtcaacggcataaataaagtgtatggaggaagataccttggaaacgcaattatattttactttttaattagtccaaagaagtttttatggaaaaacagagaataatgctttgtgaatatgatgaagggacattctccagtctccactacattgaagggacattttttttttactgaatctaaaaccatggacatatattctgattcactctatcaaatcttgtctagctaccacattctcttgtaggttccttaattaatggttaatatagatatatataaattcttctaagtgaaaacatcaaaaaattactcttaagtgatggagagttttatcaacttatatatgtattatgccttctttttatttatttaataaagatgtattatgactatttgttttaagttttccggcgttaatgtttttgtggaaagtttgacaagcatactactttttgttttgtttgttattttaagagcgtaaactaatttgtggaaaccttgaaaaattctatgaaatttgtgtttgtggtgaaaaaataaacttcacaatctcaattttttatattattagtattttttttgttacaagaatgatttaccgaaataaatactaattaatctccaaaaattataaattagcttggtattcaaactattcattaaatgtataattgccaagcatggttataacttaaatcttacttcctcaatccatgggagtgaatactttaaccaaatggaccacgttagatatgttaaaattaattttggttaataaaatatgctttcaattgctaagctgattaattggtggattcagccaaaagaatagcactaaaactaatgcaaatctatggttctaccaccccactcatgcatgattggcctttacgtagtaattaaaaaaatccttaaataaatcataaacgtttttttttttggtatggaataaacaataatagttaggaaaatgtttgcttcataaaaaaaaaaattaggtaaatgatttgataattttccaaactacattacgtgagataataatatgtttggtgtttctgttgtgaaatgtcaaccaactttaattcatgcggtgactttttattgtttctgtagtgaaatgtcaaccatttaatttcactatatctcaattgttttagtttaatgtattcgtaaaactgcacctatgtgtgcatgcatatcacctcatatgtgaaaattatgtcgaaataagtgcacctttcgatctaaatatttcgagttcatgcaaatgattcgatatatgaggagaggattgaaagaaacttacatcataagaataaagagtaccaagatagctggggaaagtgtagagaggtctactatagtttctccggtgtgtcgcgaattcaccacttgaaacaacgatccaaccaacttctcgtacgaactcattccttctagagactcagaggtccattcaaaggcgcagaagaaaagaagctgtattatcagaaaccctagcaccgtcactccaagaagaacacatagacgaaccgagagtagatgagagtatcccatcttattgtggttcttgagaatgtaaccatactcgtcacgctttgtgatcttataaagtccccatatgagcaaaaccaagaagcaagggaacaaagtgtttcccatcagtacttgagggattaggagccagatgagaccagagttcttgcgaaagatgatcatgttctcattcgtggggacaaatccgcagtttgcaaacgtggaaacagttgtgaagacggagaaagtgagaggtgagatttctttggaactaagaacatctctcgccgttttaacaaaatttacgtacacaagaagcaacacagagccaactaggttagtaacaagatggtaactaagaaccaccgagtacaagcacttagatgccctttcatcgatcttgataagaccctcgcgataatcagtaacagtctcaacgtcacagcgatcctcgatggaactgtccgaattataagatcccaaaatatgtctaatcttgttatgagggaagacgaacttggtgaaataggagacgtagaggttgagaaaggaggtgaagatttcgccaccgaggaacatgaggatagtgaggaagataagttgggtgttggagaagacttccatgtcgacggtagacatggaagagacggtgatggcagagacagaagtgaagaaaaggtcaaagtcatgaggacgtgaagtggttcttggctttgtgatcttgagtgccaaaaaccctaaaaaggagaagaacaagaagtagatgaagtaaaggaagaatagtgaacgtaatttagtaagctgcgaacggatttttgctatttttgccaccactctgtccattttagttctcgagtcggtttaagcattaatattatactggccataagttgtgtttatatattacatattacacgtacatggaaattgtcagccacatattacatataaattgattaatgatgactattactgatgatagcgattcctgttttttctttccaatttaaaagggtatttgtaagaggaagaaatatatagaaatacaatacaatacaaagtgagaggaaaaagagaagaaaaaaaatcgtctttattattgagatgtctattttaattcacgtggaaaagttctctttcttagtttaaatgaaaaaaacatccttctttattgtatgattgagtgattctttcgtctttatagcttgttccataataattctctcactgattgagtggattttatttttagcattgaagattcgatttcaatataaagaaaaggattcatccaactccatgttacttatatcctaagtagagagctataaaaatgccgagaacaaaaattataggtaaaaattgcatgactcaacttcgtagagaccatgcaaaatttgatcaaactcatgttatattgctcgtacatgcctgaaaaggtggaagaggattcgtgcaaaatagatcaaattctagatcaaaatgtaaagacaatttataaacgatgttgtaggggtaatagtttggataaacgaaattggtccaagaagaccataaattgatggaagtgaacggtcttcatggggaacaccactttttaattatttaaagagatcaacagtcatggtagtggttaaaagcggcgaaactacgtctttttggtattgacacatggagtaacatgggatgtcttagagaggatgcattgatctagggattcctagttcaagcacaatgaaagaggtgatgtccatgacacgaaggagaaaccatcgaaagggtatcttaaaccgtgttgaagaagaaataagaaaacagaagctgaatggagaactgaacgatcacgatatagttctgttaaaagggaaaaataaatgttcttggtcacagctgcggttagcaaagccgccgatggagggacaaaatgagatatggttcccatacgctactccaaagtataacaatacggttgtaaaaaacagagtcgcaacaggggagagaatgaggaagtggaattgtaatgtagattcgagctgcattttttgcaatgaacgagtagagacgagggaacacttatttttccactgcctatactcaaaaagatatgggaagacctaacaaggggaattttctcggacagattctcggtgagttggacagaggttatgaagattttatctgaaaaccttgtggacaaaacgaagagctacatacttcggtatgcactacagaactctatacactcaatatggaatgaacagaataggaggaggcatggggagcaatcatcaccaacggaaatacttgtgatgatcatagacaagaatattagaaaccgtttgagcacaattcaaggtggtggaggattgaagttcaaaaatggcatccaaatttggtttgaatcaagacaatagatatattagaaattctgtttttttaaaataactcttgaaaaagttagcatttcatatgtaccaaggttatttttcttttaaatataatttaacattaaataaaataaaataaacaatagtaattttaacaagaaaaagggtggtgttggtatttgaaaattgccaatttgtttaatgaatcattattagagcttgcaaaatggtgttatcaacttgtgaatcattagagcttgcaagttgttggcttatgttagagactttacaatgtatgccaaaggaggtatgacctcgatgataaggaatttcactgaaagtatctgctatttgcaaaatagttgatacaccaaacgttgacaaaataaaactatttgagaaaatataaatgaccatactctaagagcacccacattaaactatttgagaaatatagatgaccatattctaagaacatccatattagtgtttttaaatataaaactaataaaaataatcaataaaaaatggtgagtgttttttagttttagtttttgtctttaaaaagacattttagacacaaaaaagaaggagtgttttaaattttattactaattaatactaaagacatcttttaaaagttgtttaatgaggatgttctttagaccattttcatcacacaaaaaagttagtgttttcaaatttgtttttaaaaaacattaaaaaaaaaaaacaagttatttagtgcattcaacgggaaagacacgtgtcttcgctgttttcgcaaagacatttttatatctttaaagacattttacatggttaatgaatacctcaaaattaaaataatattgagaatatgcacaaaataactatgaatcttaaaagaattaacaaagtagctatggtgtcagagtacactcttttttttcacttgcaattacctttttacccattgtcgaattttatatgtattacacgctattttccaaaatcacatagaacacttagatgatttcatggcgaaaaacttttgatgaacccgaacaaaccaccactcatctctctttcttccaccaccacaaccaccacatcttccaccatcacaaccaccagatctctttttcgataaatctaggctgctaaacgttatttatattgacggatcatctctccctcaatttgcagaagatttctcattttattttgtttgattttgattctttcttggaatctccgtcgttatattttctttttaaattgtatgttattttcttttttaccatgctacttttgtgaattacacgttataattaaaaatctctttcaaacaacatgctattttttcatataacaaattattagttctcatagcacattataaaatgtcactttttgataaatatcgtgctatttattttgttcgactttgattttttattggaatttttgtcgttatattttcattttaaattgtatgttattttcttttgtaccatgctacttttttgaattacacgtgataagtggaaatctttctctgtcaacatgctattttttctcataacacattataaaatgtcactttttttttaaatatcatgctattctcatactcttgcttttggttcaacttgcgagaacatttttgtattttcttatgtcgtcataaggttatttactcacatacaaactgacaatgattacttacttcattcttttcaattctatgattattttctaatattacccaataatattagcttttataataaattatactaactacttttttaagagtgtacaccaatgtggatgtttttatgcccttatttttagttaccatacttagatttcgggcaaaagcccataagaccacccacatcgcatatattttttgtgtgtattctcatataaatattattaataaagtatgaatagtctttttaaatggaagacccatttttcaatgtgtttcaaaatgtcttctttgacacatttttggaaggatatctttcatttaaagaccattttcttattttatgaattaaatttatgtggaaatacatttaaactaaatgtgcaatgcggatgctctaataattttttatgttcggattagtctttaatatttttacttatacccgcagtcactcgatgtgatatttaaaaaaaaattagtatgtttccggtcgagctatccacttctggttaaatggacatatttttacgagaagaatttgaaatagaaacaaatggttgaaaatatgtacgaacacatcaaatttgaattacaagatggtgtgtatttttaagagtgttatgtgcacgaggataactattgtatgatagggactaggaaagggacacaatctaggaagtgatattataataatatttaaatcgtgatgtatcaatcacttgctagatggccacttttaaatcattaacatatttaaatctctttttaaagagaattaaattcgagtcttgataaagatgttgccaatagaggacgaacaaaatatgttcatctttcttaaatgcgtttagcactaaagaatccattcttttaaaatgttatctccacctaagtttgtaaatgaatttttatacaacaacttcggagatcttctaagagataatattattcagagccattaagtatcgaggaaaagtaacactaatgaagtaaaagttatattatacactaatggaaaaataaaaaagacgaaaggtcacttactcgtcgatagtaccattttaacttaagtgacctctcttttagtgtttttatatatatatatatatatatgtgtcagccggacctattactagtaaggtcacctgcgaaattttacaattttgaaaccctagttgcatgatagatttgaaataagtttgtgatggttttggtgctatgaattgttggccatggataataatgtaattaacacaatgacctaaatgataggtcaaagatggcgtgaattgtggaacgtgtatgcggacttgatgtgtttttgttgtattattgcttgatgaaactttttaactgagtatcaatcacttgctagatgaaatattattgcttgataataatatttaaatcgtgatgtatcaatcacttgctagatggccacttttaaatcattaacatatttaaatctctttttaaagagaattaaattcgagtcttgataaagatgttgccaatagaggacgaacaaaatatgttcatctttcttaaatgcgtttagcactaaagaatccattcttttaaaatgttatctccacctaggtttgtaaatgaatttttatacgacaacttcggagatcttctaagagataatattattcagagccaccaagtatcgaggaaaagtaacactaatgaagtaaaagttacattatacactaatggaaaaataaaaaagacgaaaggtcacttactcgtcgatagttccattttaacttaagtgacctctcttttaatgtctttatatatatatatatatatatatatatatatgtcagccggacctattactagtaaggtcacctgcgaaattttacaattttgaaaccctagttgcatgatagatttgaaataagtttgtgatggttttggtgttatgaattgttggccatggataatgatgtaattaacacaatgacctaaatgataggtcaaagatggcgtgaattgtggaacgtgtatgcggacttgatgtgtttttgttgtagtattgcttgatgaaactttttaactgagttctttactcaaatacctatgaacattgcaaattagcctggttagttactagacaacgtgattgagtagctaggaataggctgcacaagaatgaagcttagtcgattagtacgtagtagtttgttgagcgatttctttagttataagaaacctaaaaagtggttaaaaattacttaaattattttcatccacaattgcaataataagatcaattcgcctatttttttatttcattttaggcgtcttctcgtacatgataatatataaaataatttagggcagggcaacatcatatagtggacgtgtctctaattaatactatgagcttaaagataaatgcgtacttgtgttttctgatttctaatttgttatctgtcttatcccactaactttggagattagtggtccatcacaaatcggatgctacattcttcaaccacttcctgttctcttcattcatcaatacccaccaaactatgcaacatctatttatggagtattacgtgaatatcacttctattatcaattatttacttttcgacagtaaacactatacatgttattgtatcgaacttcgaatgactttggtgttgaatgagataatgcgtccatatatgactcctctatttccactaaagtaaaaaacttcacacaagcttaaagtaagtatccatcaacatacaaagatggtcaagtcctatcgaatacacgaatacgtagagcagagattgatagcagccattcactcgaattggtaatgtttatcaacagcaacagagacatcccaagtgcaactcattcctttagggaaaacaacaaagtcgcctgcttcgatctctacgccttcatcggatccattagggtacactttcacttttccttgtagtaaataacaagtctcctttgcactgtaagtccatggaaacttgcttggaggacaaccccacctgtaaccatcaatttcacatacaaagtaagaaaaatcttcatcaactgctttatagcaaatgccaaaagaaaatcaacactgagaaacttgagctatctagcttctacatatgacaaaagaaagaagctaaaagattgttgattgttgaatacacttaaacaaaaacagaaactagagcaattgcagatgacttatacagtagcaacaacaaacaaagcttctttgagcaaagaataaaggtgaaaactttcggtcaattgatgtaaagatttgtctaatttaaccacacaaatatgagttttagcaattgaaagttactaatgccatgaaacttgcttggaggacaaaccccacttgtaccatcatttgacccacaaaatatgaaaaaatgcagcaactgcaaataacttatgccatggaaatcgataatgagaacctgcagctctctggcttcaacatatgccatgatcatggagattgaattccacaacacaacaacaacaacaacaagctaaagactttcttctccgggcaacgaaaaaggttgaaactttcaattggaggtggatcaactgacgtaaatattgttgaatttacacataataagagataatagatcagttggagatcactaatggctttaacaaacaaagctaaagactttcttctccgggcaacaataaaggtgcaaactttcaattccagatagatcacttgccgcaaagattgtccaattaaccaatagtaacagaaactagatctcttggagatgacttatgccattaaaagcaattcactacgatactacagctatcaagcttctacatttgggattatcataaagaccagattcatcaacaacaacaacaacaacaaacaaagctagagactttcttctcaggaaaagaaaaacaaaggctagaactttcatattcagcaactaacaaatgaagaagaagaagggcaagtagattacttgggccaactacgaacaccgagttgggttagtttggactcaggaggattcttttcaattgtaatccctaatttctcagtagactcagctctaatcgcagcagccatggatgatggtcttcttgaattgtagggtttgtttgatcttcttgtgagatatggatttatgcttgttacattcacaacaccgatgcagcccatttttgctttccctttaacttagttgttctcagcttacaaaatgcaatagaaaactccattttaaatttttcattttctgtccaatataatcgtatagcatatgatccattcatgcctcatctcttgagttattagttacggcttagttagataatttctgtctaattatgaaattgccctcacatcttttgttattgacgaaagtgctccacatcttcgggtattttatgaattgctccacatatttggacttattcggaaatgctccacatttttatgtaattacgaagttgcacacatctttggctattttatttgaaactttcacttgtgaatcttatccatgaagttatatatataaatattagagataaaagcaatttcgtcttttttttcttcactttcacaaaaactattcataagagactacacaaaaactaacaaaaatttaaaactactctattatctaattacaaagttaaaattactgtatttttttaagaagacctcttaaaaagatgtttatcaaattcatcatgtatactaatatactaggtagtttatccatactatgtacggaatgaaatgtttttcatctgatactacaagttcaactgtaatttatctagagtagccattctcatgggattggagaaagttctcaaaacatgagaatcaattaggccgtctatgatccatgacagcataaacatttgtgtaaggtccaaaattaaaaagacctataattatttttttttgctgtaagatttgaaaaaaatcagaaaaagttataaaaagggtcaatatcaaaaaaatgtttaagataaaataccaacaaatttataaatataaaaccacaatttagttttgtgtattttattggcatggtctaaataaaatgcctattttttgttttgcctaaggttgtcaaaatgtttgagacgggactcagattaatcgtgaaacattgaaatcatgagggagaattggagcattttcttagtcgcatatcacatggattcttagacaaactctcctcaatttgattgtgatttctacaaacaaaaacaattagaactcaatttatgagttattttgactcttttcaaaataataaaaaaaaaaactcacattcttcattagattaagatgacttttcacacttgattcagaggattttctctttctttaagaggattttttgcatttgatcgacacttagaaaaactttgatttttaaacaacaaatattttttagagagaagcttattagattttcacaaaaaaaaatagttttcatgttgggcagggacaagcctaaaaccatgaatgattttaagaaaatactaatgtagagcaaaaaatggattctcgtagaaatgataattaaaaaactaaaaaacttaaatgggaacaaaaagtttttcttaaaaaacatttctaggaaaactaaagccttcaatattagtttgtaagtagattcagtttttccaaaaatctatactatagccattcaggattttacaaatttggtttttctaaatacaaaattagagaatccagtttttgagagattttatccattttcaaagaaaaaacttgagagattttaattcatttccgaagaaaaactcaaaactctcttctttgttttcttttcttcttttttcatatttcaatttttatgattaagtaaatgcattgtagtctttgttacaaaaattcttatattattgattaatatatgagatttatatgtgttaagaaacatgtaatatattttaaactttttgaaagattaattgctttttaattgaaattctgtttatttatttatgtgtaattgtaaatataagactaatgacaaaatctgtaaatatcctagtaaaattgggttgataatcgctttgtgaacgacatttcaccgtgacatttttgttaataatacgagaggataatatttttataaaaaataattattggattcactcctagcggtgaatctctactattcaccagctcttaagatttagggttcaaattttacaattcaaaaaaaattgtatatcgatttgagtttataacaacaaggtttagggtttaaattttataattaaacaaaattatatgtcagtttgggtttataaaaatgataagaatttagatttttacaattaaattgaattacatgtcggtttggtttatagagattttgtttcctgaatttgttgtgttttattattttaatttttatttattttaaatatagtatgatatgacatgttgtggtattttgattggtttgactaagagtatttctcaagtaatttataatggataacatctacttattctataaaattcatcatgtccttgcgacctgcatgaaatataggactcgtataacaatcttgtgaattttatcatctatctactttacatatttaacacaatcaaaaactgataacgacaacatcaaaattatattcatgagatttttcatgtgtcgggagagtctcaattaatttcgtcctttttctatagtgacattacaaatatttcgattgtattaatatcttcggtgtccctaaaaaaatcagtactagccacactaaaaacatgggacggcactatttacgagtactagaattatagcaaccacaactttctctctgttgtcatgtagttcaatgtgttattatcaggacgtacaaccttatttcatttacggcaatgttaccctactatcgttgttacgcgatggttttaaatatggacacatcttttatgaaacaacacatattcatctcttctttgttcatcatttagtttgagtttcaactatggaacttaatcatgattcgatattcgctcctgaggttcccactgaaattcatggagtcaaggtcatgagacaaacttcggatgctaagcttgctgaactcggggttacctcttggcaattgtcggtcttctttcctatacttttgatttcttttttttatttatataaatttcatttcaatggcataaaatatatagaaattagagttttaaatagtatttttatcccttaacgattaaaaatacataaaattatcatgggacactaattgccttagtattcctatggaatggaggtcaagagtcatggtatgttaatgttgatctaatttcgcaagttacatcattttctattactttaggattttcatttgtttttgttaaccatgagatttaaaccaaaatttcgacataacctgagaatcagtattcttatcatttaaatattgagtttgaataagaaaatgtggggtattgttggagtttattatattgtatacataaacatatgaatatttacataaaaacaaagagatgtgtcgattaaggaaaatacacatgtacgattggttgtgaaaagacatcacaacaaagaggaagatacgatagaaaaatctatttcttctccaaaattaatttatcagaaactcaaagtagatttgttaggattttgtaaggtgttaatacagagattgatagttgtatattgtaagataaacacccatagaatctacttacatcaaagtaggggcataattatgtcttaggagattgcgatatcgcaagtctctatcagcttacgttcattcacgtaagaagaagaagagatcataagtaaattattgttttaataattatgtattaattcaataacagaaacatagttatgtacgtgtgtgttgatttgcatctataatattggaacaacattaaatccatgaaggtaaaacaatgataaaattgacgatgagaactttccaacaacatcttgacttcttgtcccaataatctatatactgatattcatttagttaggtcctacaacaagaaatatttttgatttttgacggaatttttagagatttacgtataagtccgtcataaatgtttttatatagattttcaatgaatggatcatcaaaaatctttgaaagtttctgagaaagataaattcccgatcattaactagcaaattttgaaagattactcgtaaattgtactacatcacatcgaaacttttgttgaaatgtttctagcgactgccttttcatattgatcaaatgaaaccaccaagattgataccttaaatatatgctattgtgttagtctttccaaaaagaaaataaacgaagaaatatatatatttttgctatatggcaggtgttaagcctatgtgctcgaacattagtttaggaaaagaaactgaaacactgatcaaccttaaaataagttgcatttgaagtcatgagtcatatgtacatgtatggttgactaactaactgtgagatcaaacttaagcagatgggaaagcatgcctcgcaaatttccatggaaatttaagaagacagaaacaatgtacttcgtcgaggggaaattgaaagtgaaagtagaagaccatcacaaagaaggagaagccttagaatttgtggcaggggatttggttgtgtttcctcaagacatgaatgtttttgtcgatgtaattgaagatgtgaagaaacgttattatagagagtctgagattgaagaatctgagttaccttaaaaagcataaattaatggatttaaatctttttacttcataaggcagctagacctatataagtttgttttaaatcttgatctaatatatgtctttaccttgggatttggttcaaacctgtaattgtcttcattttagaatcctttaatttgtttcacaaaacaccattatgaggcaaaaacatattagaaacatcggccacaacatttaaaagaaacatattaatggcctttatgaaaaatgcccagttattacttacttacttttttccaagctttttatttttactaatataaaaatattattccataaataccacttaaattttatttgataattgtttgctaacaaaaaaatattttatttgataatttcgtttagtgaagttattatatattaaccaatttttttacgaagttattttatattaaccaattttttttaatcatcatatttttaacattttttaattaaaaggtaattgtaaagtaattatgtgtgggaatttttttaattataaagagtagaacatgtattaattttgtacatcatctacatatacatttttgcaggcattttgtgaaataaatcctggagttaagacttatttacaatggttaatactgaattttaattatttaattcttttttaattaatggtttaatttttttacgaaattaattgtgtaacaaaccaaaaagattcaaaatatatggcaatctcatatgtcacgcgaaacacaataaattattttttccttatctcacctacaatattgactaaatctaaaacaaccaaaatttgaaatttttgacttatttgtattaaatttcggcattaaattaaaacaaacattgtgaaacaaaccaaaatacatttacaatctcgtaaaatgagcaaacctaattatatagggaatgttccgtaataaggcactttgggaaaaagtttagacaaaacaggcactttccaaggttgagacacttttctttgtttttggagtgaaaatagaccattataccccaaataaactgaatcacgaaaagaagaataaccggtcattggttttggtttgtaattgtgtgtaccaaacacgtgtagaataatgggttaattcggatcaaatgaacgtggtaagatttgcagtttaaatagaagttaatgagaaataatgaccgtccgatcatataacaattaaacggacgagaagatggatttgtctgcaaacataactaacttgcgttatgttaggtcttcagagattggtttcacaacataactaacaagactttgatagcaatcttatgttttctgtaaacaattaataatagaactaagaatgttgtagtaaaaattgactgcttttcagtaataataaatatacatgttctagttatttaattttatgcctacctgattatccacaacatcgtgtagatccatatcttgatagagagagattttatactgaaagatataataatgatgttgtgaaattattatactttactaagacatatttacaaatgatagatagagtgcatcgatagacagttgtagatgataagaaatacttccattggagataacccaactttgggattatgtgtgggagatgattgagtatgttggtcaagtttggaactgatatcaaatactagatcaccaacaaaaagcgatgcctccaataagaagattatttaaatatctatccaaaaaatactgtccaatattacaaggactgtaaatcataaagataatttagtgtacatgtagaccttcatttgctcattagaattttttttcagtttggggatctttcaatgattgggatgcaggaagcctctccaaaatgttctgattgagttgaagtagaaatgaagatggtcagaaaaaccataagaaacacgaccttcaataaggaaaaaatgtaagaaagtatccaaaaaatcatgtccaacgtaacaaggagtagacgattaataaaatttggtaccccattgtaggtttgttgacttggatgttcccacttgtatcgaaaataggatctgacacaatgttcctaacctaaattttgtttttaaagtaaattagtcaagtaatgacttgcaaactaaggtggggttttaaagtaaggagtgtccaaacaacagtaccttcatgtttgcgtatgaatggacagatttctttggatgacatcaataacgatgatcacatgatgtgcaaaagcaagtctaactgatgtattcacccactcgcctaaagaaattaacaaagttaaaagtttgatattatgtactctaaggttttctattgactaatcacattataatgaccaattatatcaacacaaatggataagtcaaattactcttttacaacttaataccagacaatcaatgttgagtagcagtaagaacaaagttaaatcaatatcctaatctggccataggatcacctaaagctctagcatccaagcttacatattatttcttaaatcaatgatttgatttcttccaaaatgtaagattaagaaatagaacctttatatggctttttccttgaattatcaaacaccaagctgtgcagtcatgtatggtcgtggacaatgattttcaattttgtaacgacacatacgctgcaaacaaaatgtgtggttgtccattacggattgtccaagtgttgtagtccatatgttcatcttctgtccaatagagaacctcaagtactgaatttcaaacaaactgggcagagaagttatcaaacattatcacagaattacgaacaagatctccgaagtcaacatgacaaaactttaccttagttgttccgaaattcttgaacttttctcgaagtaacctcaattgaaattgaaattgagtttggacagtacgagttaagagtttttcaggcaaagtaaatccaaatcgatttaagaaattgcagagatttagaggaaatgacaagagaattgggtttggtgttttacggttgaaagagcaaacgagagtgtagtgtgaaaagcagtggtggtggacagtgacggaggagatggatatcccgtcgccggagtccccttttcgagaaattgtaatttaggattttttattggatttggatttttacgattctggaaaaaaaatttaaatcacaaaggcaactacaaaatcgtgggctccataaatctgaattggtttagtgaaaatggatttgatttgtttggttatagaaaaccgacgatacgagggtgaacaagtaattttaattattcaaagtgcctaatgatttttaagtgcctaattacggataaactttcaaaaaagtgtctaatcacgtaatattctcaattatatatgcacctaaaaactttcttatcttggtttgaatattccatggaattaaaagtccagaatcacaatcacaactaatatttaaacttataaaaagttaaaatatcatgagacaaaaaatatagcggaacgggtttacattgatatgaaatatagcagaacggatttagattgatatatataacacatgttaaatatttattttattattttatcatcatcaatgttttagttataacattaatataaaattatataattttaatattaaactaaaactataaaatttaatagtatcattatatataaataaaatatttgttccgtgatgtattacgggttaaatccttagtggtgattaaattctaaaaaaaaattcagttaccgccccaaaaataatttttaggttaatctgctaattagttgcgctaatttaagatttgcaccaattgcagttttttttctcaaaacagtaaaaaaaaacttctttgcagctctcagatttggtaaagttaccaacttcaaagaactcgaagagaccgtctctatagaaaaagctgaaatctttggcttcgttttcatcaattcgaaactcaaagttgtgaaaatccaaatgggtaatcattttttaacgttatctctgcttctcgtaacagtctgcgtttgcgtttctttcatcaccacgaagctaaaccctaaagaagcaatcgtatctgtctcttccgattctgagattcctactgaaattcatggtgtcaagatcttgcgtcaagcttcagataccaaacttgctcaattaggcgttgcctcttggcccaagtcagtaactttctcatatctctctgcttctttgctttaatggcgcagatacagaactagggcttagggttttcctcaatggctttacttgttagtgttgatccaacctgaggatttgtatcatcaattttacagaatctcaccactgttagctcaggacatttcctgctgcaagaatctgtttacatatacttgtgtctgagactctgaaacagacaagttcacttgtgtctgaatcatgtaatttttgtgttagtctctctacaaatgattgattcttaaattagacgaataaaccagagaaaaatgttatacattgcatttatggactgagttgtgatgtacattgagtaggtgggaaggtgctccaagcaagtttccatgggagtttaagaagacagagacaatatatttcatggaagggaaagtgaaagtgaatgtagacggatacgacgaagaagaagaaacctttgagatagggaaaggagatgttgttgttttccctaaagatatgaaagttgtttgggagataactgaagctgtgaagaagcaatatagcttagaggagtagtgactttgtagagagaatttgagtcacattgatgtttgtttgttgtacttggttactactttgaactaataatatctatggaattgcaatgttgattaggattctgattatagaagtaagaaaactatatattatatacaatttaattaggaccccaacagctcaagtacatgactgttctaagagattcttcagccttcttagccttctcgctctcaccagaggaggtaacggctgcggagacagaagacgaagagaaccttttcccttgagaaacagatctaacgttgttccggagatgttgattaaccgaccggagtatgtagttccaccgacaaagacctagttggtcttttaatgcctctacggctccgatgctcactgccactgtccatgctttgcttgtagaactcatctttcttcagagaattaaacttctttgtgttttgtgttttgtgtattgagaattgtttttgttgatgatgtttagaaagtgaagtgaattggtgtgtttatgtaagagagaagaagccaacaatattgccgtgtagttggagttaaaactagaagctgtggccgttggttttggttgtttactactgtctggatagtaaaatgacgttgttagccttttaagaacgaattggataaggggtaatattgggattctggtagttcctggattaacgagtgccgctatcatgtgcacctggttttgagattgttcacttgtttgggtttcgtgttgtgtccaagttttgaaatatagtaaatgttttctttatctccttgtagaataatgcatgttggagatgaataataatataatatcaaaaatcatttgccgaccaaaaaagtaaaaaatatattaaacacaaaatgtaaataaataaataaaaattcaatcaaaagaaaaatggttttgcgatgacttactttttttttttttctttctttcatacagaagatgaataccatttaacatgagtattcaaaaaatcaaaagtaaaactagtatcatcaaatatttccgctaaattagtaaacatatttccgctcataacaattagaatgagaattttagaatgttggttctgtgacaaccacacaaatttccgagtttagtagatttggaattggtgtttttctttgcgatttactggtatgcgctcttgagcaatcgtatacaattagagtagtaatattattttacttttctgtaaattgctttaatccgttctcagttctctttataacttctgtcaaaaatttaaaatgatataaaatttaacattttactaaaaaaaagagattgtaaaaaagaatatagagatttgttttattttatcctttaatcagtcattttataaataataaatttcgtttcaagtagtacattaatttttaaaatttttatagatttaatatacagatcattctagtatacacaaaaattaggatctatattattatttaaaaaaaaaaaaagcagctcaagtcgatgaactaaacatgggcaaaatcgtcattgaactaaacattcatagtttcagcagaaaccaagaaaaccagcagctacaaaacccactttttgtctgcactttcaaactccaaaggcacggcactttttgtctgctttctcttcttttataaacaaaacccactttgattcacttctcattcatcatcaacaaacacaaaatcgaaaccaaatcacttaaacaagaaagaaacaaagagaaatgagctctgcaagcaaaacgtggatggttgctgcaagcatcggagccgttgaggcattgaaagaccaactaggcgtgtgtcgttggaactacgtgatccgatctgcgaatcagtatctacgcaacaacttaagatccgtgtcgcaagctaagaagctctcttcctcatcaatcgattataccaacaagaccaagcaagctgaagaatcgctgaggacagtcatgtacttgagctgttggggtcctagttaatggacaatggagggatttgaaaaccctaatcatagagttttgataatgtctcttttagggtttaaaacccttaaaaaggttaaaaatgtatagaatttgctctgtaaagtgactcttgagtcttgaactaatgattaatctcttttcataagatttgttcaaatcggatttttcagttactgcaactaagtaagaaagacttaaactttgaatataaatacagagaatttggtacgttgtgtgtgacaaagatttatttctgttgatataattaggaccctaaattggaggtttgttacagtcaaaagtttgtactgagtttttactacaagttagggattttgttaaatgcttatcccatttttcatgcagttctgttgctaattctccagcttaataaagagaggttaattttgtttggtttatgtgtgtgaacatttcttgtctgagtaaagatggctaatactccattgatagtttcctttggtgaaatgcttatcgactttgtccctgacacttctggtgtttctttagctgagtccaccggttttctcaaagcccctggtggtgctcctgctaatgttgcttgtgccatcaccaaactcggtggcaaatcagctttcatcggcaaggtttgtataatttatgttagaatctattaactgatggtgaaaagtgatatgtgattgtgtaatgtcttttatagtttggtgatgatgagtttggacacatgttggttaacatattgaagaagaacggtgtgaacagtgaaggtgtttgctttgataccaatgcaagaaccgcgttggcctttgtgactttgaagaaagatggtgagagagagtttatgttttacaggaaccctagtgcggacatgctcttgaaagaatctgaactcaacaaggatcttatcaagaaagctaagattttccactatggttccattagcttgatctctgagccatgtagaacagctcacatggctgcgatgaaaaccgctaaagatgcgggagtcttactctcttatgacccgaacgttcggttgcctctttggccttctactgaagctgctatagaaggcatcaaaagtatttggaatgaggctgatattatcaaggtatgtttgtttttgttgtaacaaccggactcgtgttttcgatgatcttagtgttcgagtttcgtgatgtgtaggtaagcgatgatgaggtaacgtttctaacgcgtggagatgcggagaaggatgatgttgttttgtctcttatgcatgataagcttaagctgcttattgttactgatggagagaaaggttgcagatactacacaaaggtaagggatcaaattcgacatgattgtgtgtgttttggagttatctaaacaaagtttttcgactgtcgaaaagcgcagaaattcaaagggagagtgcctggatacgctgtgaaagcagttgacacaactggagctggtgattcatttgttggtgcatttcttgtctcattgggaaaagatggctccatactcgatgtacgtataaccaaagacgttttcagttcatagataaggcatatgaaattgagttttggtgattgagtaatgtgaatgttgcaggatgaagggaagctgaaggaagcacttgcctttgcaaatgcatgtggagcagtgtgtactactcagaaaggagctattcctgcacttcccactccagctgatgctcaaaagctcatgaaatctaagtctaaatagtttcaatcttgttctgttctgtttctgtttcttcactcttgtcaatttccttggttttcacagagtattttctctgttatctgaataaatctagtttcaagtttctgccaaaattgattccaaactaattcatataccttgatttttaattacatgactaatgttctataacaaataatcaagaggctctataatataaagaaatgaacattttattgcatatagagaaggttacagagattttggtagataggttacaaaacatgacactccatttagcttacacaatatgaaactcaaaactcttggatttataataactctcttcagactcagaaagtaatatatagtttcttcaatatcagagttctttggattcagaagagctgatttttgcagtttggtcttcttcagctgcaatgttaacaactcttggacccttaactttttcaggagatagtttcgtgaggttaatagtgagcacaccattctcaagcttggccttgactgattccatatctacattatcaggtagcttgaactgtctccagaattttccatatgatctctccactctatgccattgatctcctttcttctcttcttctcttttcctctctccactgactcgtaaaactccgttctcctccacttctatctttacttcatccttcttcaaaccggggatatcgagcattatctcatgcccttctgctgtttctttccagtctactcttgctggagacagagccacgcttgtgtccctctcgagtcctaatgggattctctccaagatcttgaatggatcagggaaccggtctagccagagatcggatagcaagctgcctggagtagtttcaagtgcagaagacaaagacccttcacttgttttgatgtttccaagcaacaaagctcctatgaagaagatgcttagcaagtgcttcatcatggttagtgatttggatttattgtagaaggttgaaaccaaaattttaggcttttaacttcactttcttattttgttttctatgatggttagtctcaattctctggtgtatatataatacacattgtatgaagaatgaagaagtttcttgaaatatctttcttttggtagagttttgcagagagagatattgagattgttctagcttttttggctgtgacttgtactaattatgttactacacgttggataagtttgttgtgcctttaagggtcttctctcatgttccagagacttcatgtaaaaactatggattggattgggccttaatagttatttatatccaggcctatttttattggcccattatgatatttgggaccaattctgtttgtgatgagtcttagaattttggctgctgcatgggaaaggaatgggagagagtttgaatgatgccatgctccatttcagtttctgacaacattttagagtttttgacctctattgccctatggctagttacttttaattccacagtctttatgcatattgtggtcctgcctttacttttggcttgccatgcttgtgtcttaagagaagcttgtcgctatgtttgtcaatttatgttttcaaaagaaagtaaaactatacaagcttctgaaaaagatcttgtcatggagattttggtaggagaacatttattggtttaaatgccacccaaagttggtctaataaccccatattgagataaaaatttcgtcttcgacatatcgttgtatatctatatatagttctctcttttcatgaataaagatcatcaattcctcttggtatcagagccaggttttgatataacttatgatcccaccacacatgtgaacttatttaagcttgttctttcttgtttcctatatttagattcactccttgtcctaattctcataaatgtcaaagaacatttgttctgtctgtgtattggcaatttacattgatttggattataaagttgaaggatgaagatacaatgtgaagtgtgtgaaaaggctgaagcagaagtactttgttgttcagatgaagctgtactatgcaagccatgtgacattaaggttcatgaagctaataaacttttccaaagacatcaccgagtcgccttacaaaaagatgcagcctcagccaccacagcttctggagctcctctatgtgatatctgccaggttccaatctcttttctctttaaacactcgctgagctctttaaccgatgtctcatatatatgtatatgcaggagagaaaagggtacttcttctgcttagaggatagagcaatgctgtgcaatgattgtgatgaagccattcacacttgcaattctcaccaaagattcttactttctggagtacaagtttctgatcagtctttgactgaaaactccgaatgcagcactagttttagctctgaaacttaccagattcagtcaaaagtgtctctgaatagtcagtactctagtgaggaaactgaagctggaaactcaggtgagatagtacacaagaatccttctgtaatcttaagtccttagagatatacacacaacatcatggttccggagccattgatgtttaataataaaagtttctgtaatatattatcttacacagaagaaaaacttgttgaggaatcaaatctttttgttacaacaaatattaaaaccatgacttaacaactaaagtcagtggtcatggcatcgacacaaccaaagctaagttgttccaatagtttcaagaattgtagaaatgtgaatactatttgaatcgatcttagatatataaacaaaatttaaaaaatgaataaataattattgattaaatataattatttatctcaaatatcaagacttggatagaaaatgcataacttaatgagacagtcatagattactactattagctcttgtactttctttttgcctcactacaagaactatagaccttgttggatttgaaccaacgttggaacataactgattaagaagtgaccattgagattcttcctcatcatgatccaattgtatacatttatcttctcccacaacgtgtaaaaaaacgttggagaccccatgcttaccacgacacaccaaaactttgttctcctggtcgaccaaaaatttatcccactagcaaaccaaaaaggcttgtagaaactttctccatgacgcggctccggtaccgtcaatcttagttgcaatccctacatgatacatctatatcgcctactcgcatgccacgagtagctaacatacaacatttttgatcttctctagtcactgataaagtgataggatgatgataaaaaggatgatcacccgggagagacacacttgtaaatctctctattgaaaaatccaaacaaagtaagaattccccactttctatgtcttgcgtgcaagcaagccagtaagtatttccatttacagacatgacatgctcttttaaccgtggtccgtggtatgaaccagtcgctatcttcaccaacaaatctccacgaattaggggtaaagtcatatatttcatacctaaacaagactattgattactgaacaagttctctatagtgtacaataaacctggaaaaaaagtttgattcataatgggatgttagactcttgtagtcttgttaatattccaaacctagtggtataagatttttaatcagaaagaacatcaaattcttgaaaaatgatctttacaatgctagtcaaggaaaactaaatagatgactgctccctgattcttgatcaaacaaaactttcactttcaatcattgacagtacgtaacttaatattttctggcatgagttcatttatatctaaggccaagtccaacgccacgggaaaacgttaaaataacgtgggcatgtttactttttcactccaatcagacggtataatttgcactataatagtgtgattctctttttttgtacagtgtaacactatatttgatgcactactgtagccacggcaaatattaaaataataattttttcttttgtgttaacattattatatattaaaatagcttatttagttataatagattatatatgatttgtaatgagatttaagtaatctaactaagggttgtaactaaaaaataatttataagtactatttttgtaatctttaatttaataaaatgatggattagtagaaaatattaaaactaataccgaagttgattgaaaatacaataaaataaattatacatttataacataattaaaaaattaaaaccacacaaacataaaaactaaatgcaacaagatatgttttaaaaacataacaaaagcttcacaaatggttaaggaaaattatttccggttccgctaagataattataatattgggtaaaatcttcttggttatttggtgatcttttgtcttcaccttgatccggttctccttgaacttgttttccatgaaatagactttcttgataatgagatgctcgatattgagatccatgatattgggagccttcaccatcttcttcatgttggtttgtttgtgctcttttttccaaaattctttttctctcattttcaacatatgcacgagaggatggatcacttatagaattcaaatctgcaaataatattttattctcttctttcattctagctacctcgatcttctgcctttgaatttcatttctttcagaagtacctttagtaatagctttgataagtttatcattttgctccaaaagttgtttaaactgttcttcagattgttgttttcgctttgcttttttcaaacccataggccttgaagataaactaaaattggcatcttcactatccatatttagatcaattgaattcataccaggggaaggtgatgactcggtattgattgaaaatgatgaagatgacgtaacatcacgaccttctccttggaatgcagggggtgtcttcatgttatcattagcaaatttctcaatacctttaagaataggccatacatgatcaaatttgaatcctctcttgtatttttcatattgagttaataacatcttcgcttggtttaactgattacatatttacaagaaacaaataaaaataagttagcatgtacaaataatttaataaagataagttagtaaacacaagaatttataattgagtacttacaatgtcttcttcagaagcaccgctaggatttttattctcaatttggttaacgcatcctctcagctttgagactgcagaaagaattgacgtcattcgagtttgtaaagatctttttggtcttcgttgaagacgaaaaggatcggatttatgatactcagcttcaactcttgtccatagttgatctcctgattggtttattcctattattggattttgggaaacatcgagatacacatgacacaattgtatatcttcttgaatagaatatgacaaaaattgtaatattatgttatattaattaatgaagaataaaataatatgttgtgtttaattaaataatatattgtgtttctttattttgtattaaatttgtttaatgtaataatttgttgtctaacatttgtttcaatattattaagtatttttaaagtattcatattttaggttaataaaataataatagagaatagtatttttagtgtgacttttggtgttgtggttggagatgaaaaagaatttagtgtgaaaatcacaccaaatatagtgttattctaacaccattttagtgttgtggttggagatgcccttagggcttatgatctctccttgcatgaagcctctgcagcgacctcctccttcatagcacttaactacaactgcatagtaacaagtaacaacaaaaccacacgtttacaaaaaaaaaaaaaaaaccacataaaattatatttctcgaaaatatcgaaattacacaatttcatccagcacaaagatcgtaatatttcattgcttttattagtcattttttcttacaaatcgatccaataaaataatccttattattaccacacacaagaatcaaatgcatgtagactattgagcctaatcatatgattaagcgtaagttctaaaatatttctaaagtacttaagagtgttaacaccaattaatgtttttctagagaactatatctatataaaaaaaaaagatttgcatatgattaaaatttagcttttttttgtctgaataaatttttttaatttttagtggaattttctatcgattatgagataaaaaatagtattattttctaaatttggaacataaaaatagttcttctttattcccctttctaacaaagtcgaacaagttgaataaaaagatataaaaatgttctttaaatttctcttaagtttttttttcttcgtactaagaaacttattctcatgatttttctgatattacaattttagaataatggtaagcactatcaatgtttatttacacccagggcctccatatataataagatgaccgacatggctccaaaacgtctccgttgcatctctcactttataacaactgtctgaatacctctctgtgtttttcactgttttgtcagtattataattttcgtccacagtcgtaattaaacggacatatgagtctactttggggctccccttcggataatgactattccccattggaggatttggaggcgaagggctatagacttcaccaccccattcgaccattgtaccagaactttctttgaatctgcttgatggccaaaacccaacttcttcccaagatgtacccatcaacaaccaccaattcccgttgattttgtcctgtactcaaactttaaatatcaacaaaaataaaaactaggagaaccacgagaacccatacatgatctcatttttgttaaactataattgacaaaatcttcactggatttaatttatgtattcttttaaaaatctaatatgaataaatgaaagttagttatatatgttggatgggatacaaataccctaacactaaattttctttacccatatccatattcatatttgcatgcatctacatattgatattactagacatatcatatactcaaacgttcttgaatacccgaaatatacaaagttatgggtatactagttggaaaagaactgaccttcattatggcgaagtcaatacttttttgctcggcaagtagaccaggagttaagtcttgacgaactagtatcattccggatccgtcaggacagaagagattataacacgcatttcctcccgactgaattcaaccatataatatgcgaccataagtcattggtttatcaattatgcatacatcgtgtatatatatggtataattaaattatataaaaacaagaactagcccacttacttttgtaaatacgaatatccgagagttgaagtcatggtataattgtgggtgtacctaaaatgaatagaaaatatgattcatatacattaataatagaaaaaagatttactataatacatcaagtataaaaaaatagtggatctaaattaatattgacttacgatccaaccaacttggatgaattcatttccaatttgaaaatgcatccgagaagcgctgaattgcataggtccaactgaaggagtgaatgtattaatattcatagatgcaccattgtaactcctagttcctttagtagttcgcaccacagcaaactgaatagtgaatacaatggttgagaaaactaacattctgatatggctaaattgtaatgctgaaaaattagaatcaatatcttataaattggtatgagtaatttgagttaatagaaaccaatatttttcatgtatcgaaatataactgtatgagttaatagataatattaaattatgaatacaatatacaattacttatgtttcctagtatatcatccaccatatatatactcgccatgaaatattaatcaaaaatttcacgtgtttgtaataaagctatgtattattaacataaaaaaactacttaaatatttttgtattcatcaaattaaaaagaatattttaatcattgtttaaattaataattatgtgctaacatagtcatctataatttcagctattccaccaatcttgttattgcgaagttcagtaatatatgtttaacatttcttactcgtaagataacaatttaaagaaagcacttacatgatgatcgtcaatagaagatgcaggtttataggttttgctccacgaactttgcggattagaattatcgctatcgaaggatttcattctcaaaagagcgtctttagtgactcgaggtataggaacggtaccaatgggacaacctacgccattctcccaaaagtggccaaatgttgtgtttctatgtgtctttcttttcatttttgatccttcagagtatgacatacgcatctccacatcaaaatccaatataaattattaattagccattccaaaattaaattttattaaagtactcttcttaaattaaactataaaaaggtaaattaaaactcaaaagtgatttttttaaaaaatatggctctttctaatcaaaatagtgtatatgattatctatacttcatattaaatataaaaagaaaatttggtcattatatgtttatccaatatatatatatatatatatatatatatatacatttggattttatctttatttttaacaattatgggaaaccaaactaattaaatcctaaacttaaattctaatctccaatccagtggacacaaaaaaaaattacttttctattaataattaataaaacaagaaaataatcctatcttaattgtcacaatattgccaatacttaattaccatctattctaaatagagttgaaatcttctaaatatcaagaaaaaatatattaccaatgcaataccttatggtgaaatgtgtggttcttcatggatgagtggtcaagtcctggttgtttgtagaaatccacacacccatatcgttcaccattaatagtctgtgaattcatatataagaaaatatattattttttgcatgatttcataaatttcatcgtctttctattatacaaatcctagaatacttaggataggtaatttaatgttatatatatataaacacattcaattattctataacatggtgagaggataaacctttacgattttaaatgcaggtttgttgataagcttaagtttgtgctctatttcaagatcttcattactttttaatgtctttgcttcttttataacaccatggcaatgactcattagaaggctcccacaaataatatagcatgccaaaatcatgcacgtcattggaagtgcacaccccaatttcattttcattaacctgtgaactagagaaatttgataattagtttttcttctatatatacagttattattgagatatagtaataggagaaagatttgaagaagtcatttgggataatcaccttctcacaagaaatgtaatatttctgaatgattcactagagtagaatatacacctagctaagggttagaaaaaataattaatacatatacgtttccttaaattccttcaaacctaaatatagtatatatatctttgaaccatacagaagtcaaacaaaatttcttcttaaactaagtaattactaatttccatgaatgcttttaagagatttattgttatttttgaccatgcacaagtcaaagatgacataattatttgtggaccatacaagtcaaacataatttcttcttaaatttacatcgatatattgatgacatttattcatatctttaatgctaacttcttaacacaagcttggcataatatttgtaacttttcctctaaaaaaaatctgaaaataagaaatttattttaagtatttgtaatacatttctatgtgtaaattgaagatagtatttttttctcttgcatttataatcctattgtataaattatatttataaataaattaaaataagaaaaatgtactataaataaaatgatgtgacataatcaatgtttgtataaaactaattgtgtgattattcagaatgacaaatgaaaataataaataaaaataattattcttagattttccttaaaatcataagtattttgtttctttaatttctttaatttttgattttaattgagatttatttttaaatatagtattagggtgggcgtgcagtttttcagtttagtttcagtttgttttttttggttttacaaaaaacttgaaaccataaagaaaccgtatgtaattaagtttggttatggttcggttttacaatttatgacgggttttcagttttgtaaaaattgaaatcatataaaaaactatatgtatcttggtttggtttggttttggtttgggtacgggttttaaggttattccatgtattttacaaaaaaaaagtataagtttgatgcataaataaaatgaaacgtagaataaaaataatataagaataatcagatattactaagagatcactgtatataagtctagtaaagaaaaaatccaatgatactctaatcataatataaattggacaatatattagtatatatggttattcttaattttaatcaaaaacaaaaaaaaatcatttggtttttaaccaaaccaaacctaaaccaaaaacttaagaaaaatgataaccaaatgagttttaagaaaaaaccataaccaaataaaaccatttatttcggttcggattgatttttcaaattttggttattttgcctaccaattacatggtatattgttatattttgattcacctcaaataatccggtagtgagatcaaacttgactttgggttaagtttaatcacgggatcatgatcaagagtttaattattggaccaaactcaaaattaactaagtctaagttctagaaaaacttaagagtgttaacacaccaagtaaagtttgtctagaactatatctctatagaaaatattatatatctttaaggtaatgtagtggaattttctaatgatatatgatgtaataagtaagatgtttttaaaatttggaacatataaatagttcttttgtcttctcctttctaaccaagtcaaacaagataacaaaaaaagaatataaagatgttctttaaatttctttacgtttttcttatatatttttattcatagtaagaacgtaattctcttgatttattttgaacattttcagatactacaattttggaataatgctacgcactaacaaagtttatgtacacctggggcctccataaacgataagatgacctacatctggccaaaacgactctgtgcatctttcactttataacaactgtttgaaaatctctctgtgtttttcacaaccatgtccaaaccataattttcgtcccaagtcgtgatcaaacggacatatgagtctattttggggctcccttcggaaaatgactattacccataggaggacttgtagacgcagggctatagacttcaccaccccattcgacacctgtaccaaaactttctttgaacctatgtgttggccagaacccaatttctttccaagttgagctgctactgttacccatcaaaagccaccaatgcccgtatattttgtcctgtactcaacaaaatccatatagaaaaccaagtatcgttagctcaattggtaaagaccctaggcgaaacttagaggtcgccgattcgagtgacgtttgggacgaaactaatgttaaatgatttggctttgggtctgagaagattatgggtttcggcccagaacctcatggatttcaaaaaaaaaaaaaaaatccatatagaaaaggcaaagattatagacaaaaagcttacaattaattttaataactatttttatcaatgtttaattatttttatgcaaatgtttttgcaatatctaatatgaaaaagtaaaaagtaagatatatatattgaatggaatacaagtaccctaacactagatctcaccaaaaaaacactaacactacatatccatactatacttaaaaatacctaaaacacacagagttatgtctttaatagtttttggaaaaaaactgaccttaattatggagagttcgaaatcgttgtgcttggtaagtaaaccaggagtaacttcatgactgactagtattattccggatccgaccggacataagggattataacacccatgtcctcctgactgaatccaaccatataacattttgagtataaatcattgatttgtcaatcatgtataattcatatatatggtattaaaatattaaaacgagatccagcatgcttacattagtatatatgaacagccgtgagttgaagtcgtgatataattgtgggtgtacctaaaatagatagaaaatatagttcatatacattactaatagaaaaaggatacaccttagtacataaacggatctaaataaatttacttacggtccaaccaacttggacgaattcatttccaatttgaaaatgcatccgaccagcactgaattccataggtccaactggaggattgaatgaattaatgttcatagccactccattatatctccttggttttcctttcgtagtacgcaccacagcaaactgaatacaatggtacataaactaacattgctatatggatatattgtaatgtgctcagaaattagaatcaatttcttataaattagtataagtaattagagctaatagaaaccattatatttgatatattcaaatataattatattagataatagataatattaaatgatgaattacaatatacaattacatatgttttctaatatttcatccaccataaatatatttacaatgcacaaaattgtaattaaaacattcccgtgtttcaaataaagatatatattatttacttgtttaaagctctaatctatttaaatatatttttattcatctcatcaaagagaggattgtaattttttttttaattaagaattatgtgcaaacatattcatcaatactctatagtttcaaaccattctatcaatctcattattgcgacgttcgattatatactatatgtttgaaattttttactcgaaaaataaatgctataagaaagcacttacatgatgacctccattagaagacgtaggtttataggttttactccacgaactttggggattagaattatcaccatcaaaagatttcattttcaaaagagcttctttgctgactaaaagtataggaactgtaccaataggacgacctacgccattcttccaaaagtgaccaaatgttttgttaatatgtgtctgttttttaatttttgatccttcggggtatgacatcaaacgcatctgcacatcagaatcatatataaattagtcaaacaaaaataatatttttataaacttaattttctcaaagtaacttattgaaatattactctcattctaatcaaaatacgtaccatttaggattttaattacttataatttatattaagaataataagaaaaatttgtcattatatgtgtatctactatccacttttgttaaaattaaggtagttacattattagagtgaaatttaccaaatgtcaatatatatgaataattgtaataaagaataatggcaatgatctgatatattatcatattaaaaattacgagaaagcttgatttctttatgtatgttattttgttatatagagttctaacttatcatatgatacaaaacatattttagtcactatattgccaatttcttaattactttccctttatttgtttttacatagagtttaaatactctaaataagaaaattcatattattactgcaatataccttatggtgaaatgtgtggttcttcatcaatgagtggtcaagtcctggttgtttgtagaaatccacacacccatatcgttcaccattagtacactgtggattcataaataagaaaatatattatatgttttcataataaatactaagtgtttcacgcatgatttcataactaaaatcgtgtttatactatacacatccaaggatactttaggatcatatacttacgataaagattctaatgttatacatatttaaacacattcaattattctataatatggtaagaggataaacctttatgattttaaccgtatgtttgttgataagctcaagtttttgctctatttcaagatcttcattgctttttaatgcctttgctgcttctacaacgccatgacaatgactcatcaaaaggctacaacatagaatatagcagaacaaaatcatgcacatcactggaagtgaatatcccaatttcattttcatcaacctacaaaatagagaaatgaaatcattagttattttttttttaatcaatcattagtttttgttatatgaatacaattattattgagatatagtagttgaagaatttttttaagaaatcatttgggataatcaccttctccctacatatataatatgtctcaatgattcattagagtagagtatacacatatatatagttgtacacccagctaggggttaagcaaataataaattatagatagtaattatgtttccttaaatcccttcaaacctgaatactttagtagaatagtaaatatttctttgaaccatatacaagtcaaacaaaacaaattcataaaacaagtaatttccatcaatacatttaagagatttaatgttctctttgacactaacaagtgaaggatgacataattatttgtggcctatacacaattcaaacataatttcttcttaatttaagtaatttccattgatatatttatgaaatttattcacatctttgaaactaacttttttacacgagcttgacatattatttgtacatttagaaaaaaaagaaatctaaaaatgataatattacttaagtatttgtaataaaaaatatatgtgtaaattgaagatactaaaaatttctcttgcatttataatcctattgtataaaatatatttatcaatatattaaaacaaaaaaagttttataataaaatgatgcgacattattaatgtttgtataaactaattgtgtgattattcataatgaaaaatgaaatagaataaaaagaaataataataataataataatcattatatgagagctttagacactcaaaattttgtagtgatataataaaataaaaaaaaaggaaaactaatatttgtgtcaattattttaactatagaaattaaattagaaacttagattgacagttactatttttatcaggtaaaactgtgactttccgtaaaaacgaaacaaacactgaaaatgttaacctttttatttcttacattcatggtccgttgagggagtagtggaaagttttgtcgatgttgaggtgataagtaatttcatatcaatacatatagtgtattggttatgtggttaaatcgtatttttggttagagatatttgtttgttcataattacatgtctatgcatatccctattatcatgatacttttatgtcatactctagcaaaccaagttctcttagtgaatcatgttcttttggcgaacaaagtctttctagcgaatccagttcctaaaagatgttcgatttttgtgtgcaacgataataaaggttatgaagtccattataagtgatttttatttttattttattttataacatctaaatcgacatgataatcagaaagtgtcttggtgcattagtaaagtgcttcttagcaaatctctcaaatttaatcagaatattccatcttttggatgtagattgtaatcgtaccaaagatcagggccggccctgagattagaagggctagagcaaaatccaaaatgagggccaaaaattttcattaccatactaaacaaaaagtacaaaaccaatgataaaccgtaaatgaaacacaagtttttctaaaaactgaaactacacttgctactcatcatcatctcggatttcgaaaatagatcttcttgcagtttttgccgcaaagtcgttcatcaaacttatatagtcgagctctccaactaaatctctttcaattgacaatatcgccaaggcattcaatctctcttctgacattgttgatcgtgagtatgactttatcaactttagcttggaaaaacttctttcggctgaggcgactgaaactggaactgttagcatcactctaaacgcaatccatgtatttggataacaaccttcaaactttttcaaaaagtttaacacttcaatagctttcgtgatctcggtcggtaaaagttcttttaaaactttcagctctaagaataaatgattcccatcaacgtctgaactatctccatgtttaagagaagtttcaaggtttatacatgctgcctttaagccatcatcacttgcagatttgagcttccttagatcaaacaaaaatctaaaaattcttccatactcttcaaattgctcaaacctcacctgcagatactatagcttgatctaggattctaaggaaaaaaatcgactttaaaattctcttcctcgctaagcaattcagtttcaacatcattctccatctcttcatcaaaatgccttttccttttaatgatgcgctttcttttcacaggaaattttggttcgatatccatagattcagcaattaatgtagcttctgctttagcttcttgaaaaccagtttctctgtaattttgtagataagagactaaccctttcagttgaacaagagcaagttcaatatcaatattctctgactgtagcgccttacttactgtgttcatggtaaaaagaagattgtaccaaataaccataccaaacaagaactcaaatccaccaattctgtgtgtctcacttgtagcaaggcagtctgcatcgctgcgagctttcgggtcatcacaattttcagccaagtagtccaatgcatctcttatttttaggcctgaaatcgaatggcccgaacactttcaacgcgactttcccaacgagtctcagataatggctttagtgtgagacctccaaccatctctttaaaaagtttccaccttgttgtagatgatgaaaacaagcagtaaatccgctgaatgattccaaagaattcaatcgcttttttagatgacttggcaagttaagactatggcaaccacacggcgtataaaacgctcttgaattgatatcaagcaactttttttgtactcctttgtgtttccctttcatattgcatccattatcatagccttgccctctcacatcattaatattcaaattgagagcaaccaaagtatcacaaagtagctcaaagagtccttccccggatttatctgaaacttcaacaaacgttagaaaaaattctgaaacttgtgtcgaagccatggagacatccacacatctgataatgagactcatctgttctttatgactcttatccggagtgcagtcgagaataacagaaaagtatttcgcctcttgaattttcttaataatcataagttggacctgagatcctaacataacaatcaactcattttggattttatggcttagccaataatagtgagtttcaccttctttaactcgtctgatatgctctcgtatgactggatcaaagtcgccgaacgattcaataaaactcgaaagttaccattgtttttctgaccaatcttctcattttctccacggaaagccaaattctgttttgcaaggttttttaccaatgaaaatattctcaacagaacttctctccaatggtttttctctatgttaatgtctttttgaagacacttatcaatggtcagatgctttcgtagtctcaactctagttccatccacttactcatgcaaacaatatgacgatgactagtctcatgttggctaagtcttatcctgatattcctccaatcattaaacccggtgcttgacaactgcatcgcgtcttggtctcgaccaaataacttgcagcaaaagcaataaaccttatccgatacttttgagtataataaccaatttctgtcttgcttatctccatttttcatctctcttttgtaatacctgtgagaaaaatgtcttctaataccagcagttttcgggaaagcatacttctcatgtacccttttcataggacctttttcgactagaaaatctcttaattccctatcaatatttttccagtttgctggatccgtaatttccaaaagctcatctttttctccactgtaaacacattctggtatggtattcatattcacatcagtatcttcacaaatttcttctgctttgtcattctcaacactcgtaggattctcatttggtttgagaggtgttgatcttttcacatacctcaacatagaatcagccaaagacttcgtcattttgtctcttcttttcttctctctcttgctttttgggctccggatttacaatttgattttcgaattggaacccctgaaatttttaatccgaaacaatcagataaatataggaagaactatttttctgtcaaattctactgtaactttaacataaactcaaattctacaagtaacagatattttttaaaaagaatcagatatacttgtcatggtgatgtcgccgtgtcgttggagtcttgaagattagaaagcgatgatgaaagggtttgtgttgtgtaatggagcagagaaagatgaagcctcgtggagttggatttattagggaaaaaaattactttgggctttatgttttttttttatgaaactcaaagtataaaatgggccacttaatttttgtttttttgaattatacatatgaaattttttgtttcaaaaatggcccacagcaaatgttttattttgctgtgctcagggccagcccaaagataccggaaccctagagagtatatccactaccaaattttcagaaagatctactatgtttctcttcttcatcatactaaaaatagacagtttgatgataacttgcttccaaaaaaactagggttacaagggatagaagcgatgttatgcgacctacgaatttaattattcacattgatttctaatttaattattatgtgtacttgttaattccgtggttatctctaacccgagataaacctaatgaaaaaaatatgaattacattgcaggttcaaaagaattgtttattttctaaatattaaattttcaagtcaaaaactacaataataatgacatttaaataattaatttattgtttctattaaaatgtgttaactcatgtttctccaaaattttaacaactaaaaagaatcgataaactaataaaatattatggttccttagtgtttttgctttagcaggttatatttattgatttatagaactcataaccttagtgttatatgacataattaaagagaaaatagtagatgactttctttgaaaatcaaatatcatgacttggatagataataaataatttaatatgacgatcatagattactagatgttctagctacttcccttttgcctcactccaagaaatacaaaccttgttagatatgaaccaaagttggaacataattgacgacaagtgagcatctagacactgaatcatgatgatccacttgtatacatttatcctctcccacaacgtgcaagaaaacattggagatccaatagttaccatcacgatacaccaaaactttgttcttctggtcgaccaagaaattcatccaactatccaagcaaatacgctcgtagagatttgctaattcaactgataggaacttgctccatgacgcagctcccgtactctcaatcgtagttgcaatccatacatctatatggagttcctgaatgatagcaacacatatttttggatcttctctagtaactgctaaagcaaaaacaggatcagagagatgatcacccggaagagacacccttacaaatctctccgttgaaaaatcaaaaccaagtaaaaaactactactggtcaagtctttattagtagaagcaagccagtaagtgtttccattcacagacatgccacggtccatacaccttggtatgaaccagtctgtaatcttaccaacaactctccacgaattagagttaaagtcatagatttcgtagttcataaattctggcctatcaggataaaattgatccatcctcatgattttgtacttgttgcatgatgatttaccgagagcaaatatatcgaatttcttgtagaaatttcttggttggatccacttagtatcacgagaacagggattcgaaacaacgagtctattgtctacggtggtgcatagcaagaagccgtcgcaatgaaagacgttgcatatatcaacttcttctaaaaaatttgaaagaggatctttcaggcgaagttgacttattatgtttaccttgttgttgtgaattgtatgaagatcgacgctcacgagataaaccctaaaggtcatcaacatgataagcagagagtgccttggtgcattagtaaagtgctgctcagcaaatctcttatcttcgatcagaacgttccatcttttggatgtagattgtaatcggaccaaagttacggtcggaaccctcgcgagtatctccattaccaaatcctcgggaagatctactatgtttctcttcgtcataagctttaaagacagactaggtttttatgataccttgaatccaaagaaactagagttcggagatgaaagttatgacttatgagatctacaaatatatatatttgtgagtaagttacaactgtcggtcaaaattacaatttctttgttttgttgttaacatatatactaaaggtatgttattggtttatgatttaaatagagttttagtgacttaaaatgttatgtagaatatgttgttattcaataagattttttgaaaaatttgttaaagttttgtattattagtttaagatttgtgaaaagtaatctaaaatcttcacaaatctggagttaatggattaatactttcataaagtcattaattttttttgttttattcaattaaaacaaaagaatctactattgtagatgaattaaattgttttgtaattggtttatgactttctaccatttgtttcacaaaataaagtcatgaaaatatcattaaaatatagagattgtttggaaactttataagattgtaaaaaaccaatgttcaaaaaattgttaggcgttcgataggggcctaacgcctagatcaattaatcgggggctaggcaaagcctaggcgttagcacatcattttacaaatttattaaacattttcataattttataacaaaacattggttaaaatatatgaaatgttgaaaatattacctatttgaatttataatatatgtatattcacacaaaatttctatgaaaactaaattaacttattctgaaaatttgagaataattaattgctaacttacaagtttagtaatcaagtacttttactttatttttcacttattcaaaacgatcatatttacatatactaaactggccgatttgaccggttaatactgattttgaacgcttaaaccgaaaaccctatttgattcaccgatttcactaaaatcgggccgcctaggccgattttttgaaccttgtgaaaaactaatcaataatattattgaaaactctctacaaatagtttatagtttagaatctttcatttatttactttatatgatattattaaagtcttcaaaatttctttttagttaggaaccaataacacctcctagttatttcttcctttttaagattcaaacactttttgcatgtattatgtgttttgagatacagtaaaacctctataaattaataaagatggaagtatgatattttattaattatagtgattaataatttatctataattaatatattaatttaaatttaaattattaatttatagagatatttgttttaatttttcaaattttagaaactatgagatgttataaattttatagtaatataattgaaaatttaatatttaaaaagctcatttgacaataaatcacaaaaactataattgaaaatgatgcatactaagaaattagaaacttacaaaacattatggctaatttttttacaaagttataaacgattctataatttgacaattgaaaaccccaacataattcaatcagacttagagacaaaacaattgtttgatagaataaaagttagagacaaactctaacaagattcaatacttaaaagacattaaaaccatatttttatataaagctttccaaaagattattatattattattttatcgaagtttgttaatttttacatcggcccaactcggaatttatagaggttttactgaacttttgttacaaacaatagattacaacatgtaggaagactactagactgatagaaaccaaaaagagtcatcgcctaaaatggatattgacgacagaaggtggcatgaaaagtgtttgttgaatagagatggcaagtggtaaatgaggatggaacaagaatgaacatatcttcttgcttcgaccatctgcagttccacactctggtcctgttcaccattagacaatcctaacgttaaatcatgttccgtgcggtttgggttttcgtcatcttaatatctaaacaactaaaacaaccaacctggttttatcttgaatttcagggtttgcggttgccttcgagatatgaacttgattgggttgtctgaggattgcctatgcctatctgctgcggatattaactgtaaccatatccgaaattaacttaactcaatcctgaagttgaagagaataagggtttatagaatggttaccttttcatcgaaccggaagagagactggtcgaaatatggggagggactttgtgactgacaactgaaaggcaaagagagtaacatcttcttcacaaactgtatagaaaaattgattagattcaactctctcataaaaaccaacatatcgaaatacagagatgtacttacctgagaaaaactgtttgatttgttcttcgtgtattttagttgttcaagggcatagacgttgttagaatgcgatgttacaaagttcatgaacggtgtactacttgatactgtaaagtgatcactgaactgctcaaataattggtaaagatcttctgctgagttctgcatatagtaatgtactaagtcaagttataagtagatgcaaattccacaaaataactggccaaaatgacatccattttacctgatagaatgctacaatgtcagtagtctccatattatacaccgcgaagaaagctggatgatgatcagcacttcttgttacctgagtaacccatcaacaatcataagtctaatcaatcaaattgtaatttctgaaaatgacagtatcagttcaatgtaaccatgaatttgtattatagagagcttaccccaccgtctacacttccaaatttgattagcaggtgttgtcgatccaaaaactgaacctggacatcaagaatacacaaaagattagtttttttcaccatcaaatccaaacacttgacacagattccaaaagcagaaacacataattgattaccttccatataatcaagtcgacataatcctggaaatggaaataaaacttcttcttaagactttgaactctctgtcaaatcaaatagtgcctttcgattagttcgtatccaagatgtagtgtttcaatacgacacacattgcaaactacaacgaaaggtcgaaaatgcaaagagcatgtatatgataagctgcatcaactaagaagtcactgtcaactgcatcaatcctaaaccttaaacttctgttatcctactcaacatctaacagaggaagccaagcagtacacaaacataacccatttaatgtacaagattgtgaaactcagagcaatttcataaagtgataagagaagttgaagaacaacgaaccattacgttatctgattcttcattccaaatctccctgaagataaaagaaagtaaccgttgcttaacaccactaagaaacgaattcgaaccacttggctgacttagactatgacgcaacccattctctccagtatcatcttccttactcccagataaactctgctgtttactcttatcttgactcatcattgcctaacaatcaaaaacctcacaaagctcaaaactttatctactccagagaaagatactgtaaaaactttgcttacctgagagctagaattgaggaaaagctcatcatcttcacgacaaaagtaaccaatagcacgagcatcaacaagatgaccagaatctctaatctgaagaagatgaatcctctgataacgcaacgacaaaatcgctaaaagatcatcataaagaaacacacccatattatgagccagattaacgaaatcatgaagaaaaaccctctcatcaagaacaacaccatcatctaatcgaagaagtacgaaagtaatcttatcaatggaaggaacaccaggaacagcgtcattagaaggagatgatgaatcatggatctgagctgttgaagtagcgaaaagaccgaaacgacgagtttggtgatagaggaagaagtctttgcagatgagttcgttagaagaagcgagattgactgagtagagttgagtgaaaaagctgtcgaatttcgaagcacggcgaggtagaggaggtagggtggttgtggaatcatcggttgtggagtaagtgagccaagaaggacgatagactatgagttcttgatggttacggctgaaactaatgaggaagagtccgtcttctgtgaatttgcggaaacagtgatcgggagattcgacatcgtagagtgtgtagcttgggactaggttttcgtagaagtgtcttgcacgatttacctatcattgaaggtaaagagataagcaaaagagagattgagattgagagattgagacagagagagagatttggggactgacggaagcgccgggaggaggagttcgaatctgacgttcgaagacccgagcggtgacgttaccgcttgtgaacatttgttggcccagaagggcacgaataaaggaaggtttttggtctggttttagtggtgaaaatggaggagacgatgtgagtgagagagagagagagagagatactgtggctttgttttggttctgttgatttttctcttttgggaggttggtttctctcaatctgttaatgggcctgatattggtgtttgaaaatggcccaatagttgcaaaattgggtcattggcacttatcggtactacttcctctttgtacaatttctcttgttgtattgctttgcttagtcggagcttaagtatggacattcacattttggatcggattttggatcggattcggttcggattttcggattcagatgggaaagtttattatccggtcgggttttatgactattcggtttggtttcggttcggatagtgtcggattcggatcggtttttgagaaaaaaaaatatatattgttccgttttaataaaattggtttaattttgcaaaaaaaattgtataattgtaacaaatataacttaaaaattcggacgtataaacctgtaactaatatttttgttatttagaaatttttgggtataaacctgtaactaatatttttagatagatataattttatttcggattagcggatatttattcggtttttgattcggaatcggattcggctgaagtaatttgggtaggtgaattcattatccgttcggattttgtgactgttcagttcggtttcggaacttttttcggatcggttcctatctacctaccattttttacttcccattttgttgatcggtaacaacaagaactgcagtggcaatacacttgttggaacgaatcatacaatcaatacacttgttggtaaagccttatgcatctcaaagccagcttctttgctagtgagggccttacttagggaacttgaaagaggattgagtttgaagttgaagctcaaacaatttaaatcatataaagatggacgttactgtatcgtgaagtcacaaagaacactgaacagaatctagaatccgactgtacatatttcaaagctgtgactaaagcaatacataagccaaattataacttaagaatgcttcacattacaatcaacatattttttgcctattggaatgcacaagggaatgtaaagaatcgactctgtttatccgattttctgtctgcacaatcacgaacgtgtacactcgataccccgacatatagccaaccaaataccaaacagtgtcaagcaaatagctgcatcaatagcaagaacaatctgaactaaccgccgccatttccattcaaagctttgagtaacagaacgtccactactcgacacacactccttctccaacgacgttccagctcccgctgaatcatcggttatgttccctctatcattagacttcctgtgttcctcaagctcaatcacatgatctttccctttcttcttctcttgcttacttaacctccccaacaacggagctttagtagaattcgaaccttcgctttgttcaccaagattactactcttcaattcattgttactactactctcagcaacacgttcaagagaagctataagtctagtaacaacaggaacaagctgatcttcaacattaatagaaccaatcatagcagtaaaacttcctctagaattctccctagcagctttcttaaattcatctctcaaatgttcaagaaacttaagaacactagatctcttcaaaacctcatcaacaatggcgaaataaacaaacccatctccaattaaaaacccaaatcttcttttaccaatagtttcaaagtaccaagtatgaaaaggaggagacttttctaaacacagagcagcaagactctcgttggtttggtctccaccgttgtaagagtaaagaatctgattgtctcttgagacacaacagtaatgaactgtgttcttgattaaacccatctttttttttgtttttttaagaaatcaaattgagacagaagaggaaagaagagaagtctgtgattagagcaaagaagaagagagaaattgagatgatggagtcagagagaaagtcaaagagaagaagaaagtaccaacaaaatccttcggcgatgtcttcaaaatcgaggatgaattctctcattcctcttcttcttctctctagggttcttgggtcatgtgtgagctttttgtttgagatgtttatctttgtgatgaaaaagtcagaactcgacgaccaaactagaggacgtggtccacaacactaaaaaaaatgtattattattttctatatgtatgtaacaaatcgcaaataaattaggggaaattgataaaactagcatgattttttttggttaaaagtataaaattagcatgatttcaagttaaaattggtaatgaatcaaatattcataaacatttagtagagatttatacgctcaaaattaagtaattaaagattataatactataattaatttaatgataaagaccgtaaagacaatgacaaattcttggcgaactaaacagaaatagcgacggacaacaaaaaagataacatttttggacaagatcttattcgattaataataatttaggggttaacacacatgagtaagatctctttcgcattcgcttgacgattttgattgcgagagatgaaattgaaagaagaagaaataaaagtagatgatagagataagatatcgtataaaatcccttgaagttctttgacttgaagcttctggttaattactttgacaaagattagatagtgagaagcgaaagagatgaacttgatgtccaatgcgattgcaactccaacggacaattaaactattcatttctgctaaatcgagttattcaagcttaaaagcgttattatagttaagtatgcatagatcatttttgtaattcaatttggttttgtagactctctgtcttcaagaggtgtagtagacggtatagttcagatgagtataagaaactgattaggtgatgctagcaggaactgatgtggttgccgaagtccggcctggaaaattttgaagtcctaaagttttattgttggttcttgcagataattcactttcttggatcctttactaaatttacatttaaaactcaagtatttggccagttatcggtattacaaatcaatttcccaaaattgctttcgatatttctcataaaaatgagcttttttaaaaaaatgatggactcttaagccatgcatatttttaaaaaatgatggactcttaagccatgcatatttttttccatcccgcttgggagttggatcggacatgaactaccgagatcatacattttgatgcttaagccaagacatcttccattaacatttactcatttaggctaaattttatatttctattaaatagattttaacttacggtatattgcaagacaattaatttaatatagttagtatatataaaagtttgcaaattgtatctatcaataaaatatttatattttatagcttacaactgttataaaataacggtataccacgagtccacgaaacaattgttaatctactgaaaatttaacctgttttaaagcggcatgttaataaaattttataaatatattgattcaaacctgtccgccacataatctcgttctgaaatataacatgtctaataatttttttaactcgtcccatgatttgtattctaaaaatagtgatttttaaaattaaataatcatttattatagataaaaatttaaattgtatcattgagacatttatattttatggtttacaattgttattaagtaacattataccacaaaactctttttttggttttgtacaagtttttctaaatcagactgatttgatatgtctaatattcgtggtgttaaaaataataaattaaggatttaacccgtattaaaacagcaaattaataataaattttctttttttattaatggtgattcaaaaacccgttccaccaaactagtcccaccaaaaaacctatatatatatatatatatatatatatatatatatatatatcaaatgcatttaaaaggcaatttgaggccaatatggtgtttgtttaaggctagaggagagaggaagattgttttctaataagagttgaaactctttgaaatgtgatgatgttcacgagaattggaatggaggaaaaagagaggacaagttggatgatctgcaatctgttctcctcctcatgagtgaagttctgtggtgtgtttatgggtcaaagatatagcaagttaggttttctcttaaggtctgaaccggtgaagttgaatactctctagtctctacttttctttttgagagtgcaaaaaattattaataagagttttacttgacgtaggtgaaaatttgagttataatagttataatattctgaactgtattttatgtagtttcgatcgaaacttttgtctctgatttgtctctgatttgactactttttagaaagaagaactcacaatgtaacgatattagatgagtaagattaagatgattcataccatatcaaatttatcatctaagaaaagaattgaaaaaatccaaacacaaaacaaagttgttccatgtaacgacgaactatcggtatccacaattaatgttaaaaaaggtaaaatattaattctaggttaatgtgcgatgtctcatttattctttgtctaattcactatgtataaataaaaattcaaatatctcaactggtaatttctaagcgtgaattacggtgaagatcatgataaatttttgtgttattaactgaaaagtataacatcattaattgagaaatatttcattatttccaacgaacacatgttttgttttgattatgttaatttgaaatatacttgtcatgtccattgactatgcaaacttggaagtttcatttttgactcgtgcaaaggaactatttcttggcaacttagcctttcaaactagtactttttgtaatgatcgactcttgggtaaagcctaaaccttactcccttccttctatcggaacaggcaccagatctttagatccgatgcaattagaagtcagtcgattatgtctaaaaatggtttcagtccaaactttttttgtcgagtgaaactccgcttcttaagggcttctttggacagactcactcccttactcgttgggggaccctcgattctttagttttccgagaatgttgggctagtttacggttccgtttcttgcttgacggtacgtttttaaccaagatcgaaggctctgataccatctgataagaccgagatgagttttctgtgctaaatagagaaacaaatgaaaatatagaagaaattgggagaaagcttgactgattcgagacgccactcttccatctttacataacagcccttcttttttccgtataaccagattccagattctttccctatcgggcttgttgtaacacattgatagttgactttgctaatgtaatatattcatttacttttataatttagcatttgtgaatccaaaatatcactaatataacatatttcatggattctgtagttcgaattttatagcttctttttctcatttttacaaccgtcacttttgtctaattttagtagctttcaatagttttatatatcatcattaattaagaaatatatttaaaaaaaaataaaaaaaaaagtttatctttatagtccataaaacaattgatgaaccggaagtttctagagatagaactaaatctattggttcagagaatattcaaaaactagaatttgaaaatcatcttctcggagctttcataaaaactcttacgatttatgaatactctttactatattttatcaaacctctttaaatccttagattaaccaattcaataacagtttcatacaatgttcaaaaaatcgttagtcggtagctagacgtttgataagggtttagcgcctagatagagataaatcgtttgctgatctattccaatcggttctatgcatttattaattttgatataattatggtaatttaatctaaaaaattacatacattaaatttgtcgaatccacatacaaaacttcttctaacttataattttttaatattttatttcttaaaaattggcaaccactcatatttattaattttattaaatattttctctcttccccttttcttctttttcttccggaccctcttcttccaattttctgcaacttttttttctctctcactagataatcacccgcgctacgctgcagtattttttcagatttttttatcgtttaatttaaatataatttttaattatgtaatcattcactcatgtaataaataattattcttagtattaaaatattttttccgaacaacattttcaataatgcatcatacacacacttcctaaacaatgttcgtcttaaaccaattaaatagagggtaatgttgggattctcgaaacctaattaagaatttgatgattaaacttcttacatactctttaccctcggtgatttattatctacatatacatttttgcagccactttgttaaataaatcctcaagttgagacttatttacagtggctgtcattggtatttaataattgtttttgataattaaaaagtaaatcttagaattaaatgtttgcatttaactactttcccacaatctctctacattaactacacaattagttactaaaataaaacttccaaaatattaatatcatttaaacactacaaaattattattttttaaattgtttttttcatgactataacaattcgattataagcatcaaaccgtagaaatatttgataacagttaattactacaaaattacaaaatatttaaacaatgattcataaacatatcataaataagatcaacattaacaaaataaataggtttttttacgggacggattggcgggacgttatttaataacaattgtaaactataaaataaaaatattttatagatagatacaatttgcaaacttttatatatactaacttttaaaaaaaataaattgtctccgcagtataccgtgggttaaaatctagtatatataaaaatctgcaaactattcaaactattaaataattcatgactactatacactcattatttgagttaagattacagaaaaacatcttcgagtatgagaaaaccgataaaataattttattgaaaaacatataataacaaaataaatttagtattagtacaattaaatatgtaaaattaaataataaatacatcattaatctataaattagaagttgaagagcttacattaattatttagaggacacatggcaaatgctaaagtgatgatgtgtcaatcatatggaaagagttggccaactttcatatatatgatttgttcttcattatttacccgatgtttggcccaattttacattactcacatcggtcatcaatattttagcgtttaatcggcgattagtccctgatttatgcgattttttgaaccttgcttccatacaattggaagccttagaagtctatttataataaaaaataaaaacctttaaacttaagaatactgtttaacaagcccatgtcttctattctattctctttgtcgagccttaaccaagagtcgtgcctttctctcacttcgaatggccatggacaccaccgattggagaaatcacttccattgcttaagcttaacttccaacatctacaaatcctggtaacatcttcatctatggatgtgaattctgtaagtctaaagaattctggtattttgatcccaaatctaaattgttgaaggcttaatagtggttttggatgttctatacctaagtaccactctcccacaatttcatatatcgacagaagcactgcttgagttttattgcccataattttttgaagtctcgtgatactttagccttgaactcaaattgcaaacggtttgcttttggtctcgatagccttgtggccaacaatcactcctcgacaattttgtttagcgacttcaatcaacacccagccaacaccctgaaggcctggatcctatgtaccatggtatgtttctcttattcatgtgtcaaacctaagacaagctttgtatggaatgcttaatctatgtggacgatcgagttttttcatgtgagagaggatccacctgttttgttatggttctacacatatcaatttatgaatcatggcttcagcttgacatatcccattcatctaatcttacgcttcaaaggttagtatgtgaattcttaaagagatctaaaccttgcgcttggttctaaagcaatcctcaaccgactacatcaccatagtcttccgaatctttgttttcgtgctactttgggtagctcatcttgctccggcgaaaatcaatgcatcgattcttttttcaacgtcacaaagtcttatgaccatgaccaatcttttgtcctccgaacctttcgaggatgatgtttcgatttaccatgacctcacatgtgtcaatgtgctcccaaactcttgtctcacatctctcttggtttcaaagtcgataaactttatctatatttgtatggcattggggaatgtctactattgtactattttaaactttggatcacttaaatcctcttctttttgtacttgttcttatttgaatgaatgaaagaaagtgcttgacaaaagaaaaaaaaaaataaaaaaaaatattcttgaataattataattaataaattaaaatataaaataaatagatttttgaaatatttccaaatatcttgctacatcaccaccaattccttccatgcgaagattttacgagaaaatatgctaactttgtataagttgttacaacaatgtaaatctacatccatgtgggaagtctaggctaggggggaaagcgatagttggaaaatattccagactcgagtatatagtatagcgtcaaaaaatttccaaactagggattcgggtcgggaaatccactttataacataatttcaaaactatggattcgtcccatgaagtccactttataactctttggtgtgtttcctaccgaatctgactagatcagccgacatgatttataaaacaaaaatgacacaaatctttccaaacttactattttctttttatggatcatgcctttacttcactcttaacaatgttactaacaaacgcaatagagacaacaaaaattcttaaatcttaccaatatgatcatcaaaagacaaagcttctacgctttttcaccaagtctacaactacaacaaccatcagatgtccctacgctgtttctgtcattctcttccgattccttaacgacctctatactatctcggttaccttcttcgacatcatcgatgtgaattattgcttcggttgctgactgggaatctggttgagttgaagcttctcctccgttagtgttttctatggaagatacaatctctatgctttgatgggacaggtctacggacggtttggggataagggagagacgacaaagagggcatgttgtgtgcgatgtgagccatagatcaatacattccatgtggaaagtgtgcccacatgatggcatttgttggagtttctcttctgcttggtagtccccaagacacactgaacatctgttttcaagtactcaaagtcaaaatcaggtgattcataatcattctttcttatgttttggctattcaaagaaagataaaaacaaacgtacacaaaagtagtttagtcaggtttctgttggagctaatacccatattatgaggcatatatataattttatctaagatcaaaagattctaccaaatcgcaaactcataagaactatttcatcaaacaactcaatatacaaaccaaaattgcaccattgaatttttggtcctatatgcctccactcgaaaatgagatcgcgatttcgcttatgtgcaatccgaacaaaataatgaaattttcatcaacctaaggtaacagtttcaatgaaattaattatgtacacaagaacattatccacttatcaatcacaagtgataatcaaacattggagagaacaagtttatttcatgagataagccttaaaaaagatcgtgaatccacaaaagataaaatctttatgaataagagagaactcactgtgtatcgttgacagtgaaactctccttgtagataacaatgggaagcatctctcttatgtctttgctcagtcctaattcagcctgttcataaatatgagtcagcaaatcattaaaagaaccaaacacatcaaaatgtttcaaaaaccacaaaatctttcatagattgagtaataccgttgagagattattgttggtgggcacgaagccaccaagagaagaccaatcaacgttggtattgctgtttcgacgcatgatataaagaacgaggaggacgattaatatgacacagattggcacacagacgataaacgtaaatttcagtatctgggattcagttgagttcgatggaatgtaagttcttgggtcgatgaaagacatcgtcactcaaactcaaccaatattccacaccaaaaaaaaaaaaagagacaagacttatttcactttctgtcttccttgtcacttgtctgaaaaaaagaatagagaatctctcaagatatatagatatgatagagagacgtagggaaagtttcaagtgttatatggtaaaaagctatcaaataaagaaggaaaatatcaaataggaaggcaacaaaatctgaaatatggctttaagagtagagatttttttcttgatatgagtaattagaggttgtcaatttaaatcaaataattgtaagtatatatggacaattaagtgacaactaaggggagttttttaaaagatacaaggtcaagactcaagaggttgttgaaattgagtcatagtcactaattaaattcaccaagtcacacggtttttgtatatgatttaaaatgtttaattttctagtcaaaggaatttaatgattttgctggaattagctaatatgcctgaaagaaataatatagtcttcagaattttgtttttttcctcctaatattaaaaaatattactataatcatagtttatcatcctcttgtaatatattttcttattttaaaaaaattcaaagttttcagtatcttttttttgaacaacatgaagtattggccttaagaaatcgagtggtaacatgttacctgattttttgtagtgacatttcgataatactcatataaatcatttgattttatgttgtaaacaatttaatctaataatttaaagttaagaagtatcttattggatatcaaaagatatcagaaaaattaacaaaatctaaaacaaaacataattgttcaatgtagcgacaatactgtcgtatccaaaatatatcataaaatgaaaattatcagttttcaattaatgtgatcaatgtctcagtcttttgtttcttttgtttttactcactttgtgtaaataataatttaaacaactcaattataacgactgactgtgaatttcagcttagatcacgataaataactatgctattatctgcaaaagtatacattaataattgattatttttactatttccagttaagcacgcatttttaaaatactatttttgtatagcaattaattgtgttagttttctaagtccgttaaccttacattagtaaatttcgtggaggttttcttatgcgtaaagcggtaaacgcaaatgagtgaatgaaatagaaactgtaacatgaaaaattgagaccaaattaatagatttttggatttcctaattttgaaacacgataagttagtagtttttccatatgtttcaaaatataggatgtttaggctaaaacacacaaaatctaaaaaaactaattttttttgtttttatattttttacattgaaacgtaattaaatatttagtgaaatacagtttggccaatgaaaaatattactatagaatataattagtcacaaaattgtataaatttaacttttgcattaaaacatgaatttctgtccaaaacatcttttacgtttaaacaaaataaaatgactacaacatcttctaacatgaaacagaaagagtatataggaagatatgagaccattatcataaaggctaatccaatcgaaaccaccaaaaatgtcagaaaatatttccactatcaagtgataaaagtgtttgaacgaattaccaatgactctcgcaaaaccaaataataaaacagatggtttaagcatatccaaacgatcacaaagacttccaaattttaagctcgttctctacctgtattcgatgaaactgaccctatatataaaagaaaatacaaataaatttatgattactattagtctacatgattaacacttgggaatactaaaaagtaaaaatagagacttcaataaaatgtagctttctttagtgacgaaaatgtctcttcaaatgactttgatttcagcctaagacatcagccgatgagatatttatgtttgtattaagagagtggttcgtcgataaaataacgcggtcaaagccttacacttctccattgttttgccgcttcttttgcttccaactctactctctcgtctaggcaaaaaaacctggaaaaaccaaaccgaaaaagagattttggtttgattatggataccactaagtatctcaatagacctcagtcacactgtatattggatatcgggtaacaatcgaaccaaatcgatatccatggatactcgaatagaacaaaaaaatatttagtgagtccagtggcgaatcaaggaaataattctatataggacacaataaaaaaaaatcaataaaaagaaaatagtaaggcttgaacttgagttaatgtggagcatcattaagtaaaaaagcactacactacgtattcaggataagacacatgctccaccaaagaccaacatggacccgctcctgaatgagctccttacaagcctacatgtaagcataatatattttgtctcaacccctaatccaataaaattttattaatattttaggtattttggcccaatatattctggcccactacatctttgtcaaaaaaaatcggatatttgggtattttggttatttttaggtatttcggataaaataagcatcaccgaaccgatatctattaacgttcggttatttatcggttctttttctaaatatccaaaccgacaggtaaccgaatcgaattgaaccaaaccaaaaaacctttggttccttttagaaccaaaaaaccaaaaaccaaaacaaccaaaccgaatggaatcaaataaccaaacgcccatgcctacccagattaatccctttgagttaaaagaacatgttctcaaatctagcaacttttcattcccaatatttggggaaagctctcatatattgaaagtagttaaaacttcataatatccataatctcataaaagctcgagtttgtaagcattttcaacaatttctcaaatattttgtatagatcttatatgcctttggtataagctacaacttgcattttctaataaattcaaatcaatctttccttgattgttactagactagaatacttgacttataaatttagacccatagtttttgtcggctttcattttctatttctcattaacattttcaatctctgtccaaacattctcatgtttttccgctgtcttttttttttttttctttttttgcacaaacaccatttatattaatttattggaaagatactctccgttagagagagccattcaggaaccgatgtgcttacatgggaaaaaagacaattacgtgccctaacttttttagctaaacaatttgcacgggtattagatctacgaggaagaaatctaatacaaaaataaggaaaaaaaacaaactaatgatcgataggaggccaattctgctgcgaaagtcagccaattcttttggttgtccaaaatagaaatcaaatctgagcaactagaagcaaaagtaccagatgtatcgccaatagagatcatgcattccattgcccataacaaggaatcaaattccgcatgtagcggtgatagactccgtcgcgcgctcttgagaccaagatggataattaattcttgtcgaacaaggatccatccatgcccgcttaaaggatcttcaacatgccaaaacgcatcgacttggcattcagagaacgaggtgtccggagccggagtcggacccagaacaggggtagaaaatagggtttctttttcttttaaggtagcctgtttccaaaccgctgcttcgtggagagtcaatgtcaaagtttcagggggaggttcactgaagttttcaaaaacaaagcggtttctgcttttccatatgtaccaaagtatccaaggaaagagttccaagatatcttctcctattccgaattctcgtccacgcaagaagagaaaatcaaaattatagaataaagagtttctaggaaaaatatttcatgagaaaggaatgggcgatagtgcccaaatttgtctcgagggtggacaataaaagaggaggtgatttattgtctcttctgactcgccacaccgggggcatcctttatctgttcccataggacacatgccccacccaagaccaacgtgggtccgctcatgaatgagccccatacaagcctacatgtaagcataatatatttttatctcaacccctaatccaataaagttttattaatattttaggtattttggcccaatatattttggcccactacatctttgtcaaaaaaaaattcggatatttgtgtattttggttatttttaggtatttcggataaaaatcggttctttttctgagtatctaaaccgacaggtaaccgaatcgaattgaaccaaaccaaaaaacctttggttccttttagaacaaaaaaaaaccgaaaaccaaaacaaccaaaccgaatggaatcaaatagccgaacgaccatgcctacccagattaatctctttgagttaaaagaacatgttctcaaatctagcaactcttcattcccaatatttgggaaaatatctcatatattgaaagtagttaaaacttcataatatccataatctcataaaagctcgagtttgtaagcattttcaacaatttctcaaataaatcttatatgcctttggtataagctacaatttgcattttctaataaattgaaatcaatctttccttgactgttactagactagaatacttgatttataaatttagacccctaattattgccggctttcattttctatttctcattaatatgtccaaacattctcatgtttttctactgtcttaatcttttctattgcttcataatttgttggtaacttccaatgtaacgttatcaaatcgtggaagtacgaaaactcataccatcaaaattttattattaaaaagaagaagtaacaaaatccaaaacaaaacaaagtaaattgactgaagtaaacaaaaccaacaatcaattttaaaatgagaaatatcagttttaagctaatgtgtttgatgtcccgattatttcgtaaataataatacaaacatctcaaatgtaacgtcttagcgtaaatttcggcgtagatataataaataactttaatattaacttaaacatatacattattagaattattttaccattttccaatgagcacgtgctttgtggaacacaaattcattgattatgtcaatttgaaatattcgtgttacattaactcctactaattttgttgaagctttcatctgctaattatagaaggttcgttgattgttgactctgctaatttgttatgtccatttactcttacaaaatgagtatacacattacgttgtgaatctgaaaaaccactaacttttgtttgattttagtttctttcattattatttttaatagtatattgttcagatcagattatttagatcttttgacaggttaaatttgtttattttggagaaacctcgttcgcatagaaataactaatgtaacatattgtaagtgaatcaactatgggtccgaccatgccttgcctctattgatataatgaccgttgtttaggttgttcacccacttggcgtacaaccaagccttgcctctataaatattttcaatatgctacatatggcatccactctttcaaacgttgtcatgtcacatttagatggtaaaaatatcttggagaagaaaaaaatgggtttgtcttgacgttccaagacatattgacgtcaatgtgactagaaaaagtcattttatgggagggagagtggggttacgttatgagccttggtcaagacaatctaaggctcaatatgatgtttgttgaggtctagaggagagagggcaattttctccctaataagagttgaaattcttctaaacgcgatgatgttcatggagaattggaaagttatatatatatatatatatatatatatatatatatataattgtaaaactcaaaagataagatatatcataattagctaagaaatattttaccatttccaactaacatattctttgtagaacgcaagtccattgactatgcaaatttaacatatattgactcttgctaattttgtaagttcaataaccttgtcactttgctaggttcgtttaccagggtaattttgtagaagctttcatctgctaatttttgtagcttctttgtttgttatgtacacgtacaaacatctggtccgacatatagacagcccaaaccaacactccgagtagtccatcttagagcccataaacaataatgaagttaagtttgtcgagaagataactttttaaaagttgtgacagtaatgccaatctttccaaacttaccattttcttcttatggatcatgcattcatttcactcctaacaatgttacaagtaacaaacgcaagagagagacaacaaaaattcttaaatcttaccaaaatatcatctaaaggcaagacaaagcttttatgcttttttaaccaagtctacaagtacaacaaccatcagatgtccctacgctgtttcggtcattctcttccgtctccttagagacctcttgactatctcggttaccttcttcgacatcatcggtgtgacttattgcttcggttgctgactgggaatctggttgagttgaagcttctcctccattagagttttctatggaagagacaatctctgtgctttgatgggacaggtctagggacggtttggggataagagagagacgacaaagagggcatgttgtgtgtgatgtgagccatagatcaatacattccatgtgaaaagtgtgcccacatgatggcatttgttggagtttctcttctgcttggtagtccccaagacacactgaacatctgttttcaagtactcaaagtcaaaatcaggtgattcataatcatactttcttatgttttagctattcaaacaagaaaaaaacccaaaagcagttttgtcaggtttctgttggagctaatacccacattatgaggcccataatttatctaagaataaaagattcttccaaatcacaaactcataaagaactattttaaacaactcaatgtacaaaacagaaattgcaccattgaatttgtcgagcgttacgtatgcctccactcgaatgagatccctattttgcttatgtccaatccgaataaaatgatgacaattttctcagcctaaataactgttttttttttggttaacatatatagcctaagtaacagtttcaatgcaactatattcacaagacaatcatccacttatcaatcacaagacaaaattattacgcaaagcaaaattgtcatttctctttcttgttcccatctcgtactttggtataattcatatcacgcaacatagctttgaacttttctatcacaaaaatgttattttttaatgtgataagccttagaaagatctgacacaaaaaaaggataaaatctttatgaatatgagaactcactgtgaatctttgactatgaaactctccttgtagatgacaacaggaagcatctctctaatatctttgctcagtcctaattcagcctgttcattcatatatatatataagtcaacaaatcattaaagaaccaaacccttcaaaaatgtttcaaaaacaacaaaatctttcatagactgagtgttaccgttgagagattgttgttggtggggacaaaggtaccaccacgcatgccaagagaagaccaatcaacattggtggtgctgtttcgacgaaggtaaatgacgtaaagaacgaagagaacgatgaatgtgaaacagattggaacagagaagataaaagcttggtaaagtttcagtttctctgattcagttgagtttgatggagcgtaagtttctggaatcgggttttggtttgggtcactgtaagacatcgtcactcaaatatcaatgttccacaccaaaaaaaaaaaaaaaaaagacttgtttcactttctgtcttttcttgaaaataaaacagagaatttcaagatttggagatgaagcaatggtgatagataagatgagagagagaggtggggaaagtttcaggtgaagtattcaggtgctatcaaattgtgatagctatttatttattttatgagaagatgtcacaacaaaatataataatatagaattaaatttacataataggaaggaattggatagatacaaaatataagatatgggtttaaaaataaagttatttttttcttaatatgggtcactaagtgtttcttaaaaaaagattgtaataattactataataatagagatttaaagtgacaactaatgggattttgtttaaagaaaaaaaacaaggttaacatgttttgaaaccgttaggtagttgaaagtgagtcatagtcattaaattggccagtcacacgagtattagactgctgaaaacaattgacacatgttcggttgtttatgttttttacttgttttcatctttcttaaaactaatattttatgtgtgtttttttacctttatatgatttaaatttatttaatttgctagtcaaaggagtttaatgatttagctggaagtagctaaattgcttgaaagaatatattctataagaactttactttttcctcttaatattatatagaaacaaatactaaaagaatcatactttctcctcttgtcataaactttctacaatatatataattttcaatttcaaactctcttttatgttttaaatttcagaactatcttttatgtttcttgtttcaacaacatgagttatcgatcttaaactcgagaggtaacaaatctataatactcatctaaataattagattttatgttgtagatgattctaatctaataatataaagtaaataagtatcttattggatatcaaatggtatcatcatattaacaaattctaaaaaaacataaaattgttcgatgtagtgacaaagctgtcggtatccaaaatatatcctaaaatgaaaaattattacttttaagttaatgtgatcgatgtttccggttttttcatattctgacttactttttataaataataatttaaagaactcaaatataacgtctgagcgtgaatttcggcgcagatcatgataaatcgttacactattaactataaaaatacaaaacatatttaattttttccaacgaacacgtgttttattaagcccaatttaatttggcatgtacatgtcatgtccattgattaatagctaatttgttaagttgccaagttcgttttctgatgcgtgtcgcggtaaatataaaaaataaatgaaatagaaacaaccatatgttattagatatataggaagatacaagaccactagaattcttaaagggtaagccaaatagaaccaacaaaaaaaaacacatagaaaaagtatcactattaagtgataaagatgttgaatcaattaccaatgactctcaaaaccaaataataacagagatctaaccatatccaaaaggtcacaaagtctctctaaattcttaaattcgtgaaagatagagtggtgtcaagtaatgacttatgagccttggtcaaagcaatctgatgcaaaccttggaatttacctaaggtttatgtttctcggtttctcggcctacggtttgaatgattcgatggaacgatggtagagatggaaaatggaagttttgtcgttgaatccacaacaacacacgaactagaatgtttgaatctcacaaacacactagaaacgcaatcaaacaagactatggaatcacaccaataaacttgaattgacaaagcttcaaaagattacaaacttttgaaagaaaaaacacactttttattatttaacttgaatgacttgattacaaatgacaaaatgaatgagatgtagaaatgtagattgtctctgtaataagtgctgaaaatctttgaaacacgatgatgtccatttgagaataagaaagaaggaatgagagagaacaagttggatgatccgtgaactgttctcctcctcatgagtgaaattttgttgtatttagatatagcaagttaggtttacttttaaggtgggaactggtgaattaccttactccctatttctttttcttcgagagtgcaaggattatttataagagtgttacttgacctaggtaaaatatcgaattaatgggactagttaaaacattccaagttgtattctcggcattttcgtgcaatctatttttttttttttttgacgatttcttagaaagaagaacgtgttttgagtgtaagtgacgtaagcgcgactttcattaaatgtcttgtcagctataagatggttcgatcaatggctcgtcagctggatcattttgagaagtgattgtgagtcctttcttggcaaatgttatctacagatcttctaaatgacggagaaacttgtcgctttgttcatggagcaattcctatatgacttttctatgattcaagaaaaatcatcataaaattaatcatttctgaaaacaaataaaagatcaattctcaagattttctttatgtcaaagttacttttcaaaattatttccaaattttcttaactatttaaaaaaaaaacaatgtcaaccgttccctagttcaaatgaagttgtgagatctaatattttttctttttttaacatgtggtaatttacataatttcaccacaaaaatagtaaattcccttaaatggtgacaaaatgcggctattgcgagtgaaccacattgcactttattattttagtatatgataatgtcagcaacatctcaaaaaaggccatacgtagactcatccaaagttatatattttaatgtcaataggattcattctataaacaaaaatatacagaatattcagatatggatgatgaacacatcagctttgatcactcccacggacgcggagattcgcagatttgccttctcgctttgctttttagttttgtcaacgcttcttgtaccttattggtacgaaccaagagacacttttcacagattcttcttttgaaatattcattgtcaacttctaaagtcaatggcttttgttataagttctctccaagttggtatatccgaatgagaagagttcttaagaggaccatttttacaccacaataaaaaggccaatgtttactttgagagagattcgaagtggcatttcgatattgggttggattctgttcgatttagtattacagtagtttggtttggttttaatgtaattaaaaaaggttattggttcagttcgacttcgaaccaaaccgaacagatcaggttgaagaatactttaaccaggcagttatgtgcatggattttactttggttttgggttgggatataatggttacctctaacagaaacacaatcaatttagttatcaatataagaacaaacccataaaaaatgggctttaccaccaagtttaggcgttcaaatgtaaccaccaatatttttggttactaacattttcaaatgagtttagaaacaagagtgtgagaatttgacaatgcaagtgtggtatatacgctatacattagtctctatgcatatttatgttacaatttcgagggcttcgtgttgataaaaagaacagtgaggtttctaagtcttgttgaatttaagcgtctcttggctttgggttgagctccgtctccatacttgtaggtagcttctgggttgaagcaacgccgccgaacttgcggaccaggattgtgaaacatggcagcaatacaacgtataacgtaataaagaaaaatggagttgctacgagccaccctagtaactgcaataaccataggacttaaaataagacttgcaagttactaatgataagagcacaaaagattaggctagggaatgcaaaaagcggttcgacatagttcccccattagctaagagaaacgagactcattgtagctacttaccgcattaccaatgcttaaaaagacttcttgagaggcttgaccagtgaaaaccttctttagagcatctgatgtcaaaggaaaatgaggtccaccagtaactttttcaccaagtcttaggaaaggaaccacgagacttcaataagaaagacatgaaaaggaaatccaaaatccaagtcaggaagaaaactgatatgcatcgtctttcgataaaagtggtaatttcaaaagatttaaatgatataaggtttacgctagttccactggagtggcaatgatattagccaacattacggtcggagcatgacaagatgatccgagcaaggcaaaagctactccacatagtaacacaggaacacctattttataacaaaaaccacaccaaataaggtacatagcaatctcaaaacgcaacaacgcaagaagcagtaagcttaggaaatagcaaaatggcgagaaatacgcaccacatatcggaaatatccccaaggtaataccaagtgcagcagagaaagcaagctgctttggctcagtacctctacgaaaattgaaaacaaaaacaaaatcaaactcaaatcacttcacaacatcaaattttctgcaacagagacagagatgttgatacatctatctctaacagatgcccaaaagttcctatatgagcaacatgaagatacaaggataacgcttttgcctttaacagttctaaatgggtctctcttgtattccaataacaaagaaagagattttcttaaaatcctttagaaactacatgatgatacaagcataaagactctgtctttaactgtgctgatacatcagtctctaacagatgcccaaaagatcctttaagagccacatgaagatctaagaataaagactctacctttaaatgttgtaaatggtctctcttgtgttacaataacaactaaacagatgttttcaagatcctttaaaactacatgaagatacaagaataaagactctacctttaactattataaatggtctctcctgtgttccaataacaactaaacagacgttttaaagatccttgagaagctacattgaagatacaagaataaagactctacctttaactattataaatggtctctcctgtgttccaataacaactaaactgatgttttaaagatccttgagaagctacattgaagatacaagaataaagcctctacctttagctgttctaaatggtctctcttgtgttccaataacaactaaacagatgtttttaagatcctttagaagctacaagtataaagactctacctttaactattctgtatagtctctaatgttccaaattaagtaaccaacaagaagcaaaatgcaaaactacagcttttaaagaccaatgatcacaaagttgcacatgagatctatctgattcaataatcaataagcagaatatgagtgaccaaactagtcctaattaacagatctatgtaaaagagagacaaagagtcaaagaagacaaacctacgcaagatctggagaagaggatcagtgattttcttattgaaccatgcttttaatctaccttttgataaacccatcacgattctacaaaatcttcacgaaaattaattctccccagaaaaagttaacagatttcacacaaatgaacgttgatcgatcgtcttttgcgcgtctcttcacggaaccagttgaagatgggtatttccgtaaacgggtttgcgtaatcgggtcaagtattgatttttttaaatcaggcccaagcccaaacatttaagatcccaaaatgatttaagcgacccgattcgaaaaatccggttcaattatcggttagcatatacccaaattagaattgtttcgggtttcagttttgtccgggtcagatctaaaattcgaacatgtcttcgtaaaaaacccaaaacaatatacatatgataatcatatgtccgatggataacatatgactgtacaaatattttaattacaaacatgagagataattttttatggaataatgtaaaaatgtacggaaatatagtacataaaaattatacaaatactaaaagtaatgttttaagtgacacttttgatattacttttaagattgataattgtcaaaacggtatattttatacttcaacggtatattttagtcttgagtatactggatctaaaatatctgaatcgactcaaaataacaaattcggttcggttcagatttatatgtttaaaactttgaaaatgttacgtttttttgaattgtttggttttatgactttcatggtttatagaataattcgggttaaaaaaaccgaatcaaaatatcgttcaatcataggttggggaccttggggtttaatcaaatttcaaaaaccaacccgaatccgagaataccataaccaaaccgagctaaccgaaacaatttcggttctcttttatatagacccaatcttcccagaattacccgaaatccggaagaaagactgatccgaatcgacccgaaaacccgaatggtcagacgaagaaaccaacacactaaaaactcttggtctctttatcctccgaattttctcgccgtcgccggtgaattttgagccctagcaccgtcgtgaattaaggaggattcaacaaatcatgcttgtcggtgagaattgtgttcacgagacatactacgagattctctccgtgaaagaagatgctagctatgaagaaatccgaaatagctatcgttctgcgattctccactctcatccagataagctcaacaatacttctcgttctagctcagacgacgagaagtttctgaagattcaaaaagcttgggaagttctaagcgatgcagagctacgtgtagtttatgataatgatcttagatcttcaagacatgatggaatcactgctgatgagattagtattgaggatatgtcagtggagattactggtgatgtgattgatcttttttatcagtgtaggtgtggtgattacttttgtgttgattctagtgagttaggaacaatggggtttgctttgttgagagatggtgattttgtttatgttaagagattgggtgcttttgtggcgtctgttgttcttccttgtggttcttgttctttgaaaacacgagtttgggttgattctgatatgaagattcctatctaggatggtctattgtgagcaaggtggtgatttgggttggtacagaattgagtaatctctattcaagatgagtttttaagactgaagtgatcgtcatggtctggttcggaggaggagttctgattgaggatggttatttgtgattgtgtggataggttcatataggaaaagtatggatggagatgatttcttgtgaccaatgtgatctcctgcaagcttttctgttgtgagttttttgtactcatttaatatagttgttgaacaacttttagtttgtaaggaacttaaattataatgagaaacaaaagggccctttggttttgctactcttttttccctctctggtttcagttatgtctccttttaaatttgctggaagctgaatattcacgtgaaattatctttatttttgcgttcttgcgaatatctgattcagaaccttcttaaagttttactgtgcgtacgtttgcggataagaacctgactgagaagaagtgatgtaggtgtacttgcagtagtacatcaggactgtgctttctcaaaagaatggtatttcttcttcacctgaatttattttccattttctactgaatttgtttgctgtggttatatcttgccttatctgatgtttacggtgaaattgattgagattagatgtagagaattaagtggtatgatttctgcagggactgatacaggttactgcagtcccgactttgttgaaagacctagatcaaggttaatgttaatagtttctggattcacttttgttattgttgaggtgtctccttgtgttttggttgaatattgttttcaggctcaacttggttttcaattttgttgtcacaataacttccacttgtggcagaaattgtttttacactgccaaatatggatgtgatgaggaacaaattgttggtctatggtagaccgaaggatgggcgataccacactagatagagtaccatgattcttcaggtatcaatctttctaagtgtgaacgtctaaagaagctgtgcatacttgttttattgaatctatactaagcaaagttaatattcaacttttttatttcggtatacaatatatgaaagtatgtagtcttgttattttttcactgtttaccaacccattgaagtatatgatcttgagataataagctgaaatagaaaattattacttgatcccataggcctctaaagtggacataatttcctgagatccgccattctctttgacataggaaatgttagggctctcttgtggaactgcgtcttctcttttgaagttttcttcactgcgaagaagcttctcactgtctgatcccactacaccttttagaatgatggttttgtggaggccacccagtaagtcctcatagtctgtgtctcctttctctcccaaaaagaaaacagtcttcgacatgtcaattccccaccttatagaaagatacctacatgtagccatcacatcaagtcgtgtcattttcactgttgatatcttacacatagagtttatgattgaagaaatttttatttgtgacagtttctaacctgagtgcttgtattcttgatgcacatagtggtataacatttagccttgttgctgcatgagtatagacaatgttgcaccttaaacctctcatccgaagcctctgcctaaggtcatcgactcttcgagtctgccattcacacatatatacatcaatacgagtttcacacatatattcatgatgagaaagatattctttaaaagagctaccttgactccttgtttcacagaaattgcatagcatcttgtactgcatgaactcgcatactctgtgatatcatcctcagctgcaggttccgtacatataagtctcagaatcaccgaccttatactttcaccaggccatttgtattccacatgagtttcgtagtctgcatcaaccatcatatctctccatggatagtagatctcacttccgctgttgcaaactattgcatcaaaatcttccagattaatcaggtttttctgcgtaatatccacaacttcttgtaagcttgaacctgaggctagcacaaaacctatttttcctttacccgatgtcaaatctgcagcttttatcatattcttgatgatttcgttcaaattcgctttgatgtttccgttgtcatcataggaatcaacagcaaccacaaagagcatctgccttctaccagggctgtagatagcagctgagcaacctttcattgaattcatttgacttatggcatcgactagtttcttctgtctggtacctgcatctagttctccgttgagagtgaaatctccttctgtggagaatctcaaagatatgtcatcgacatctcgtagagaatcacttgtgagctcttctggaactttcatgatgtcgagactactggtagggtgacggtttctgcaatgttcgacatgggataggtagttacggcagtgctctggccatgaaaaacggtggatgttcttgagtccgttttttctacactcagcccagagatgtttgttagcaactagctttagaagggcatcagaaatggcttgttggtcatgggggtcgactaggagaccattatttagtgcctgcgatacaacatatgcactgttaattagctttatgggatcagtgaggtgtgactatgtctttatacagtttgctttgtaataagagatttgattaccttcacaatatcaacaggccctccatttctggtggcaacaatgggcagaccataagcagctgcctgtcatatgcacaacaaatggcgcggcatgaagatctcacaaggttgtgtatctcataagggaaacacattgacatatttgctagttacctcaatgagcgtgagaccaaacggctccaccagagctggattgatgaaaaccccctttaagagagaaaaccaccttattattacggtgttcattttgcaaagaaggatgagctaagagttctggtaaactactaacgataacattgtttttgtaccatgtagactcaggagaaactaccaaaggtctacgcacatggaactaataattgtagatgctgcattataaaagtctcatgttctactggaatcacgaaagtagtaaacaatatgagtcatatactcatattgtttaatagaattttcgtgttaagtaccttagttttggctgctaagcggtaaatatctggaacttcagattgtttatgatgctttggataagctacttggccgtacaagtcgtactggtctatcagctttagtacattcatgagaacaactgagctgctattaggcatctcttcgatgtcatctcggttacctagtataagtacctggaacagttttattagcaatttaggtggactagtagtatgctcattcacaatcttcttatacatatgtgagttcactggataacgcatgtgtaataaatgctgagatacctaccaggttggctagttctcgaagaggctgacattcaccaaaagctt

SEQ ID NO: 1387 - DNA, 49311 bp, Arabidopsis thaliana
taatgtttacattagtgggacagttgtacaatatatttcacgtgactaaattacactaatatgtaatgtttccattgatttcatgaccttccagagcacatatctaaagcttagttgcacacaaggatggttttttgcctctctttttcacccttcttcacagtgagtatatttttattttcttatccattctttccaatttcgcttgccactcattaaaattagacgtcatcttatagtttcgatgtaacttgatttcatgtgtatataattttgctctcaattgaatctatgccgtttgctgcagaaacatagctaagcttgcaaaaattcagatttgtgatagaaatggccaatggaatgatcttcatattccccaaaggtaactgtataagtaaaaggttatgcaaggctttctatttgtacaatagagaatatagtaattaacataaatttttgttctggcagcataaggtccatagtatgtttgaatcttcctagtttttctggaggactaaatccttggggaacaccaaatcctaagaaacaacgtgatgtaggtttttataaacattctcttgctttattaataatcttactaaaacgtggttctctttttctttctattgtctcaacagagaagcctaactgcaccattcgttgacgatggactcatcgaaatcgttgggtttcgaaatgcttggcatggtcttattctgctctctccaaatggtcatgggacaagacttgcacaggtaaatgtaaagtgatagaagacaaactgtgagttaagtgcatatttttaactcgtgtggtgtgtgtatatgtgtttaggcaaaccgagttcgattagagtttaagaaaggtgcggcgaagcatgcttatatgagaatagatggagagccatggaaacaaccactgccatcaaatgatgaaactgtgatggtagagatctcacatcatggacaagtcaacatgcttgcaacccaaaattgcaggtccaaaagcatgtatgagtcttcttctataatccggtttagtaatgatgaagatgactcatcagtggttgaaaatgaggagttttagaatccactagaaacaatattctctttcttgagctagtatagtaacaactaacgattaaccaagctcccaaacatacccaaaactcacctaacctctgtttctttgtcgcctattctttctctttatgttcgaacatacaaagtaatgcactaagggttgtttgagcctaagacttttgggactttcttcttgcctattaaatcgaaccctctagttcttttggaagtgtcacttgacttctccagagacttctcgtagaaactcaaagatgcataaagatcttgcatgataggcagaggtcattataacaacctctgcagactatgtgatgttgccaagttgtaaaagtacagataacaaactcaatgaacaaagaggacatctatgtatgtagcaatagggaaacacatacagacacataataaaaacaatgataatgatagaaatacagagaaaaggtagacacatataatgactgatatgtggtggaatgggagatcacaaaaattgcctccatccaaatgccaatgagcataaccctaaactataacctacaacacaatgtgggtttataaactttttcaaaagaaaggcctcataggacaagagagaggagaagaagatgagctttctgatgaaaactgatgagaactatccaaatcatcccaaagaggactttcaggaccccatcccgatgtaatggcattgtaccatgcctcagccataccttcctctctcccaacatcaatcaccggtagttccttgctctccaagttaacctcgcttggctgtggcgtttcaggttctttctgatccgacgagtttgaatcatgcagctcgctttccttattcacaaaatgctccgggaaattcagtgttgcgctgtggcctcgtaatttgaaggcttggcggtcgtaggccatggcagcttcttcagctgtatcaaaggtaccaagccaaagacgtgccctgcttcgtggcttacggatctctgcgacccattttccccattgacgttgtctcactcctctgtacagcttcgttgcgatgtaaggttgaacagcttcttggctcatcatcatcatcattcttcctcttggactcagattcaatgtgtcactccagtactgggccatatactgctgctgctgttgttgttgttgaggactaaaggagatcatttgcttctggccttgcattgtcgggtcttgtcgttgctcaagtaccggaacgtatgatccgagttgttgttgctgattctgaagtgttggatcgagagaaaaagggaaagcctctaacgaataaggagaagaagaggattggaaatagggtttaggacgactaggactcttcattttcttcatagatcttggggacgtggaagaagcttctcctccaaaagaatgatcaacatttttacctttcgtaatacaaagatttagctcctcgtcaaagtccatctttgcttcactgatgccttaaagacgtggcagttcacgatttgccaaaacagagagcaatggaagaatttgagaggagagagctaggaaaacagagaaaattatgtcttgttttgttcttatttggtaagagagagacgactctacatgggtttatatatgagggcaagaattagatatttatttttttcaacgaaagattttgctaaccgcttttgtaatttgtatgtcccatctatctattgacgactattcaaaactatctttttggggttattcctttgcttttactccaattcattggccaataagaaagttaagaaaatgagcatttgaaaaatagagagatattgacacataaaaacacaacgcgcagagatgaaaacattaacgtccgtacgaatacgtggcattctctgtttttttggacggtgaaggcattcattagttcatatccttcaactttatttagttattttccaagctttaattttcgtaaggcgacaccacttacaaagttaaaagataagattagactgtaaaaaacatctataatttaagaggtttatgcaaattgaatggagacaaaaaaaaatgatgttggtgtaatggtcggctagccgcggcaaaggataatatcccataaccataagaatgaccattttgatgacaaccaaacgtagtactaattatagtttcaatcttccgggtcggtgattggtcaaactcagctttcgcttttttttaagatatttttgcttattattattcccacctcccctcaaaaagatactcaactcacaagaccgaccaagtttgaaaaattcacaactagaggaatttcatttctcagacaaaatcattcttttttggtaactaaatctcaacatattatctcacgtgcatatcgactatgcgtgatgttattcttcatatcttctatttattgtgaggaataaacatagtctataaagatttcaggtggaaaatccaaactaattgttggaatttacagttttatttatttatcaacttacagtttttatgtaactttttctagtggcaaaaaagaagatgggtgcagaagaaaatctactaaaatctctataagagtattattcttaagaaaattcgtgaatattaaggcacacatttattctttttattttatgagttaatattgttgtgtataatactataatgtgataatgtttagaaacagtatagtttttttggtgtaattttagttaggggtgagcataaaaaagacgaaccaactttattttgggccaatgatccaatttatcaaatttggacaaaagtcgaaagaagcctaaaacatgatccaattttaagaggtatcttcagaaacaatctaaaacaccataaataattcctagtaagtacataatatcagaatattatattagaggctaagaaactaaatttgagataattgtaacataaatatatctaaatatcatgtagaaagttctagagatttttgtgataatcttttatgtaaatcaatatatatctctgtatatatcttcttcttttttgttatgaaatttagaaaattgttaaaaagagaaggataccaaaatcaagagaacgtgcgtttgtacaaacagaaagccacaaaacattagaaaagaataaatgtattgagcccatcatcatcaatctgaccccaaactaaatttatgatataaaagtcttgtgaagaaaaagtcagtacctatccttcccaaagagtcccaagtaacaacaatccaacattattgatatgtgctactcttaaacaacaaagctaaatagactgttaaccaagtaatgatctaaaacactacatatatcaaagataatgagtagtagtggtgaagtaggtgaagtcatggtggtggacccttagctgctttagccaagaatctgctacgctcaaaaagcaaagcaatctatcattatcccatagcctcccttgcatcttgtaagtggccatcccaaatgcactcacacttatcctctccttctcctcttccctttttacatctgttccaatgccaagggactttagaaatggggaatgaatgtactaatacattaatacacacttccaagaggaaagtgaaaatgcaccttggaaagatgaagaaagcgtgtggtaagtgaggaagcaagtagacaagtcttttatgcttctattcatgggaatgtgatagattggatacctacacatacaatcaaacatcgtcaccattttactacattaaccttaactttgttttctgaaacaagaaaaagaagaaaaggcagaccaagcaacagccatccaactcgcaggagacagatcaacactcctcaatgacctcaaccctacgtatctttctcccaactctttgatctgaaagtagacagagacttatggaatcataaaacaatgaaagaaagtgcttctggaatcaaactccaagaatggggaacaaaccttatccatgagagggactctagagtaaggtgtacatctctcgaaatactgcaagtaagagtaaccgaggcgatcgagaggttcttgatgatcaaacccttcttcagacgaagaacatccttcccatctccactcctcgctacacgactcgctccctgaatcccctgattctgtctcctccctaaatcatcattcatcgcagcgacatgttagattgttgaatatatgcttgtgtttatgaaaatggcagcataatgatcattacctaagagtattgataacagaatgagaggtgaaaatctggattgcagagaggtaaggaacatagtattggaccaatgtttcgcccgtttccgatacaatggggacacctgcaccgtaagcactccactcgtcgaaacaatcccaaaaatctcccaacctgaaatactcgacgctctggctctccaacggataccatagaggattaaggttcttgatctgtgtctgccaaaaaacacacagtttcagatcctaaattcagagaattgttttaagaaaaagaaaaaggcgtaaacctttgggagggaataggcaggcacaatcggtgtagtgcagcgtaagaatcggtctaggttagattcactgtcaaaaaccatcattatccaacaaagaaccaaacttcgacccagaaaaaaaaaaaaaagagagaggagagagtattgcgggattctctttccctgacgtttcaaagagcttagttttcggacaaaagtgttagctttattagacgagcatttgagactttcacggcaatgtcagaaacagggaaagattgaacgaaaagggacaaactttttaaagaaaactccaacggaactctgttttgagcaatgagaaaaaaaacaagtaaaattgtatctactttgagataaaagaaagtaaggaaataggtttatataatcaaccaaactccatgagacccattcttctaaggcaggagattattggtagattcacctgtctttctcacaactctccaccttctccatttattttcattttcatttaataaaatatagtttcgtttctctaactttgtcggatgagattgagttttgtttgtttgggtttagtataaaacgttatggcttcttaatatcttcattttgcatagttcgtgaacaacacaacaaaacagagctattattcctaagtcttagatgatgacatctcccaatacaaagtctccttcttttggatacatcttgaaagaagagaaactaggtcgatcacatataacaagatttcaagagaaactgggtcaatgacttttttgtttacatattataattcatatggtttaaaagaatcattaacataaaaggacatgtgtgacaggatcagtcggcaatgttgtaatccaagttaaactaaatatctactatagaagtttgacacattcaaatagtacgacgacatggggataataaaagtacggaaacactctttgacttttatggatttcttacaaatttctatcagacaactgtagaatatgccgctagtcacgtaaatgtaattattaaaacattatcaaaagattgatcggagaagaaaactcaagaaatggtcaaatatgttttaccaacttcgtaaagaataaagagaaagtaaaagaaatcaaactctttcaaagtggaagccgtcgtctctcgctgacttcttcttcatcggtttttctgttacttgtatgtgaagccaaataaacctgcagaattcacggtttgaatatgagaagaaagtaggattttaaataataaaagaaaagtgagagagaagacaaagacctcgttgcacaaaagcccatcacaaccaaaattactaattagacatgtgtggcaaatgttatgactgatcatcatgcaataattcaccgccaataccatagatgctaccagactttgtaggctctctctctttagtaaataaagcactttgtttatgttcgtttaatgtacccataattagctttaactatttcactctactctatatattacacacactatctcttccatcttccctccacaaaccacacattcaagctcttaccttttatcctcaactaacacaacaatggcttatactctgcaaaatctgacagccacaattgttctggtaagcctgattcttggatgtacagaggaagtaaccggaatgcgttacattcccatttcccccactcccagtgagagcaaacattcagactttcctgtaaacatggtgcctcaaccatctagtctcattcctggttttggaaggttcttgctacctcccacacctaagctgccattccttccttacaaagatccccttgctgttgccccagccacttcaaatggaactcctagtaataaagcccgcagtccgagttcaggagaagatgaagttccaccagtgccacaaccatgacctgtcaacaaataagcttttgctagatgcagaagggtattcaattctggttcacataacaagtatactagtcatttcatcatagtcatatatcttcatgatctctctctatatatacttaagaggatattgaataaattccagagcttttgcttacatactatctaaaaataatatttccaaataaaatgtaatgactcacattgctgcaaatgtattgagtcacaaaagagtagaaatatgtagaaactcttcaattgaatcattattgccatgattgagtcaaaagagaaactctctttacaaagtctgaaattttgtcaagatatgtaaaatctcaaagtttcaaagtaatctcagcattagcatttagcattaacaaaaccaacgacaactacgatgtattaacaaatcaaatttggaaacttctaaaacaatgcgatgataatggacaaagagatgtcttggaaaagtctattggaattgaagtttctgtctatccatagcgaattggaaaaaacgatcaccatgaccaaaaaccaaatcgatgaaggttcgttcaaacacccaataccttgaagatgatataacaaagaaagcagaaaaatataaagaggaaaagataatcaacgaacacgaagaagttcgtggatccatggtttcggtttttcatcttcgtcttcttcttgtcctctgactcgtcctcatcaatgggttcaatcttcgccattgtagtccccgtgaccaatacgccgatcaagttttcgcgggattccgagattgctcttcttctccgatcgattcgtcgttcgtgttttttccctctgagatactattataacttgagcaaggtaggcccattttgggaccataggcccaataaagagaaaagcccaaactacgtacgtaatgttgactagtcaactaaaagtgggaacttgggcaatgaaacgatctttttctacatcttgttcctctgtttcacaagtctctttccagttacaaatgagcagccacgaccatagaaggtttggaacggcgggtcctttagctgcggacgaagaaggtcaaggacgttttgagagctcggtgaatgcggtgccatttggtttggttgcgaccggagttttgattgctatcttcctcttaattgctttttttgagaggttcatgttcgttaaaccaactccatcaccacctctcgaccaaaagtttcctccttttgcttcccccaaggttcataacatctcctctctatttgcttttatatttttgcctacgttttttgttctgttgtttttttacttagtcttttaactcaagtgaacattctgattcacttggaatttgcatctaaatgaggttgtgatcatcaaacatttgtgattcataactatgcttgtttttgttgggtggtgagattaagatgaaataaacctgccaatgcgtataagttattaagtttaatgaagtctatcggtcaggatcatgatttaccagggtttatgctagaggaagctcttttgtcgtatctttgaaaaatggtgcaaagtccaaaacaggattacattaaatgtattattttatggggatacaaaaccccttgattcatgcaacgaggtttgaatataagcagagtagaaaataagatatgtttagaggaattcactacctatttgtcgacacactagttgtcttttgtgagatgatgatgtcatgtataatcttgtgttgtttatttgcagatggatgtgtgtaaaagagagatatcggtgttgatgcctggagaagatgtcccaacgttcattgctcagccatgtcctccctcatcatcatcaagctctttctgaaaccttctttcatctcattaagtaggactttttatcagacaagtgtttatgtagtcaagtgttgttaaacagaacagtgtttctctgtttgtgtctgcttatcccatagcaaaagagcagcaatctccataaaataaaaagccatggaatttgtgagcgttgttgcgtaggcttgccttttactttacgagtccacaataaacaaaccaaaaacgaagatccgcataagatttggttaataattatacattccgcaatttacaaatcaaaaaaagggaaagaaaaaaaacaatcaatcacatcagagttaataatgatgaaaggagaagagatcatcagagaaagatgaagcattccatggacacttcagggtctctcacagctgttacatcttcttccttctttacctcagcagttactttctccgtttcttcttccttcttcttcacctctgttgctccgtctttctccggagctcctactcgtttcttcatggggcttcttcttgcagaactcggggcacgagtggctggagactgtgagcgacgcctcggattatccgataacccgctccgtgggagtggacccgaatccacatttcgccggttgtgagtagggtttggttgacgagactgtctctctcggactaacctaggacggagctgcttcccctgaggagaatgtcgttctgccggagatctgaggactctgtcaggcctgttacggcgagaggtggaagaagaaggaggaggaggacggtgaggtttgctgagagcatcgtcttcgaggatggacgcagcggtagcagttgtggcagtggagtagctgtgagagacagagacgctgcaaatgtcggacttgctgtgagagatctccggagctggaggtgagagaggaagaggaacttgagcttctgaatctgagactgttggtgcggaaggaacgaggtcggggactgggacagggacggagatgggtatggggacggagacagagactgattgaacaacgacttctttgacggattcttcttcgaggggtggaggaatttgagcggcggcgactggtggagctgtgacttttccggcgctgaagcagcatcccattttctttctacttttgctaattcctctctctctctcactctgctctctcgagagtcgcgagtcatatacttgtcaactttaatgggcctctttctcatgttggcccatattcactatgggctcgattatgctcttttgttttatccactttgataaagaatctgatatttgtctcattcattcatatcttcaaagacaaaacgctagtgtttgattttctttaaaatattcaaaagaaaattatgcggatggacaaatatctcgttagatagcgacccatcatcgttgggataatttcaacacacaactgccgattgccttggacagggacaccggacatgtaacgacagtaagtaaaatgcttaatacttatactaccaacatcttccttttggtcgtcaaaaatgtagttgaagataagaactgaccatcattttttagctcatcatccatccactatgttgcatttacctcattgttgaataagaacgcgttgagcaagctactttttcatctttagttggttttgtgttaaataaaacttgaagtggaaagaacctaacatcgttgctgcaaacttgatattcgaatatttataaccaccatcttaaaaacaaaaacaaaatatgagaagtttaaaaacatgacaaaactttgagtagaaatcagaaaggggccaaggctcgtaaacttctaaaccccaagcccataataaatgttttgaatccataagttcactcccatccgctactctttttttcagtttcttgggaacaactaggaggaaagagagtttttaaagttcaaagtaaagatgttgttatacaaaaattgtgttgacaacttattcatattcatgtctctgtaaagatgttgacataattatttcactttcttcaaaaaaaaaaactggcgacattttctttaattctcatttatccattatgtactttttgtttttgttttgcaacccatccattgtgtatgtacttaagataacaacaacaacaaatataccatatataaatcatatggtctacatacaacactagtatcctcatccgtattaaaaaaatgagttcctcgaacacatatagctacaaatatagagatatgactttggggtttgagcgcattgcagaatacctaacaggcatagatgtcaatgacgtcgtcgtcatgtacttggttactagttgttttatagacaactagttgattaaaccttttcttttaacaattaaacaaaccaacctttatatatttcttcaacttttattttatataaaaaaatagccaataggtgtggtggtgaaatgactcggtaaccaatgaatcctggtgaaagggaagagccaagaatttgcagaacctcaaaggaaaaaaaaaggacctttgaaaattacaaaatcaagaacttcttgaaaagaagtaagtacaagaaatagaaaaaggagttatgacattataaaaccaaagaggaacctgaaacaattgacacaaccctattcctcaacttcttctctcttatgtcttatcaaaagcctctcacccaccgcctctgttcctgctcctcttatcaaccatagaaattctctctctcttccctatatacaatacaatgttatgtaggtgatacatactataacatagttgtatataaacattaatataatggagaggtcccatgcccccacgagttttgttttgttggccagctaattcgcatcctttttgttttgtttgtataagagagtttctttgttacttactataaccacaagaccacaagaaggccaaagagaggctaaactaaaagagctctctttctaatttatttctctctcttctcttctcccgaaaagcccttaataagcttttgctttgatatcagatctctcttacggcttttgagatgcgtgctcctttagggctttccttttataccccaaaacgaggcctttccttcttctctcatctcctaattctaccctcttcctcttcctcttccttctctctctcttctcattctcctcatacgctataaggagaaaatctcagagagagagtgatggcgaacaatgagggagagatgcaatgtgggtccatgttgtttaagcaagaggagctacaagagatgagtggggtcaatgttggtggcgattacgttgaggtcatgtgtggttgtaccagtcaccgatacggcgatgctgttgctagacttagggttttccccaccggtgaccttgaaatcacctgcgaatgcacacctggttgcgatgaaggtctctctttttttgtctctactgtctctttctcgtgtctttctgatgcttttgggaaaatgggttttgatttgtgtgcatgttacatgtgaatgtgtgtgagattaaacgtttgtctctgtctagctactatcacattgggctggtaaagctagggtctttagcatgattacatatttatcaatgagtcttagtgtatgctagctagatccgttcttgtagaaaatgaaatgacttgatttgccacagtaatgttttaggctgtctgtttatctgtaaatggtaatgcgtctctttgttactggccaagtggtagctttattgacaaatgatatgtctcgcttagctgtacgtgtatgtcaaagtttgatgcaacctagttcttgtggtatcttgtagctaacaattccatctctagcttatttggtatagatgctcatttagagctctctttgaaagtaaaagtgactgacttgaacagttttgattgtatgatgctagacaagttgacaccagctgcattcgagaagcattctggaagagaaacggcaaggaagtggaaaaacaatgtgtgggttatcattgggggcgaaaaggttccattgtcaaagacagtattgctcaagtactacaatgaatcatcaaagaagtgcagtagatcaaacagatcacaaggtgccaaagtttgccatagagatgagtttgttgggtgtaacgattgtggtaaagagaggaggttcaggctgaggagcagagacgaatgccgcttgcaccacaatgcaatgggtgatccaaactggaaatgctcagatttcccatacgacaagtaggtgtcttttgttgtccttgtatgtacttaagtttgatgcaaatgatgtattatatcaatgaatggtgtggtggtcgtaggataacatgtgaggaggaagaagagagagggagcaggaaggtgtacagagggtgcacacgttcacctagttgcaaaggctgcacttcctgcgtctgttttggctgcgagttatgccgtttctctgagtgtacttgccagacttgtgtcgacttcaccagcaatgtcaaagcttgaagaaggcagtccattaagaaaagaaaaaaaaatgtctgtctcagactttgttcgttgcatttaataacttattctaaaactccaaacagttaattatcttatctatgggttgtgaatggagcaattgaaaaaaaagtagaaaaagttgatttccaagaagaacatgcagacgagcatgcctgagtttagtgcatgtctagatttttggctagtggcagggaaaagtgttattaatagtttgttgttactctttattttattagctgttgacagctttgtgagacgaagttgtcaatggcacagctactcggtctgtgatttagccatttaggagatgggacatggaaagagacattttcttaatacccaaaaagccctgacgtcttgttttgaacacagtaaccatatgggatcccttaagtgatgtatacttttattatcaacaacaaacattagaatcataaagaccaagtcgtcaccaggtaaagaggatacgagaataaattcatcagaaacatgtgaaacatgtgaaacgtgaaaccaaagacgtagaggcatgtatgaacttcaacatgtttttgtatcaaaaaagtgttttagagtataactagactcataaagtagtacatcgactcctgttctgttacaaccaaaattcatatcttaaggatcacataactgaaacctgcatccacaaatacgaggcaaacatagtgtttccttcatcatacatactagactacctataaatcagagatcaaactatgaaatccgcggattcattcagagtctttctcgcacgccaatacactccattggctgtctctgatgttcccagctgcaataaacatcagaaagattgtcagttagcatacttgacactaagtcatagtattggttttggtcagggtattaagaatccactttacctttgtctccaatgagtagtaattcttccacagctccacgtcttgaccgtaacttgcaacagcagaatcatacagcttccgggcattactgagaccatctttatcacctactgatatgaggttggtctctatttcaatgcaacctttgtatagaacaagactgggaccaggaagagccaagaacctgcagttttacggtaacagtggtgagaataaagtccatgtgtgactcaagggactggaggagtagtgactcacctcttgtatatcttcctcgcactgtgggccccttttgtttcaagaacaaatttcaccactgtggaagcaagagaaaacacatggtcgctcccatggcttttggttgctgataggatggacatctctacaagtttgtccaaataagttcgctgatgagcaaagaaattaaaagcctgcaatacaataagcattttattagtgtagtcttaacaaactagtgtattgtctagaaaatatattagtcacataccattagccacaagctctcagattctgagatcggtactttcctcaaagcatttgaaaggagctcaaagactgtctgaaaatctgctttactaggagatgagttctctgaaagtgatcttatttcaatggaaactcttgaaagccacaacttagctgatccagcaaatttttcagagcagagcttttctgctagcttctgagcttcatgagtcttttccagtttcaagtacagagaaacatattcatcagcaagctcttcagtcaaacagccagtttcatcagccttttggtacacgtttatgatatgtgaaatgatcggattagacaaagaggagatttcattctcgtcgccgtttgactgtacaatagcctccatcagaaaatttatataaatctcaaacatagaacttgacgtaacagtttgcaagccttcttcaaaaacctgcattcaggggacaagatttaagacctatcagatattgtactttctagtttctactactaagccgaaacagattgtggtaaagcaagttagtatagtcctaaagaaaagcccccccataaccaatgttccacctgtcctctccgacattattaaactaggcaatttgacttcaggttcaaaccaaaaagagtgagcgtaaaatcaagactaaagatttgatctatgttaaggaaatgcagcacaactatggccgccacattctttaacagatttcagcatttaataaatttctaacccctagtcataagttaagatttgtttacctgaatagccttttgcatttgaggatttgcaaactctaggcctgcctcattgctaatacaaccactcatttcatgtcttgcaagccaattccagtattcaggttcattgcaaaaatcacgcttcaggtcacttagaatggtattgcgcatttcatctgaatgcgctaagtctgttgcctctagaatctccaaaaaacgcttcctcaagtcaaaactagatggaatagcctcaacggctccactatagatggtctgaagaacattggaccctttctcttttaagaaatcaactttctcagtcacatcctcaacatcttcgacaatagagtcctcgtcattctcttctttttcatttccttctttctcatctagcgacataaataactctttgttctcatctttccattgctcatcctcaacggttttcgtgtcacgcaccaaacttcctttatcttcaccaagggcaactttacgagctttcagcttatttagaaaagtaagttccattcgcagatactcaacccacaggtcttcagagtttgaacacactctcagcccattcagcataagagcacgagctgctgtaacattcaagtttctatcaaattcccaagatgcagcatatatccacactccagccacttttggatgaaaccttattgcttgagccaatgcctacacatgtttcagataatataaacgcaattaaacatcgacatatacccaccaaagacaaatcattaacaaagcaaccagcaaatttcaaatcttttacctttttcattcttccatgcctcttctgtttacaaaactcgagatacctaaaccacaaattgatatcacctttatacctcatcgtcgccaatctataaatctcaacaatcctagccacaccggcgaaatcagatactgatttcttctttctcttcttagtcacacgcgccaccgatttcctccgtagctgacggagctcatcgagcttaacctcatagtcaatataggctatgaaatcttctttgagtgggcttggacgcttgagccggtactcaaacttacgccgctgcttcacgatctcagctatctcagcacgagtgaagatttctcttcgttctagatcatcaagctcgtcaaccatccgctcgaggcggtattgaactacgtcggccatggctgctgcttctcgattctcggcggggactgataacggtagggcaaacgcttaatgcttcttcttctttcttcagttattatataatgggccgtaagagtaagaagctattgggcctacgtctaattttatcacggcccaatgttaaaactcttgctatgagctatttgttgttgttctgggggaaaagctttagaagttgaagacgacgatgacgcttttagctctctcttcttctctgtcttctccttccttcttctgccgcaattctcgtattcgtttctctcctgtgtcgcgtatttcttctcttaatggtgataataagcttacaaattctccgccacagtttttaaatgccggcgcgagtctccgtcgttttgtggctccggggaagtttccaagtgtgagacttagggttttgacgaggtgcgagaaagaaaatgcacccaaaggtgggattgaagatgacgcggagcgatttgcgagacgagagagcacgatgcctgatagattcagatatttgaccaaagaagctccagatagtccaattatatggccatggtttgttggtacgtttctgcttacttttggcttcgttttagttaccgtgaatcataagtcttgtagcaaaatcaaatttttgttcttgttctcaatcgctgaagcatttctgactcaagaccctgagattggaatttagggactatactctggtttagcatttgaatagtagtctagtgaattcgagttttgtataccttgttgcatagttcgaataagctttggataaatgaagtaacatcttgatcttctgttgtagcgctggggtttctcgtttatgcgtggagagctgttttgtttgagctatccaactggagaaaagcggctttcgctatccttgcgtttgtgggagacctttcgaagtttgcattggctcttgtcttccactttataggcgatcccatcacttctctcatcagccttgtagagactgcaatgtacagtgttagggcgttctactccgggattgtggcttacacgcctgtgagagagttaaccacggtaattcttcttgcatcctcagtgcttgctataggagaagcagttgcaccagagtcaatcagcaagcagccgtatgtggtaactattgcgggtctggtggggtatgcagcggtgcagagttatatctcagagccgttcttctggactgtcttgttaggtttgtatgggtactcgcggttgataaagaagagagacgatgtgacctcggctcttccttctgcagctgttctggcaggagtaggggagccatgggtgagagtggtggctatcacagggtatctggctctagccatgtatcacaattcaacgaagacctcctcagaagaagagagtcagatcttaaggagggcaccaccaatgccgttgttggctgcagcattagccattggcgtccgacttgctgcaaaatgggctggatacagacacttgacttggatgattgtttgattctctgctgaaacaaagaactttagagacgaacaaaactagtttgtgttgtaacttgttgtacctttccccaatgtttgaagagaaatttttgatgatacaagaaaaaggttttgtttctctgtttggataatgttagttaatacggcccatttcgagaactggtggtgggctatttcttagctagaagccatctaagtagatttcagctgtaattagggcttcacaatgaccctatataacggagcgtcaccaccttcttcttcctcctcctaacatctcatttagtccgcattttctttgtattgttcgatttctatagttatttttcacctgtgtacatggttttactgttttgggggagaaaggatttgtttttagattgcctcacatcacctttagcttgttttcgatataaaaccacggaaacaaagctagtcttcgaggcatatattgaactgcggtgttaacgtggaggcatacttgttcatcatagtttagcctctaaaattatccgctaaaccacttcattttcatttattcgtttttgcctttgttttttgttttccagatttggcatttgtctgaaactggctaattatgagcaaaatcatttggaatctgtgaatcaaaatagtcgcttgttcttgacccggttgaattcgatgtgaattggatcgattgctaaacaaacaaaaacgaggacagcttgaatttgtgggattaatagagtgttgccattcttgtgggctttggaccttggatgtgtgctgatttataaactgacccttctaccaaattttgtgttgcgacataaacttgaatctgacgacatatccatgtgcaacatcaatataatagttcttatttaatcacacataattggttgcacgatttccgaatggcacaagctaatcaattgtaactaacttaagctaatcaattgtatgtaacttgaataatcaatcgaccagataaaaaaaggagactttgtatccacgacatctggattatggagacactaagcgtttttaattagtgaaaagtcgctactaaagctcagtacttgaactcggtcagaggtttctcttggatctcttcaactttgtcttctcagaatcaaacctctgaagacttttcaccaaaatgacattactttcctctctcggaagagcctctcgatctgctccacttgcctctaagctcctcctcctcggcactctcaggtttcattgcctttcaatgttcactttgtcatcgctttccaaaagtcgggacctttcttagatgttttccttttctcaaatccgatgtatctcgaatctttgacttttgccgcctttaatctcaatattttcctaactttaactgtagtatttctgattagcttgttctgtatctttagctaagttcttgttgtgggtgaacaaaaaaatcacatttgggaattgctcattgagagtgtgtttgtgtattcttacacatttgcagcggtggaagtatagtggcatacgctgatgctaacgaagaagctaacaaaaaggaggagcataagaagaagaaagtagttgtgcttgggactggttgggctggtataagtttccttaaagatctcgacataacttcctacgatgttcaggttgtgtctccccagaactactttgcctttacgccattgttacctagcgtcacttgtggaactgttgaagctagaagcattgtggagtctgtccgtaatataaccaagaaggtaacaaaggcctctctttcaaactgtatgcaggcatcatcaccatctgctaagttcttacttaaatagtatctgttgttgttgttatcagaaaaatggggaaattgaattgtgggaagcagattgttttaagattgatcatgttaatcagaaggttcactgtcgaccagttttcaaggatgatcctgaagcaagccaagaattttcccttggatatgactacttgatcgtagcagtgggagctcaagttaacacatttggcactcctggtgtacttgagaattgccattttctcaaggtaactttcatggtttcaacttgtgaagattataattctcccaatttcataattcctttcttcaaaaatactgcaggaagtagaggatgcacagaggattcgtagaggagtgattgattgctttgaaaaagcaatccttcctggcctcactgaggaacaaagaagaagaaagcttcattttgtaatcgtgggaggaggtcctactggtgtggagtttgcagctgagctacatgactttattatagaggatatcaccaaaatatacccttcagtcaaagagctcgtaaaaataacactcattcaatctggagaccatattctgaatacgtaagtaatcaacagtactatagacttcttcatcatttcttcatgccaggcttgattgtggagtttgacaagtggttgactggttgttgcaggtttgatgaacgtatcagttcatttgctgaacaaaagttcacgcgagatggtattgatgttcagactggaatgcgtgtaatgtctgtgactgataaagatatcacagtgaaagtcaaatcaagtggagaactcgtaagtattcctcatggattgatattgtggtccactggagttggaacccgtccagttatcagcgacttcatggagcaagttggccaaggaggcagacgtgcggtggcaactaacgagtggttacaagtgacaggatgtgagaatgtatatgcagttggcgattgtgcttccatagctcaacgaaaaatcttggtctgtgaaccccattagactgttgatgctattcccttctttttttcatatgcatgctaaatcttgatagattcttgtgaatcttaatttagggggatattgcaaacatattcaaagctgcagatgcggacaactcaggaaccttgaccatggaagagttagaaggcgtggttgatgatattattgtgaggtatccgcaggtggagctctacctgaaaagcaagcatatgaggcatattaacgatctgctggcagattctgaaggaaatgcaaggaaagaagtagacattgaggcattcaaattggctctctcggaggctgattcacagatgaaaaccctgcctgcaactgctcaggtacttggtgaattcacctatgcgtagaatcgtgggttttatctaggatgtcagggtcaatggtctgcttgtttgtttgcataggtcgctgcccagcaaggtgcttatcttgcaaaatgcttcaacaggatggagcagtgtaaagagctacctgaaggtcctaagcgcttcagaactggcgggcatcatcagtttcgccccttccagtatgcctaatctaatgaactcaggaccttgcatcctcataaacttccaagatatagagatgaaagctcttcgcttgattacaggtacaagcactttggacaatttgctccactaggaggggaccaagcagcagctgaactacctggagactgggtttcagctggaaaaagcgcccagtggctctggtattctgtttatgccaggtaaacgctgagaaactcttttattcattatagtaaatgcacagaatttgaaacatgaaacatgaatgatgcagcaagcaagttagctggcgaacgagggctctggtggtgtcggactggacaaggaggtacatattcgggagggattcaagccgcatctgactcaatactgcattttgtaatgtgtttaagaggaaaccaagatacagtctctctctttttcgtttgtttttggtgtaaatttcacaaagctgtggccaaacttcttgtttgtgagtggcaaagcaaaaaccttttgaaagaatctttcttcatgaagctgacatttacaaaagataacaaaaactcacaatcttaatgtgtatttagaaaagacattaagcattccaacaaagattcttgctctgcgagccgaaaaacaaaatcaaaaccaaacaaattcacaatcaagtaaccacaacaagagttgtggattttactcaaattgataagcggatcattcattcttcaaacttcagaagctggcaaaaagtgaagttacgatccttggcttgtaattctgcaactctcttagcagcacctgaatcacgagggctccctcccacacgacgaagcgttctgatcttaggtagctccttaactataggagactcgtcaccgttctcaccactgctatacagatcaacttcacttggaatctcccatctcttcttcactctcccttcactcttgttactttcatcagaagctcttctcttctccgacctcttatgattctctttctcttcatcctcaggcaacgaccttttcctaacatctttctctccagtctgcgttttacccatttgactgtacctactagccacaactcttcctggtttcaatggtttccttaaagaaacattcttttcatcttctttgaatagcctcttaggctggattgttaagagaactccttcttctttcttcacagctctctttgaccccaccgtcgtagctgcttgcttctgagctgccgtcattttcgctttgcgagatctcggactcagactcaaactcgttcttcctttacctcgtgtcgtcacttgaccttcttcgattccaggaagcttaaagaaacaagacttgcgtcgattctgagctgattgaagaggagtcacagtttcagatttcttcgcggaattgaatatctccgctggtccaagactaacgcctctacgagtggctcttgatttcgatcctgtaaaacacgaatcgtcgaatttcacttgtttctgagatgattccatgaacttcgccggaacgattcttccacgtatagcaatgcttcttgcggtttgctccgccttctctaatcggagcgactccaatttcgtcgataatcgtccgatctccttctctacttcttcgatctctgcatcgatatctcgctttttactccgatctgcggcggatttggtcttcacggtcttggattttgctgacggagcttcggtgatcgagactgaggattggagcgaagaggaaaccgaaatcggaaactgattctccttgctacaatcggaatcgaatgattcgttgaggtgagaccaagaagaagcttcgatggcggaagtgatttgagaatctccatcgtcgaaggcagcgttgttccagatctgaagctttggaggagcgttaagcgtttctgttgcctcaattgatgtcatattcagagcgatttgatcttcttctacgagaaatttagggtttggagaaagaattggacacttgaggaggaagaaggaagaagcgagtatttcttgaggattatttgaccgttggaaatgaaggagacgttactcattactccattaaggagcgtcgtcagatttggaccgttggattaagcagccacgctccgatttcattcaaagccaagttacataaatgggccaaatagcccaagagctgatctcgttgtgggcctcttgttcctcgcacaattggcccgacgaatataacatttcagtttgctcgtaagatgaattataggacctacctcaataatgacaaccacaatagataaataaataaaagcattatggagtgactgacttgtctgtctctttggataacgatggttttggaatattttagtactattgtttaatttagaatcgtattttactgtggataaagttgaaattagtggtaatcgcaatcaagattccagattgtaataaagttggtgagcgaacgatgttttaagatatagaaaatgaacagagttctctcataatccaaggcttgctttgatcttttagaacattctaatattcacagagatgtaaccaaactatacagttgcatccagaaaatccgactcaagcgatttcataagcacgagtcaaccaccacagatgaaccaaactatatacagtttgcatcagaaaaaaattctgattcagcggagttcatgagcgagccacgaccatcattatctgaatttagccttgagcccagcagttgaggtacatgacttgtcggagagactcatcgggagtggaagaagaggtacgacgtctttcttccgaagggagagagtcgccggttagatctgcggcggcgagaggacggagatcggaggaaagtcttcgttggagacggtgagcagaggtgagaccgctttttaacttgacgccgtgatcggcgtttccttgaacagctacgaacgatgctgccatccacactttgttcagataactcattctttaatagtgattatatgttgtagatcctttcttcgtaaattggaaacctttgaaagatttgagaagcttttgttaaaaaggaagattagttcgatttttgtaggaaggaaatgaagagatgaggttggtacttatagccagagggatattggggtgagggtaaataggtaaattcaaaaagatctaaaataagcgataccgtgcacaatggattagtgggatccaggtataggaaagcgatacggtacgatatggttaagttatcgtgaaatatctcgggggaaattgaaagtgctgagtaatgaggaaacaagtggcgagcttagagggtcctatcctcaagatgagtcacccttgcttcaattatcgaccccttcatgtgggccccattcttaattatttttgtaatttggtttttttttttttttttttttgttgaatgtaaatttgttttgttttgttttgttttatacgaaaatgaaaaaccgataggtcggcctaaaaccaaaatggaacgatggttttatgtgaggggtggggtggtgcctagagactaggatagagtcccacgaggggattggttacgtgttaaccgattattgggtcatcacgtgccccttcacgtgatattactgtccatcaatacttcttgtccctttgcttccggttaatttattattagtagtgagtatttgtttttactttgatttgctaagtgctatctttaatgactaatccaaccaattatatgtgagtagtttaattttattttattttattttattttatcaccaatatattaatgagtagttttaactatcatattcttctgtcattctaatttgaaaacgtttattagtggaatgagtgaatcttgtgatagttggacttggctttgtgaggatgtgggccgttcacatattatgcttatcccacttatactagataagccctgtctgcttcttctactaatctaagcatatgtctatcacatttatgctcatgtcaaactatcttattgcatcacatatcttcttgcatttggctataaccagttctacattttcttttccccgattcttatatgtcaaatttgaatccgtcagataatactataataaccatgactattaacttgtatagactgtatatctcaatgtttgatggtcaagttaaaacgccattgcaccttgagaaaagaaaatgcatgttgatcagatcatagctacgcggaatcacattcctttgacttcacttgcttttttttccaggtgattctctgtatgactagacttgagtggatttggtgtctcttgcagctttacttggtccaagagaaattccaaaaataagttgacaagcacagctgatcccatgtgaggttcccaacattgagaaaaacatagtggtaaaagttgcagacaaacaaccttcagagatgggaaaacagagaaatctatcaagaatgtgtcagagtttctgaagacgaatcctacaacatatgtgatatgtgataccacttcctccatccaaaaccaacaaaatcaggaaagaggatatatactaaagatgaaaaatacatgaaggacaaatgtttaggagccaatatcagttgggaacaaaccccaaaagatgcagtttctgaaacagaagtggaacctgaagtggaacctgaagcttcgtattagttcgtagtatattttatatttcttgggttttgaggagacgaaacaagaagagatactctgaaggttctggtagaataccaatgctctctctgaagtagtgtacataatattcatatcatacattattatgtaatgtcccacaatagaaagacatagtgataaattattcatatgatatattatgccatgtcccataatagaaagacatagtgacaaaaattatatagaaaaaacaaacgacgtgacaccaccaaatactactcctagctctatctcccctttgaagatggctatagtgacttctataacacactcaccgacacatcacacacacacaaatccacatcacaagaaggaagaggagagaacgcaatagccgttgattcggatgtacttttcttactgtttccatcctacggccagcagtcactctgtttctctctaaaaaaaaacgatcacacgagtagtagtagtaatagaactataatagtctttgactatgtagaagagatggttcaaaggacaggggagaagttgaggcgggaactgtaagttgctttgggagcccagtttctagggacaacgtcggtggcagagagtgttttaccggcagacaaagtggtgagcttgatggagaatggtcccttgagtggccctccaatgatgcaccagttggctccccatacatgcttcatctctaaccattccctggctcctgcctgcaccaaacattcacaaaacacaagaaagcccatcagtctttacactttgagtctgtttttattgttactttttagaagactttgagtgatgtggtgtgcctttttagctagctggtcaataaaagatccatacatgtgctcactccactgagattcgtttcctcctttttcttatttagtgcagtaaaataaaataaaaagaagacttttgaagtggaagtgactttgtggtacgaaaaaagggaaattaaagaagtgcgtgcacgagtttggttattaaagataaaaagagagttacttggcgaatgtgcatggagccaatgtctccttctccatcttcaaactcgaccagcagagatagccaaaaatcagttgatccttcgttcacatggaatgctatgttcttccctctatatttgcatgcagtcctttttttattatgcaaaagaaagaaagaaggtaaaattatatcagtgagaaaaaagagatcaaatggtcaatggtcaagaaatggttgggaccatacaaaacgagatcgccgttaaagttacctcttttgtttaatacattcacacccattccaataaatctaataattatattaactctgttttagcctcttacctaaataattcctatttttctatatgctcgtgcactgtcacgagttagttattgaaagagcataaacattaataaatgacaagaataatgagaataatattaatatacgtaccggcgataaatgactgggattagtccacggttacggagaggccctgactctccggcaatagctaaccggccaaagacggcaccactgaggtcaaagtgagtgctggttttagagcagccgggacactcatcggtaattatgacggtaacggctctccgggaacaaatgctcttgtccaagcatcgaaccttgtaacaagctccgcaaccttcaccatttttgaagagaattggattcaccgctccaaccctcgcatgtaacggcttcacatccaccaacgtaccgtaaccacacgctcctcctacacaattgcggtatataagttaatgttagtgtttaactaggaatcactagactgtgaagtgtggttaattatgtgttatagacttataattaccgtcgctgccgtcaccgttggggcttccgtaccatgtagctactgcgggaagccaatgagagtttgacacgtggcgatttgtcgtagccaaagctgacgagccaatgagaagctgcaggacaatgcagagtgtggctaacatgactggaaaaagctgcattttgtgccggagttgtttttcccgagcagaatcagtgccggaaaagtgaataagttagtttgccgacagtgagagagtgagagtgagtttatgtgtgaattgatatgtcaatgttgttgttgttatatagacaaaaataaaaggtagaagcaaactgctttctgtggtttctctttttgttttctaaagttctatttgccggtttagtccctttgccattggtcttatttacggtgaaatgccactagaaattaggacccaccgacagttaaggcgtcgatttcgcacgatccagcgtgtcattgtcagagggacctaaaagggtactttagtaatttatgagattcgaccgttgaaatttcccgcagattctgtggtagagaagaggaatccgttaagagatacctgactcaatcctttaatttctgttttttttttccgatacagatttcttcacgatatatgttttttcatttattgatatcaagttagtttgttttcttatagataagagaacaaatactttaaatgcatttcaatataactgtttgtatgttatcagtatgtatagagtatagtctatgaatagagaggagtggatatgttacgcaaacgaaatcttagtgaccaatctcgtgtgcacaacgcatcaatcatttcgttctaaaaaatacatagatatgataatgttaacggtttttgcgctggtttgtatgatgtaacgaacaaccacctagagctttctaatgacaaattaggtttatatttttgttattactaactttggtggggcaagagatagtaactattggtcactcaggctcgaatctaattaataaaagtggatccacgatttgattgttttatcacaatgcacatgactactactttctactttgtattatacaaccctacttttctttaacgttgctttcttaaagccatggaaaaagaattaaaataaaagagatttttctagcgtcaattacggttttattatagatgattatatagagggacatagtggtatttaaagagtagtgacaaaaatatataaatagacatgactgatttgtttggtgtatgcacccaaattaatagtgcttgcaaatttttcacttcaagatttcacattcatcgtcatcttataaaaaaaattcaatcattggatactacaaaaaattgcagaaacgattcgtcattttggtagattttcattgttccgtatacgttgtataattagacgataatagaatgtgaaagagtggtgttaaagtcaaaatgtatactccatagagaatgacacagctgattcacatgaaataaatgaatgctaattaattaggtgggttttaaaaacattcgaatcttatcttgttcacatcagaatcagatcattcttgatcccaccaaaccctctctacccttcttccaatttacaccagatattgactttatacaattcaacattttgcgttagtctttgatttcaaaataataaacgaaatcatgtagtagaacttagtttcacatagttattaaagaggtaacaaatcgttgatgagcttcaccattatcaggattgatcctatactcctgtctcttcataatgagtatttccttgagcttactaagagacagatttcttgtcatagatattatagtaagaatcaaaacgaaggttgaaacttgaaatgaagacaatactctgcttcatttctcgttgtggtctgttacaagccgttaaaatttctcacctgggctcttctctgtttgggcctaacaatctatttcagcccaaattgtaacctagtttagtagttttagctccactcggttagctctttaaaccagaaacgaatactaaaccagatggacttgaaccaatattctcacagcaagcaacaacagccaatgatcaggttgcaaatatgtagctttatctactacacacactaacacagatatataagtttgatgacttcagcggtaaatatttgttatatgattactgaaatatgtatacttatcctagtatatgagatttctatttgaaaggtaacaaaaaagattagaaaatgttaaactcctccttgtgaacaccattagcattttaatcttcaagaattatgttctgtagccatgaacttaggcctacacaacaaaaacaaggttgcctgtgtcaatcaatacaagatgtgtggtcaaatgaagaatataactaaagttaggggttgaatatcgaaagatataaaaagctaaggagtcgaaataaaataatgaggaataagtttctcatttaattcttaacaaaataaactaatgttgaagtttatccatcccagcgggacatggtatctcttttcagaaaattcgaatctcacaccaataataaaaagaaactagacgacaaaaataaaactaaaaagtagatctccaccgtccatctaaaatccaacggttaataattgatacacacatgctttccgtgaatactttaaatacaagaattaatttccacgagtaaaaagaggagacaagcttttcttcaatttcggttaaaccattttcgttctttcttcttttaacaagaaaccaccgctctgtacaaaacaaagtctccgtcgtttcttctccgttctccggtcaattcgaattcctcagagagaaatttgtgctcgcgagttccgcgtgaaatacatggaaatgttggcggcgttggactcgcgttcttctctccatcttcatcgttccatgtctcgcgttgacctttttgccggtgttcgtatgaaaccatctcctacaagtcctgttccgaatacgcctcgaatatgtggaagtaaactctgttgattcgactcttcctcttccctttagtagttcctccgtttgtttttcctttgcatctgaatttccagatccaatcgaagctgtgattacctgtagcgtcttgtgtagtcttattttaggtaagtgatcttttctggtgaagaatttagaagattgtgtttgtactctgaaacttcttaggattgtggaattgggggttttcttttagggtttgttgagtcgtgaagttgtttgtgtctgttggatctctgaatggctgagaagaaagaattagggttaccaaagcctagtattaatttgaaagagcaattagcaagaactactctgaagaatctgaggttacaagggcatacttacattgagctacgtgaggatgggaaacgttttgtattcttctgcactttgtgtcttgctccttgctacagcgacacaatcttgcttgggcacttgaatggaaaccttcacaaggagagattggcatgtgctaggatcacacttcttggaacgaatccttggcctttcagtgatggtgtacttttctttgatagttcaactggagaagaagaagagaaatctccagtttctggtggtgaaggggttcctgatacgttggagcattgtagtgatgatgaaagatttgctattgtcaagtatgataacaacaaaacaaatggagataatgtgcctgctgcagttactgatgatgaacctagtcacgctgcagatgatctgctaatttctggtgtgctgatcaaggagagaactcttgatgttgaagcaaagttcattggttttggccgaatagctgccaggttgtttgaaacgaaaggacgcacaacttggattgataaactatggtgcgagtggttaggagacgagggtccttcagatgaggagaaggctacgatcccggagcatgactttgccattgtcacattctcctacttctacaatttgggtaggctgggtttgcttgatgatccgggccgtcttctcacatctagtcagtcagaatcagggaatggtgaggacagtggcaggaagagaaagaagtctttctcggatccagaggacaccagtgaatctctgtgtaatcagtatgactcttctgaggaggtttcttcaggtcataattcaaactcgtcaagagatctaatagctgattatgatgatagtctcatgagcaaaagagtcgtgaagaacagaacggtaagacgggagctgaggaggcaacaacgaatattttctgaaagaatatgcgaagtctgtaaacaaaagatgcttccagggaaagatgcggcagcaatactaaacatgaagacgggaaatcttgcttgtggcagcagaaacctcctgggggcgtttcatctatttcatgtgtcgtgtgtcgtacactggtttctcttctgtgagagtgaaatacttgggaacaagatggtgagtggaaaaggaaaaaagagatgcacaaagcatagtggtcagactggtgtaaagtggaatgagttggcaaacgatgtgagctggcaaatattttcggtgttctgtccagaatgccaaggcactggcataaatatcgaaggagctgtgattgagagagacacgtttccactttctcaggtatatatgtgtttgattcactcaaatagcgtttttcttaacgggtttgaacctaacgtatatgtcgatgtggtagacatggaggttccaggtgaaagtgagtgaaggtagaaaagcatgggttaaaaatccggagagattgaagaattgctcaaccggatttcattttccgcagcaggctgaggagacggaacagattccggttcaggtaaatattattgcacctcgtatccattttttattgtcgtgttacaaacttggtggtaaatagagagatcaaaatgtggatgatgcaggaggagagagtgcagatgatgaaactggttcgcttctaccgagtggagttgtaatgtaggaaacatactcatttcctcttgtgtaaataagggcttcgtctctcattttacagttcactgtaaatttacatttactttcttactatctgatgattactttgaagcccaatttattcttttgtctcaacttgttttcctgtctagagatttatgacttaaaactgtatagataccaacaaggaaattcgaactttttaaaacctataagaagtggaaataggcaaattaaattaaaacttttgcagatagaaaaaatcgatcccatgaatgagggattgtctcgatcggacccgacccataaggccatgaactcatctcatactagtctatgcttttaatgaaaccagctcactccaatcactttaccaattttctttgcaacatttttaatgtataaagaaagactcgtactgcaaattaatgtttctacttctttatctaacagtcgtattcgattcgccgttatcaatcaaatctagggccccctattctcacttttttttttctttttttttgtaaaagttggtttggttttaaacgattgtaatccgacataagcaacaccatttgcgtcgcattcgaatgccactatcagcttttttggagcacaaatctatttgagttgaagataagcctcctttttaacccatgctctcatcttcccacatcatcccatgatatatcgaataaagaagaagccatttggtgtcgtttctttctttggacgttattatatgctcatcatacaatttcaacgattcaagactcttaaaaatatacaaattgttattacatatatgcatactcattccaattggtatattatatacacatatatattataattagaagagaaatagacacataaacatgaagcaaagtagaaacaagtagactctgcttaatgactcctcagcctgcattgcccgtcgcctagaccggacattcatatcgcggtaaggtgccatgttgctcgaagactctccaaatagtctccggtataccatttcgcataccacacccatcaccggatcaggcattctatacatgtaacgttgactctccccttctcctaaacgttgaccaactcctcttaagtcataaaccggaccagttggtctgctcggtacatttgaaccggactggggagctttctgtcctcgtccgtagatcgggacaagcgtagcctcggagacatcagatttgcataccggacattttggtggttccctcttatgatcgtattgatcgactcgttgtcttgaattgttggacgcataagtccacttgtgaatgcagggccaacaaaacaggtggccacataaagtcacgaccgggtctcgaacctgatccaaacatatgttgcagtcgaagtctcctccagaatcaaccaatgttgtgtcgtcctcatccttctcaatctccattttactaaaacatacaagacaaacaaccattcacttgaccagtcgttgtttatttaatgagatttcacctaaataagtaaatagtaaatactaaagtctaattccaattagagatttataaaatcaatgatacttcatagaaacaagaaatatcatcaaaatatgaagatcaatatagattataacagaattgttgtgtatatacttagcatgatcgatcttgaatttaaaacttacactaaccaaaaaaaaaaaagaagaagattagacgcaaaaaagtaaggatcatattctttaacaagttgaagttacgaagacttgacctaatcactttctgtttccgacgctttgctctgttttcacttaatcccaaagcacgttattgtttaagaaaaaaagctaaataattaaagacaaaggagtggttgattaaacaaacaagtgatattatgatcctttaaaaaatgacatggtatatcgaaaacaatcatcttcttgcgtagcaactcaaaaacggtgcagatctactactaattcgatgcctttagatagacacacgcaacaatatataataagagtgatgattccagaaaaaagaaacgtactctttggaaagattgtaagtaccgatggatctcttctgtctttaagcctttggaaacttgagagagcttgtacaggttcatgcgacaatggcagaagaacagagaaaatgatttatttgggttaagagaatggggtaagaatgtttagatcgagggtggtgcagaagcaggagaccttattatacacacatacacaattatttttattcttattttcttaaggtgtgcaaaattaaaatccggacaagttatgattttaaagaggaagaaacgtctacctaattaaaaataagtagataaagtaacgaaacgccattcatcttttttttcttacatgtctgtctttatttcatgaaaaggtcagcaacggatagcatcgttttaaaaaaaagtaaacaagataatataattatttatacacaactaaatatatatttatagaaaaatatttattttagtttgaataaaattgtatgttgaaaaaaaagtatgaattggaaatatgccctaatgagtccatgagaccatgacttttgtaggggaaatatacacagaaattgcaaaattcccccataactttatcccaatatcatattcataagataagaatttggctctgaaaaaaacaaaagataagaatttggcagtttctgtttctggcaacacaatagtagatactgaaccaagctcgatgacgtggcactccatggctgcaccgttactccatcaaattcacttgaaaaaaaaaacaaaaaaaaaatgctagtaattttgaaaattctgcttattttggtactttacttttttttttatggaaattgtaactattaggtgttgagtgaataacaatggcaatttggtaagttgtttattcaaagttggaactggagaatactaagtttgcgactaaagccttaatcaaaggccttatcaaccaatagttgaattagtttatagaccacaaagataattaggttacacgtcacggaagcaaggagctattggtgtcaccagaccatagtatttaatttcaagtctattaattgtagaaggcaacccaaaatccactccttgaaataataaaacactgtcttaaattcgtatttgttgagtccttcaccaccattatgtctgattctgcttatatacaaatttaagtaaggttgttagacggttcatgtctccgaatctttgatcaattgtaaagtgtaatgtaaaatagttttttttttttttaattttaaatttgcgactactatatctaaaagtctactatcaactacaacttcacttgtaaattgtaatactctcgaatagatcatttttgatgaaacaagttagacaatcatccaaaattaatcaccaatttgagtgcctccgaatttattcacaatattcattattgaaaagcatttttggatatggccaaccaataaaatgaaaattgaactttaaaaaaaaaaaactactataccaacaatgtaaaaacaatgtgtgtgttcaccatcattagaacaagatctactcaatgttttaaatgtatatataatatgttttgcgcaaaaaaacgtatatgtaatattatatatatcacgttcatgataatgttttcaaattctcatatgaaattattggagcaagttgcatttacgatccggagaactgagccaagaaatgggcggttctcaatttattatgggtattattaaccagtggtggttgaaccaaaattaatctattcattttctctatcaaactttttgttactttgatggtttgtctcaatcgattaaaatagtaactagttattttgttttggcatgtcactgaattgatgttgtttcttctaatttatgatccgctatatccgcagcatttttctctcctcctataactctaatggaaacaggaaaaagaaaaaacaagaaacgattagaaactcaaatgtgacaaaaagtcaaaaaatagaggaggaaacaaaaacatgaagattactcatcattgtttggtttctcttctctctatcctccttttgtctggattcgctttctctcatcacatctctcgtaaattacaattatctaatacttttactcgttttattaaaaatattgttgaagtttctttgaaataatttatgacatttctatgtgcagttgatgaatttgagtcacacccatccacaagccgagctcttcttcaggcaaaggcaagtaagtaatataactcccaaaatttacaccattgattgtaatcatgtgttttagaaacaagcttcattgatgattattagcttaataagcaaaatattccatgatcattacgttaatgacattttaacagcatgcaaagaagattttgcggcaaagaattacacaatcataacgagtaaatgcaaaggaccaaattacccggccaaagtatgttgttcggccttcaaggactttgcttgcccattcgcggaagttcttaacgatgaaaagacagattgtgcctccacaatgtttagctacatcaatctctacggtcgttatcctcctggaatattcgctaacatgtgcaaagaaggcaaagaaggtctcgattgcaccgacgtcacccctacatcatcttcccatgcatcgatccctcttgtttccacacacgttttgctaatcaccgtttccatcttgtttcacctcttctaaagacttgtaaatgttacaatatgagttatatattgcattccattgttagttgctttgtgagcatagatgtaaatgtttgatttttgtttgcactctcattaacatcattcgttatgcccggtgtcgataactctaccagtcgaccttaaggaactcaagggattgcatgactaagttccgagttccaatcctaggcaatgaataataattctagaacatgtgtgtttggtacacatcataacactagcattcctaacatgttttgtggatcaagaacatgtgtgtttggtcattaatgggctgagctaatctcttaggccatatagagtcactagtttatttatgaagacatgtttggtaaaccaaatagaagaaacatgaacctcataaatcatgcctcttgtcttggtggtacactttaagccgaagttacaatagtgatgtgaaagaaagaaaaaaaacgaaacttaaaatcagtaaatctttgtagttaatcaaatggggtaaacaataagaacccttacaaatcagaacaatgcaaatgttatcggtgagcagtaacaagcgtctcgatgaatcgtaacccatcaaaccttggagcaaacttctcatctcccccatcttccgacgaacccttcttcttcctctgtttttcctttgcctcctaaccacaatcagcagctaaaaattattctttacacatccgaatccatgtaaaagttaaaaactctccaactttgtaatttgataaatttttgactatgagaaacttattgtgagtacttgaaacagaggaggaactttaaatgctaccgagaaacaaataaacaagagcttgattcttctttttttacctgacgagagagattagattccggcgaagagaatgacacggaggtgttggtagagccggcggagatcgccgtggcagaagccgcgacagagatggaggctgcgatgattccagttttcttcatgtcttgatcttaaactttcccaaattcgtggactctgtttatacttttttttgtttttctgtgttaataaaataaaatctgcaaccgtaggcagatgagagaaaaatgtgggaaaaattgaggtgttggcttcgatagtcgacggtttatatacgcaatggggacaaaagttaaattacgctagttgaccaatttatgtatcgataaagtatgttaccgttttacccttttctaaataccttaagcatgatttaattgcgttaattacagctaagatcattggtaaacgtttttgaatagaatgatttatcttctagaagaatttaattggagtaagaatgggtagcgtgaaaaataagggggttagtatggtcaaagcattagaaaaaaagaaatgtactttgagccttgaagtcagaaccacacaaagagaaacatgattggttgatctgttaaatgaaaatgggtccatcgttggttggtaagtaacccacgtgtccggacaatgttgcaactatgagttggtgttttgagaatgttaaaagtcagctttgtattggacgattatgcccctcttatttctcgtttattactgttggtattgtatgctcataagataaggttcaagaaaagaaatgttcataagataaggtcgaaacactaaatgacgggtgaacaatggcattgaacaagtggatctgattatttgtctttgagagcatatctcaaatgcaaattgatgtaaactgatttgtggataccaaacctaacaagtcccatatggttttctggtgagatttctctgcgtcaaatttaatgttgaacacatttattctttgataaagacatcacaatctcgttaagttttaatactcgtctctatatattttacgtccggtcactatttatgaaaaaaacagagtagtagaataagttattaacacatgatcgtacaaaagcatcttatggtgacgtataggatcataatgatatgattaataaagttttgattaaagatgtatggatacaaatgaaagaaaaaagtttgcggctatatctctttagggatgggttcttaataattaaaattacttttgaaggactttatcgtttgcgcaatctcataatcatgtccacatatctctactttttcaccggccaaaacttattcggtccatatccgtatcttaacgtgaattattgatcatgccgcaagaccaacaagcccacaacttattttactcttacatgtgtaaaacaattaacaaccacagtgattgtggacaggagaagatgaaacaactcaatgtaagtaacccaacacaaccggtcaatcggtcattcttgtgaactggtttcattacaagaacgtgtaccaactatctctaagcaaacatgcagaggctatgatatcatacatcatatatcaacaagttaccaaaaaaaacactcgtacagtcgtactcttgatgtaacttccaaataatttttatatataaccggttcatgtttctggtacatgctgacaactacaatatgttcttcatacaagtttagctgaccaatgtgactacagatcccaaaaactagcagcagtaagatggttggattataacacaagaccaagatcaaagcccttccaatttctcaagaactcacatatcactcactcctcaagaagaacaatttactaacttgagatccctcgtatcttaagaaaacaccttagggaagaaacaatatcagcgttgagaacctggtttcctccacaatgcatttggcacacatcggaactatggattcaaagagcaccaaaacgagtctatatctctcagttttatgccaatgccaacagagctcaaatggcacccataaaaacatcaaaacagtcttctttatagataataagaatataagatatctagcctagcaaaaagatcgaaactttgggtttcccccttcgttacctcaatcctcaataaaaaaaaattccaatgaaacgaagtgaacgaacgacgtcgttctattttttaggttgcaaataattgaaaacaaataaacgggacaaattcacaagtaatcaatatatttagggacgaaattacaaatatttaatagaaaaacaagagtttggctgtttcctccttctttcatccttatcacaagtctgaactaaaaaacctcaattgtaataaacaaattaaaaagcaaaaatataataaagagaaaacaaacgtttttttcctgcttgcttctctctttgcttgcgttttctcaaaggttcgaagaaaacgaagaaccacgcttttgcttttttcccaagacttaatctaaaaagcgagatttccttctttcgattcttttttctcaatctggttttcagtcttcggattcaatggcgtctggatcttcgggtcgggtcaactcaggatccaaaggtttcgattttggctccgatgatatcctttgctcttatgatgactacaccaaccaagactcctctaatggtcctcactccgatcctgcgatcgctgcttccaactccaacaaggttaaccacactgatttacccttttcttcctttttttaggttcgggtattttgctcgatcggcgatttttgtttgatttttgggaatctagagttttgatttgtggtttgctcagagatacgtgtaaaaacaatttcgaggagtcaatatcgaactagtcctcttagtgttgagctaatttagctagttatttctatgttggttgtgacttatgaggagctatgttctgtggaaacgccttagctatgaatctgacttggaactagagcttgttaagctgtgcttgtcctccttattttcaattggaagaaaatttcatccacttttgatcagatatactgagcgagtctttgtttattgtttcatttttttgcttgtaggaattccataaaacaaggatggcaaggtcttcggttttccctacaagctcttacagtccaccagaggattctttgagccaagacattactgacactgtcgaaaggaccatgaagatgtatgctgataacatgatgcgctttcttgaaggcctcagttcacgcttgtctcagcttgaactctactgctacaaccttgataagaccattggagaaatgagatcggagttgactcatgcacatgaggatgccgatgtgaagcttagatctctcgacaaacatcttcaagaggtttgttattgttatgcaatgtttttaatcctttttgttaattttagtttgtaaaactctgatcagtaattgaccatggatgttctgttgtaggtgcataggtctgtccagattcttagagacaaacaagagctagcagatactcagaaagagctagcgaagctacaacttgtgcagaaagagtcatcttcgtcgtctcactctcaacatggtgaggaccgtgtcgccactcctgttccagagcctaagaagagcgagaacacctctgatgcacacaaccagcagcttgcacttgctttgcctcaccaaatagccccacagccacaggtgcagccgcagccacagccacaacaacatcagtattacatgcctcctcctcctacacagcttcaaaacacacctgcaccggtgcccgtttctactccaccatcacaacttcaagcaccaccagcgcagagtcagttcatgcccccacctcctgctccatctcacccaagctcagcccaaactcagtcattcccgcagtaccagcaaaactggccaccccaaccacaagccaggccacagtcaagtggaggctacccaacatactcgcctgcaccaccaggcaaccaaccgccagtagaatcgttgccaagcagcatgcagatgcaatcaccatactctggacctcctcaacagtctatgcaagcttacggatacggtgctgcaccaccaccacaggctcctcctcagcagacaaagatgtcttacagcccccagactggcgatgggtatctaccctcaggacctcctcctccttccgggtatgccaatgccatgtatgaaggtgggcgaatgcaatacccaccacctcagccgcagcagcagcagcagcaagcccattacttgcaaggtccacaaggtggtggatactctccccagccgcaccaggcaggtggcggtaacattggtgcaccacctgtgttgagatcaaaatacggtgaactgatagagaagctagtgagcatgggtttcagaggagaccatgtcatggctgttattcagcggatggaagagagtggccaacccatcgacttcaacaccctcctcgacagattgagtgggcagtcctcaggaggacctcccagaggatggtgatgccatggctcccctctacttgtgtatctttcaaaataaaactgtgcttcctcttcctcctcctctttgcgttactctatagaggccctagttttattgggcccaatagattgggtctgttgtgtattgttataagactcaatttatatttctttaaaaagccttattatttgtgtatgtgttactttcaatgtttttcttgaacccaaaatctcttatcaatgatttgctgctttctttacttcacttttgttttatatagattgtgaaaattaataacctgaataacaagcttttaatattaaatggaaattagttcctataccaaaaaacctttcaaatcatgaaatttgtgtatttagaaaaattggaaaaataagaaaaatggaaaaaaaaatgtcaaaaatagatttgcgtaaatccttaaaaccaaaaaacaaatagaaaaaaaaaactgcgggaaaggaaaatagaagaggcgccaaagattttatttcaagcagcgcggttagagtctcgcgccaataaacataccgccacaatctccttctacataaacagccctaatcctctatctcaatctcaatctctcattcatcatcctcttttttcaatctcgtttaaaattaacataatgatgacgccagtgaagaaaagtatcgccattagaccggtgtcgttctacggaaacgggcttcctcgtcctcgtttcttcgataatcctaagttcaatgattaccgtgttgatcctcccctctctgtgctagatcctcttctctcatgggcgagagacgctcactggtcaatgggtggtctcaacttcacgcgtctccgtctccaaggccggatcgaaggaaacgtcaacaagctccgtgcacagcttgagaaatccacccctgtgaaactcgaatctggaaggaagaagaagagatctggttctgagtctcctccttctgctccgattgtggtgaaacgaaggaggtacttagatctgaacgattctgatgatgaggaagtcggatctgaagatgaaggtgtggttagaatcaggagaaaactctctgatgattttgatagagtcgctgaagaaagcaagactaaacttgttgaagctaacaagaaatcgattaaatctgagtttgtggagaagaagagattgattgagaagaagaagatcgtaaaagttaacaagacaagttcaacgaggtcatctccaagactggctaagcgtagctctaattagttttcatatttagtctcttcaataatttctcttagggtttagaattgttgagtacttagtttgtttttttgtatttgtgcttataaatatggatttatctatgaactctgaccaatgaacttgaatgcatcaagatatttttactcactgagttgattcttgtatacaacaaaaatgagaatcagatttcactgtagagaaaaaagacagtttacatgtgattctctcaatgtctgtgagaacaaagttctttcaacttttgttccttaagacgtcctgtgactttacccaatctgcaagattgttctatcatcaatttgtaaatggaatcttgttcatgtggaacaatcccaaagtcatcgttgaatgtttccatgccttccatgaatagctgccacactaatgtgcctgcacctgacttctttcttttggctgatttgtaaaccacgtcgaagatgattctgtagaacttatctcgctgcgatggttcgtagtccttgttctggtttgataggccaaactctgtgaagagaactggcttctttagttctttcaatccatcttctatgtgagattgcatccatttcaccacaaactttagcttctcttcaaatgtctgattatgaaacctgcccatatatacatttgtagcagaataaaacaagtgagaaacctgcacctgaagagctcaatgcaattatatcttgattctctgatccagctcacttaccagtgatcagggtagatatgaacggatgcaaaatctatgtttgaggagttagagttttgaacaaagtctgttccgagctgggatgcccactgttctggattaactgtgagccctttcgggctattaggaccatagaagccttccagacctactgtgaggagatgcttgtcatcgattgacttaatgaatcccgtcatttcgtctatccaatcctgtgatccagcaaagaaatacataaatatatttgctgaataagaaacaatctgaacgattccaagtggcaagtgaaatggaatactcacttggagagttttgccagagacatcagtcgtgcatcgaggctcgtttatcaactcccaagcgaaaatcgtaggatcgtttctgtactctattcccgttacagagttcttcctggtgagcagaacctgcgaattaggaaataatcattcaatctttactcattaaacttcctctcactatcactcaatgattaaaatgttcaatcataatcagcaagagaccattaccttgagataattcttgaagtaattgcggatagatggatcaaagaagaaggaatcattggaagaactaagaccaacaccttcttgccatgcccatttcacatactgagtcttccctccataagcttgcaagttgttcactaagctaagcaacaatctaacatcatgctttctcgcttctgcaattacatgatccaaagcctaaccaacattatacaaatcccattaaacaaggacagagagagatcaccacataactgaaattataaaaaagaggaagaatcatcaaaacctgaaagactcgctcatcgaatcggccaggagagatctgaagagcattgtagccaccgtcattgaaagcccaagttctacaaacagtgagacccattttagctccagcttcaagcatttcaccgacaaggtttctgctatgttcatcaaccgcatggtccatgaaccaatacgagttccacccatttacataaagaggcttatcatccaccacaaactgagttccgttccttttcacaaaccctaactttgctttccctttgtgattcaaccacaaatctcgaaatgatagatagatgaaagctgcacatataaaaaaacctagaattcgtagcattggcctgttccttgtgggaaccatgcttctgccacctcctgcttcactgcttcacacacacacacacagaaatttcaaacccagaattggagaaagagctccttttttagtcggtgcccacccagaagaaaaagtctgtgccttgttccgtgaatttctctgaaacccaaaccttttataaaacccagacggaaaaatcaatcgtttgtagaaaattagcaaagatttgaaaaaatagctcgctcaataacgctttaagcaaacaagggagatacgaacaagcagaagaaattgaataatcacagacacagatctatgtatctttgtatttatattagttgtttattagttatttagtttcactgtatctgaaacttaaaggacccaaattactatatttttctattaatttttttacaaaaaaataatatttttctattaattctaattttcttttgtgaaagaagaaaatagcttgaaatagcccttttgtattttaccttgcaaaagggacaaggcataatgtgatgttttaaaaaaaaaaaaattacacaaggtatgattttacactctatttcgtaagttgaaattacttataaaatatcttcataaaaattggatatttataaataaaaaaatggttgaaggggaaagaacagaacttgacccaccaaagaagaggaaaaagcacaggaattaacctggtatttagatttagaactaaaagagactaatatgttgttggaaactttaaaagaaggaatttaattttgatgagtatcacaggaaaaaaaatacatttgaatctcttaggaaaaaaaataaacagggccacatgcgttggagtgtcatcaacttcagatatttgagaaaaaatgttcattgttcaatcatgtgatgtgaattgtgagcccaactcatttagaacatacaaaggttaattctgagaagacaaaacaaatcaaataattacatttacatagaaaatatttagcttctgcataaattcaacatattcagtagcatatttatttctttgttctcttgaaaatcacttttgaggtgttctccacgttgtttatgatgataaaagagcatagataggcttgacaattacatttgtggtaagattctttttatccttgttgtttagtcaaaattgtataaattacaatgctaaattatgtgaacctgttcatcacagtcgtctccgcttttgtatttttctaatgttttgttaagttcttagaatatagggtaacagtactatctattttctctgtcgacattagaaaacttgatgcgtgtgtgtggtaaatacaataataaataaatagaagacagaagtaaaatactttgaatgctgtcggtgactgcttttattaacagttaacacccaaagagtcattttaataatactaaggaacaatgtacagtattaaatttttttggatattttgctagctattttttgtaatgcaaagtgtaaagttatgtattagccatctagttttgcaatcaaattagtgtaaaggaaaaaaaaagagagataaaagcagccttactgctaattttggaccataatcatttaattattatatagtattagtatatctaaaggagaaacattcaaacagaccaattattcttttgaaggccatgtcatgatttactaccaccaaccaatggcattcgataatatttgaagacaaagcaaaccaaatcaaagtaacaatactaacagatttttgagaattactcattgtggataaagattcaagagcattgaggatcgatttactcatgaaggatccagagcattgaatgtatgtacatattttgtcaaatattcataattatatctttgaattatcgtatgaacttttatcaaaaaaagaattatcgtatgaactatgcattgacttggattgagcatcttcttacacttgttattattgctacattatgaaaaattggtgcaacttatcatcttttaagctttttactaaccaacttcagcttggaccatacctaatcacatgcacttcctccttcaaacacaatttatcgtctggcctagtagatactgtatttaatacgttgtcactaaaacagttctccactatatacgataaaatgggccattaatggtaacccgtaagccccaatgggccttctaacccatattatagttcaggtttcagaagctcttccatggacagagacagagaatgaccgacaaacaaagagaccaaaagaagaatctgtgttctctcaaataaataaacaaaagtaatgtaaattacttcacgtgtcggtattgtgacgtggaagcattctctctgacatcatcagaaaacacatcaatccaacaaagaagatcgatattttcagattcaagaaatcaaatcttgttaaactaaagtacaaataataatgaggaaagatttcaatatactagctgtgaatgttttcgttaatgacaagaattcaaaaaaacgaatcaagaagatgaagagtaagagttaaagaagacgaagtaagcaagaagagcacaaagaagagccacaaagtttccttctttaagaagaaccctaaac

SEQ ID NO: 1388 - DNA, 43277 bp, Arabidopsis thaliana
gtgttattgaaatgtaaagagccaataaagtcgccgggaagtaaatcaaaggtaaaacctttctcgccgatgaatatagagctcttccggcgagatgaggatcggaattcttgacttggagatttacattcccgctcagtttgagctttttcccgattctatctctgaaactgtcggagaatggagcttttccggtgaggttattgttctctagattgatttcacgagcagagtccagaaacccaaactcctccgggatttgtccgtcgagattgttgttgtcaagagctagaaagcagagatttttaagactcgaacccattgaagctgggatgtttccttcaagacccatccttgagaatccaatccccgaaataccctcgagattcttccaaatcgccggtatacgaccaccgagcttgttcccactcagatgaacctctctcaaactggacatctccgctagaaacagaggaacgccgaaattcccgaaacggttgtaactcaagtctaaaaatacgagctttttcaaatttccgacgccggaagggacctctccggtgaactcattgaagctgaggtctagcttgagaagctctgtcaagtctccgatggaatcaggggcgtttccgttgataaagttatggctaaagtctagaacttttagattcttcagacgagacgttgcgttcgccggaaacccaccggtcaagctgtttctggagagtgtaatctcctctagactcaccaaatcgccgatttgacccggaattgacccgtgaaacccgttaccggtaagaactaatcttctcagctttgtgaaattaccgatcatggctccgatctcgccgacgagagatgggttttcgatgaacaccaactcttcgagaacagagccgaaatcctccgggactgttaacggcaacgaggcacgagcgtcggtgaagcatttgtagaagaaaagcttacgaaggtgtttgaaagcagtaaagaggagaggatcaagcgtggcattagaagagcaaggagggttttgagtgtaatccgagaggtagcctaaatggaactccgtgacgtgaacagacgttgcgacgccgttttgagaagcgtagaggttatcgcaaacgacgccgtcaggtggtgaagcgcagatgtcgtcggggaagatggttcgccatgagatggctgagttgactgagtcgagaactcggtagaccgcttcttgctccgacgggtctagagcgagttgtggtgacgcattttcgtcgtcgtcgctttgttggctggtgatgagtgtagcggtgaagagaaagaggaggagaagagagaggttagtaaaagacgccatgaaagcagagagagagagcaaaaagcttgcagctttgttttttgtttggattgtttggttttgggtttgttgctaacgagcgatacgtacctttttatgggttcatgcttcgtcatgtcctctttaggtgaaaatacatattaacccctacttgataaaccgagtgatatttaatgaagcttttcattcctataaaattgaaagaaaacacaatttttgttgttgttgcaagggttaaaaatatcagcatttactaattcatgtattttttcttcactattcagtattcacagtcctgtaatttttcaataataaaaaaaaagattcgtagttaaaaacggaaggggtaagatagtaaaaaaacagaaaatggtacaaaagcttcacgttccgtgggtaaaaaacttcaaaggtgaaggaaaaagcaagttgggaccataccggacgaaaatttgcagagagaaagacgacaccatttcgatttttaatgcacattgactaaaaaccacccttttaaacatatcttcttcttttttaacttgatcggcaactttcagagataccatttccaaaaaatttcattcaataaagaaacgtctaataaatacattatgaaattcaaatgtgactactattttgcctcattgataacaatgaatgaataaatgcaacaaaaagctccacaaaatagtatcatcttttatttaatttccacttcactttttgttggggatcaaatattattctcatcaatacgttatagtcaaaataaaagaaaagacaaaagaaaaaaaaaagctgaatagtagtaacagagacagaggagaggagagggggcaaacggcggaggaatcgacaaggacgcgcagtagccgccgaagggaacagtgtctttgtcgtacgaaagcgacggcttaagaagtcttccaatatattatcgacacgtgttaatctcttaccggaaacggcacaggtctcacgcatgccatttctatttccggttcctgcccttcgatgtccctactgtgccagtgtttcagacccttcatttattttttttggtttttacttatctagttattttttagctgtcgctgtttaaattctttgtacgacaaaaaatgtacaatgccttttgcagttgttcttggtcctcgttgttttcctataagtaatcaaaccaaattaatgatttctcttatttcggaaattaaatgtaacgttcttcgaatcaaaacgttcgataaatgactaataaaataatttattcaaaaaaacaaatatgggcctaaatatatcacgcaggcccattatgataatattagaagccgacctcgtcccctctaaaaccctatttgttttgtaaatgatgtgatcgtctctatttatattccggttttgagatttgttaagttgttcctatactttcttttttcagctacgtcgacgcttaattacttgtggactctcctgagcttgttgctatggattcagatacagtctacagagacgcttcatctacccttactttccgatgaggtcgaggatgaggtttggtttcttctctctttgctttactcttattattagatgccagtttcttaaaatctagtggattctttaggttcatgagtcatgaccaaaattattgttgtatagtctttttttgtttttgggtgattcgtgaagttcatgactaaatgatgtgacaaaaaaaaaaaaaaaatcaacaagtttttctcatcaattcctcaaactaatgtcaccatttagacccaatattagtcaaaacagaaattgtttgaatagtaacgatttgctattttcctctttataaaactactctataatccatattaaaaaaatatatataaatcgaagtaaaccttttaacgttggaacataaaaagaaacaaagactttcgagagagaggtagtgaaaactcttttgaagatgtcaaattcttactcgaagacaaaaagatctactactaatctactattatcgtagtcgtacaaatattataactagtgagacccaccagcagaaacaaaacacaaggaagacttcgtgataacgagacttgtctgattcttcaataagctcacggatttctcctcaaaatcctaatccaatcatttctccaattctccaaggagtttggtaatacacaaataacatggaagacgttagaagaagaaacagaggacatcctctgctcagatccaagaagagaggagaaggctacaaccatggcttctcaccgtctcagattcaatctcttgccgtcatctgtcaaactttcctccctccggagaccacgtcggaacagcaagctgttaattccttccacgtagcctcctctactcaaccaccattcactgatgaggttctctctctctatcctctgtttctaattttgtattcaagatcttgcttcgatttaggaatagttctattatagatagtgaagttggtcatgttattttcttgttgtttgatttggatttaaatctaggtggcggagatgatagtgaaaaacggacgatcagaagcagtcaaagttttgagaatcatattgatgattttgtcattcagatttggaactttgttgctttgtgggtctctctgtcttgataagagttggccttttgttcttaaattctctcaacttccattggataaaagagaagcgatcttgagaaattggtctagacaaagtggattccttcttccatttcgtatcactttcttccttgcaaaattctacaccctcttctacttcttctcccagacggatgagaatctgaagaatcctgcactggaagctatagggtattgcatcgatgggacagagagaagtagcaacaagaagagtgaagcagatgagaagcgacgacctctagagaaagggatcattgaaactatgcatgagagtgacgtaaccatcacacaatctctaactgaaaaaggtgttcatgttgctagagacgatggtgacaatgtgtacaggatcagatgcgatgcggttgttgtaggctcaggaagtggaggaggtgttgcagctgcaaacctagctaaagctggattgaaagtcttggttctagagaaaggaaactactttacagctcatgactattcgggtctagaagttccgtctatgctcgagttatacgaaaaaggcggccttttgactacggttgatgggaaatttatgctcttggctggttcagctgttggaggaggtacagctgttaattggtctgcatctataaggacaccggatcatgttttgcaggaatggtctgaagggagtaagatcaagttttttggtagccaagaatatcagtctgcaatggatgaagttacgataaggattggtgtcacggaaagatgtgtcaaacacgggtttcagaatcaggttctgcggaaagggtgcgagagactcggtttgcaggtagaatcagttccaaggaactcaccagaggatcattactgtggcttgtgcgggtatggatgtagagcaggagccaagaacgggacagatcaaacctggttggttgatgctgtagagaatggtgcagtgatcctgacagggatcaaagctgagagatttgtattagtagacaacactagtagtagcaatgagagaaagaaacgatgtgtgggagtgtttgctagctctgttggaggaaagattgggaagaagtttattatcgaagctcgagtaacggtttcatccgctggatcgctgttaacaccgcctctgatgctttcgagtgggctaaagaacccgaacattggaaggaacttaaagctgcacccggttctgatgacatggggatacttcccggagaaagattctgagttctccgggaaaatgtatgagggagggatcatcacgtccgtccatcatatgaatgatactgaatctggatgcaaagcaatactggagaatccactgataggaccagcttcttacgcagggttgagcccgtgggtttcaggaccagaccttaaagagaggatgattaagtacggaagaacagctcatctttttgctctggttcgggacttagggtcaggtgaggttatgatggaaaacgaagttacatacaggacaaccaagaaagatagagagaatctgagggcaggtcttagacaagctttgcgggtttcggttgcagctggtgcagttgaagtcggaacatataggagtgatggacagaagatgaagtgtgaggcaattactaaagaagccatggaagagtttctagacgaagttgatgctgttggtggggttggcacaaaaggagagtattggacgacgtacttctcggctcaccagatgggtagttgtaggatgggagtcaccgcggaggaaggtgcgttggatgagaatggtgagagctgggaagcagaggggttgtttgtttgtgatggaagtatattgccatcagctgttggggttaacccaatgatcaccattcagtctactgcttactgcatctcctcaaagatagttgactcgctgcaaaacaaaacaaaagtatagagaagtaaaaaaagaaagaactgaaaccatcccattagtattcatatcgaataaatatgtttttccttgcaagacaaattttgtttaagaatcatggaataacttatcttgacgacaacaaagatgtaaacaaatgatatatcatatatgcaccaagattcaagaacgttaaagctgtttttttttttgttttttttgataaaccctatcggctgatctggtcagcaccggtagaaatgcaccgaaatacttcagaatggacttctttccgaaggaccacctcactatctgtcccgaatttggatgccttccgactaatgccagggggtaatcaggccgcctgtatttctgcctactagataaaccaattgggccaaatcccaactgacagaattcccaaacaaatgtgatttttgtttcagagaggatcgaacccaggtctggaagtttcacccttccccaaatcttctcctaccactggaccacagatgcttgggcttaaagctgtttgtttgtttttttttttttttttttttgttgttgtaaagtttactatgtttcttaaaattttgtcgtcaaaatgtaaagttaatatttacgtgactatacttaacttttatgaaaatgtaaaggatataggaatttccttattaacatacaaacgggagctgtctataaaatataatcgtctcgaaacgaagaagaacgaaacataaacaaaagtgactaaacaaaaaaatcgttgtgttgcaaagaacaagatgaatagtgctacctcatatgccatagccgtaatcgttgtcttcttcgtcatcctttcggctattttgtcgtgctggtttagagagattctaaatttttttagagacaagagtacgactgatgtctctgcgagtgaataattccctccgtcgattaaggtaatcaacattttttctctgaaaagtatagttaataattgcaggaattgtgatgactaaatagttctttttttttggtgtggataggaacgattattttggagatgcaaaatcagagtagggcgggttgttgaatttgttttgtttgttttagtatgactaattgttttaagggttctttatttttatgctatagattattgaattattagattatccttcaatagttgcatctatcgtggtgtattgtttgtgtttggcgattttacatacaacagttatccaaaaaaaaaggattctaacaaacaaacactacaaagattatgcaagatctccaagataattccacaagagttcatacttatcttgataaagaaaaacgtaatatctatgataatatgcaaaactatttacaagttttaagaaaagcaaaaaatcaattaaaaaatcacttaaaaaagactttatattagttaataacttaataaacacttcccaaacctaaatgcacaacaaacgcatggccgaaaccgaaacgaaacacacaacacaaaccctgctcgggtacgtcgtcggaaaaatagaaagtcaagcaaaagcggcaggactcggcggagagatctctgaccagctgcaggtaagtcaatgggatcacttcgccgtagtacgagcaaccgcagccggaagaagggtacggcggtgaagatgaataggatgccttcatctctatcgcctcctactccgccttgtagtgcaatcgtgggagggacggggaagtcaaagaagagaagaggaggagtctgtctatggacgaggtttgatcggactggattcatggaagtggctggatgtgacaagagcaccatcatcgaacgttcttctgtttcggctaaggatttaagaactgccttctcgcactcttctaaaattctaggtatacacacgtttgtgtcttttttgctgactagttttcacaacagacaataacaaatccatgtcttgctatgacgcagccagagagaaagctattgtcctgaatttagaggtcataaaggcggtaattacttcagaacaagttatgttgttggattctctccgtcctgaagttcttacactcactgaccgactaaagcatcactttcctcggaaggatggtcctgaaaatatattgcaagcttcttctcatggtcatcaagaaggtggagaagagggtttgaagagtaagcttccttttgaatttcgggtactagagattgcattcgaggtcttctgctcatttgttgatagcaatgtggtagaccttgagacacaagcttggtctattcttgatgaactaaccaagaaagtcagcaatgagaatcttaaagacctaagaagtttaaaaactagtctcacccacttgctagcccgtgtacaaaaggtaaaaggttattaccttttccaatgatactataatgttgtgtgttggacggaaacataaaagctatagtacattattcaggtgagagatgaaatcgaacatttcttagatgacaaggaagacatggaagacttatacttaacgaggaaatggattcaaaaccaacaaaccgaggcagcatcaaatagcattgtctcccaaccaaatcttcaacggcacacatcaaacagaataagcaccagtatggtgacggaggaagatgacattgatgatatggagatgttgcttgaggcatacttcatgcaactagagggaatgcggaacaaaattcttttggtaagtagtaaatgtacctaaataggtctaagaaaaccatataagttttagatgcaagctcgggttatgtttggttgttatgtgttaatgcccggtccttggtaatttaatatttttttgaattgcagatgaaggagcatattgacagcacagaagcctacgtgaagatactacagaatagtagacgtaacggactgatccacctaatgatgcttgtgaatataggcaattatgcaataactgcagggacagtggtggtcaacttgttcggtatgaatataccaattggattgtatagcacacctgacatctttggttacgttgtgtgggctgtcgttgcgctttgcattgtgcttttcatagtcaccgttggttacgccaagtggaagaagctacttgactgataagagactaaacacattaggtttagtcattatgagattagctttgtggaattcattttttttttagtttgctttttcttattgattcaatgcttttgtttttatgttatggatttttgcattaatagtttatccttcaaacaatttttctataaaaggagctggcttcttgatatatgtatgcatcattggttacgaatcaacgtgttagggaaagcacagattgacgagtaaaatccattacttgggaacaagtttatatttgcatagaacatacaaaaatgttaacaatctatgagtgaagtttatgtaaattttcctagactgaccttttgagtgaaactactctatgcccgttacaaactaacagtacggggttacattagccttgtcgacacacgaaggcctcttcgctttatagtagaaatgcgcaatcatatgaaccaattcatccgccgtgcgaaagtctgcatcaagttcaatacgctatgataatctattgctcacacatattgcaaaaaaacatgaaaacaacgttagcaacatagcttatcacctttctccctgtacagaatccggtttccgcgtaagaagagaatctgtgggcattccttagctttaagagcatatgccaaatctgtctcgatgttcaggtcaatcttaaccgcctgtttcataaaacatggtgattcttgttaacagagagcagccacattaacatgtaatcacaccaagagagattagtacacaaagagtaatgttcaagttaaaactgcaactagagaaggctttcgacatacccgtggaggtaatcgatctttcgcatcccaataaactttgatagctttctcaagctccttcaatgtcttccagttatcactagctctataaaacgcacaacaactcaaaaaattattccaacagtagtagattttggtcactctaagaacaagtttcagtttttatactcattgcagttaattgatcatggaatctaactcaaatggctctttcaacttgtaatcatagtctagataatgttgtgaaggaaaaagaacaaagctttcatagttctactatgcacaccaagtgtttgtgaaaattcgtcaatgaaataacaaagcttataccttttgtatcgctcgaatacaaggacaacgagtggactaggatgaaaagcaaagctttcccattccaaacaattgatctccttgacccaactatcatcaatctcaccttcccaatcaatctcactcccatcatctccaaccacgtttttgattggatgtgtatcgaaatactccgaagctttgattccccatccaacgtctgtatctactggccaatctggatcttcctcttccaccaccatctcttcttcttcttcctcttcttcatcaacgcctctgtctttgatgaaattcgccttctccttgttctcaaaaacctccggattctgctcctttatggtggagaaagtacgctcgagggagcttctcacgtaatcttccacagcgtctgcttcactccgccgcccacgcttcgatttacgcgggacctttgtcggaaacttttcattgttctcggtttcagcaattggcgtaactgcttccttatttttgcgacgggaccgagtttgatttttggattcagggtctagtacggaatcagacgaaacagcggcgaagcgtttcacgctccgggatgatatagtcaccgggaaaacaaatagtgggctgcgatgcatatcagagaagctcgaattcaagccggtgagaagcatagaagatcttggcgcggagcaagcaacagcgaagaaactcatttctctcgtttcctaaattcaaaacgaaattcgcagaaatttttggtaactgagtttttgctcttataatccactttgtctgtataatcccggtttggattatttcggtttgtgttactgtccttgatttggatcggttatctttcccgatacttggtttagtttatataatcgaaacagcgtcgtttgaaatattcataatttcatatacctagctcctcgcctccgttaatgaaaaatttgaaatatttttggcaaattttaaagttggatatgttctttttttggcattttcccatttcgttatgtgatcacaatatccataatgtgatcacaaattagaaacattgataaaatatgtaaactttacatagtcataagatcctaaaatggaatattttctgacctcaaaatgtaaactcgttaacagtacacatactagtgtttaaatataatttgtatgcaagaagaagaagcagacacgatatggagaagattattttgggatgcattgtgtttttgttggtgttctgtgccgtgttgatttgtcgtctcttacgttacctttgtgaaaaacggtgtgaagaacctaataaggtttcgcacacacaagaaaaagaatctaataaggatgacgtattaattcgaggtacgtctattgtctaactgttttgtttcgagctaatatataacttttctacaaagtgaatttttcgattctatttctaatcttttagtatcatgacagcctcgaagacacaaacatatagaccgcctcaggtgacgacggtgtagcccgaaacccgtaaacaaaaagaacaacgtcttttctacaatcaattaaatatttttcacttaccttcaagaaaagtttttgttttgtgaaataaaagaaaagtttttagtgattgtttttgacattgttctcttattgtttttatttttatccaaggtatattcttataaagttaattgtttgcggtctaatttattacatagtacgatctttgtcaatgggtggaagatataaagaaattcttcctatagtttagaatgtgtgagtaagataaaatcggagttcataaactcgattgccaaatctttggggttaagaaggctcagtttagacgaaataaatttatacaagttagaatagatgatattgttaaattgttggatcatatggaattcacaaattaaagcctaacacgtggtcactgatcactggtttcacatgcattaagactcgtggcccattgaaaactgcaatgttttattgtatagttggttccatgtgtgaatgtaattttgttttgtgtttcttttatatagtttgcataaaagcatgtgtttttatcttctttattaataagaagtaaaagaattctcgatttcttacacccaatctgttacagttacacagtacacatatatcttcttgtaggtattttcatttttcagtgacgtattaatatttgtaaaatggaacttcgatgactcaaaatgtaaatatgtgtactttctttcttgaactctcttttatggacctcacaccaatttcattgaggtatgcaatactttttcactgaggaatattttaacgagtctactcataaatctcatcatataaatttgttttggcattaagttatttttattattggtcgtctcacgtctgccatgttattatgacatatattcataatatatattaaagattgatatgaatattaacttactaagtatggatgagatgtttttgataaatatatctaaatgatgtaattaaccatatattaaacttcaaatttggaagttgattttctacattttaccaattgacagctagttttatttattcaatatctactttctatacatccttataatgtccaactttataacctaaacatctacctaacaactaacaagagtcagtactccctcgattagatgtctccacacatattaatagattaaaaaatgacaaaaataattcaaccttcaagatacataatgtattttaaaattcacttttttcatgttaatagtaacaactattagaaatataaatggtaaaatatctaaaacatctacaattaaaaactaacaaatttaaatgaatcatgatatgttgttaatttcacatgctccatcattttatataccactttattaatatttaatgttttgctgaccactagtatcaaagattatggaataaataattgagaaatacaaaaagaagtaattaatgaaaaaccaaagatcaagggacctgacattttcaacacgcggaaataagaaaaataaaaaggtaataaatggctttcgagtacatatgtttggtttttaactaaagaccagtctcttctcgtgttcctaaagcttcgaaataattccatctgctgtttttattcgcctgcactcttcttgtcctgcagtctcaaattacacatttttttttaatcggattttttttgggtattagtgaagaagaaaacatcaaccaaacaaagaggcaataaaaaagaagaaaactcactcacaacgatgcagaaagcgacaaaggcaaaaggcagaggagagaaagtaaaagggtgaaaaaaaaaactaaagaagaagaagaagaaagatcagatttttcttttaattttgggtggattgtttccttttcctttgcttgattgcttcgaattggaataagtctgaagaatttcgaggcggccatggctgtcggctttctctttttctcttcttctttctctgattctcaaaggtctcttctttatccctctctgtttcttgatcttccttattacttcaattgggtttgtgattcgatctgattttagggttttgaattgtttaatttgtcaatttcgattctgaaatttcgagcctttttggttactgtacttagttagaatccccaaagttctcgactttctcgcggattcactttttcttgagggggggtgagttcttaaagttgaaatgctgaaattattgtcactgttctttctcgaaatatgttcaatgatttttgagttctcggcgttagtttttaggaattggatacatcaagattttgatcatataatgttctgttatattttgcattatgtgaatatttcttatctgtttctgttatgtttgatccaaatcttaatatcattattgtctctgatgtcattttgaagatcattgagaagttatgaagaacagcgagattaggcctgagaagttgcatttacgtaaactaagaaaaagtttgaggaagatcagaatgaagtgtttgtgttctggtgaacaaatgaggcatagagaagaagaagacaagaaatctgaggttggagttggtagagactacaatggaagctcagctttatcgaccgcagaaagcgagaatgctaagaaactagataatggaaatatcgaagaagccgagttatctctgcgtgagacgagttcattgaactacgaggtttgatttcttggtcactcttgagctttgtttgattggacaagcttagccattgtgttgttgtttcaggaggcgagagcgcttttgggaagaattgagtatcagaaaggaaatatagaggcggcattgcgagtctttgaagggatagatatcaatggtatcacagtaaagatgaaaaccgctctaaccgttagagaagaccggaaacatagaagacggtctaaaggcggcttttctactgctccttcacctgccatgtctaaacatgctgttagtttacttttcgaagctatttttctcaaagccaagtctctccagcgtcttggaaggttccaaggtagtaacagtcatttctcttaatccgtgtttggttttgtttttggctaaacagaaatatcatgtgcttcttcttgcagaagctgcggagtcttgcagagttattcttgatatagtcgagacttctttagcagaaggtgcgtcggataatgtgactggagatattaagttgcaggagacactgacaaaagcggttgagctgcttcctgagttgtggaagcttgctgattcacctcgtgatgctattttgtcgtatagaagagcgcttctcaatcactggaaactcgatccagaaaccacggcgaggatacagaaagagtacgcagtgtttctcctctattccggggaagaagcagtgccgccaaacctacgttctcagactgagggctcattcattccgaggaacaatgtggaagaagctattcttcttctgatgttacttctcaggaaagttaatctgaaaagaatctcatgggatgcggcaatcttggaccatctctcgttcgctcttacaatcgcaggcgatctaaccgctctggctaagcagtttgaagagcttagtcctgagctcttggatcagagggaactttatcatacattgtctttgtgttaccaaggtgcaggagaaggtcttgttgcgttaggtttactgaggaagctattttcagaacgagaggatccaaacaggacttcgggtttgctgatggcttccaaaatatgcggtgagaggtctggtcttgctgaggaagggttagattatgcccggaaagctatcggaaacttggggaaggaatgcagtcaattagatggagcagcgcgtttcgttttagggatcacgctcacggaaagctctagaatggctgttacagagactgagaggatagctaggcaatccgaggggattcaggccctggaatctgcagatatgacaaacccgagggttgtgcaccgtcttgcgttggagaatgcagaacagaggaaactggattctgcattagcatatgctaaagaggcgttgaaacttggagcagagtctgatcttgaagtatggttacttttggctcgggttttatctgcacagaagcggttttcagacgcggagaccattgtggatgcagcgcttaacgagacagggaaatgggaacaggggaagctgttacgtttgaaggcaaagcttcgtttagctaaaggagaagtgaaagatgcgattaagacttacacacaacttctagcactccttcaggttcaaagcaaaagcttcaattctgcaaagaagctgcctaaggtaacattttcgtatgttctgatttctctaccaaagttgtgagttgtgcagaattaacactgaaacagatttattcattacagggatatgtaaaggaattgatgagtctggagcttgggacgtggcacgatctggctcatatttacataaacctctcgcaatggcgtgacgcagagtcatgtctctcgagatcaagactcattgcaccttactcttctgttagataccacattgaaggtattaccttcttctctacttccatttagacttggagtgtttgtttgtctttttgaaacaagcaaggcggtaatattgatagcttattcgtaccgattggcaggtgtactgtacaatagacgggggcaattagaagaagcaatggaggcgttcacaaccgctcttgacatagatccgatgcacgtcccaagcttaacatcgaaggctgagatactgctggaggtcggtaaccgatcaggcatagcggttgttagaagctttctaatggaggctcttaggattgataggctgaaccactcggcttggtacaatcttggaaagatgttcaaagctgaagggtccgtctcgtcgatgcaagaagccgttgagtgttttcaagccgccgttactttggaggaaacaatgccagtggagccattcagatgattttgccctctcaaatcatattttttttgtctttggttatgatttctccttttctgattctttttttttgtgtttgtttttgatagatgaatataagaagatataaagatgtatgtgtacgagtatatcatttgatgtcaagtttataaacattttgtaatacacagttaaacaaaaattaatataggttttggtgaggtaaattttataagccaggtttactatttactcataaaagattataaatttttcggagaaaacttttcaggtttgatattctaaaaaagattaacataagaaatctgtagctgtaaaactaatgatgagttaagcatttagattacactgaatgatgaagattctcccaaactaactttttatttttgttttgtttcttccttggggatctgttgtttgtctacacagctgagttgagagtcttccatcagaaaaatagttaaacagtaaagagagaagtcctgaagaacctcaagataagagctcgttctctctatcactgttaactctgaaactccgagattatccagcaaaagaccaatactttcaattatcgattttgggacgctttggctgtggagattctagttcctcacatttcctggtttcttcttctggaacctccttcgaatcagcagtcttcttgtcttcttgttcagatttggctgcggaatctgatgttgaggctgtccctttggtaagaccagagttttgcttctcgaacatcatttgcaggtacttgccttgttcttctattcggagttgcaggtttctttgaatctgcaggcaaaggaaaagaacacatgtcatacccaaattcagaatactttataaacaggtttcacattttctctttagcagctacaatccaaacacataagtataaaaaaccaaagctaatggcaatgcctttatgaacatacctcgagctgctcatggagttgcttctgtacttccatctgaagtcgtagagcctctgtaatacctatcccactgcagtataaatatgtatgaggtaagaatcagttaaaaatggtgtagcgtgtagcattgtgatgttaaccgacaagaaaaccttaccctttcaaatcaagagatgttatatgttcaagcggtgtcaacttcctttctggcgaacctgtagtgatcaaagaaactttagtttttacattgaattcttcaggtaaaatcatcaacgaagatgggaatgagttcggtatttaccagtttctgatggttctggccgatatctagctgtcctatatttctgaaaaacacaatctaatattagaagacaattatatgcattagcagggaactaaagaatagtaagaacctgtaaatggcttttaacatgatatatagtcaagccttcaactttcataatcttcagtacccctttaggagtagctcctgagtaaaatataaagaaaaagttattatctttccatatacaattcaaagtttatggaaagcaaagagaaataaatgctcactttcactaccgccaagactgttgacagcctcaacaaaagcctcgtgaagctctggcgtccaacgcattcgtgccttgcccgttccgttattgctgtttgaagatgttgtgctaacaggtcgcaattccacagacggagaaggttgctgctgaacaatctgaggttgcggaatttgcagtgtcttctggtcctaaaaaagtgtgtccagtattgaacaacttgagaatacagatatcaaatagaaacaaagtaaaaacttggaacaagaaactataacaacctttgaatctgaattggaatttgtttcaagcaagagatcattccagttagtagacatcaaaggatcatcatcagtgatcaaatggtcagcccattcatgccaatcacttcgtttttgaatgtcatcaaaagcagccgcaatgccaccatcctcaatctgacagttgttttgaatcgccgggttggtttcatggaagtcaagaaaccctcctggcaatgaatcatgacaccaagcactatcgttgttgcttggtgtctgcacagcattattactgctgcttcctgtgtagtgttgttgtttctcatgagataccatagttgagtaatggagattggttgcaaaaccagatgatgaagaagaacatatatgtccaacagctccaccgttactagatgaaagtaaatggtaggtttgtcctaatggtctagacattaactgactgttgttatctgatctcatgaaactatcttctactggtgaaggtttttgtgtagatgggattgaagaagtgcgtgtgaggtctctcgaacctgatctatgaactggacgagcctccattgttgtcctgcaagagagaatcattatccaaccaaacatcaacttcgctggaaaaacaaaaccaaatcgaatccgaactatgctcgaaagatataaattctctgtctctatctctctgtggattaccaaaaggcaaaggagaaggatcgaaaattctcacctagaaattcatgaagcaatccaggaccaaggaagacgaatcgaatcggagaaaatgattatgaggattctcctcttggggataatcggagaatcgtcttgtccgcaagagaaaagttgacggtggtgatgattttcttcgccttcttgttaatttcggaggtggtggctgtcttaaacaaagggatcagccgtcgtttttttcacgctcggtgaaacagcgcgtgagtatgactcgcttgtcgggatctacgtggacgttgtttattggataattgggatcgtgtattgggcttgatctttttcgtttttatttattaaattttttctggtgtctatattttctgctctttcactctcttaaaaggctatataaaggcccaaagtggctttttgattcatagttttacaaaattcacacctccaatttactgttttgttgtgtccataatttagcgtatctgccagatttccccaacaacacttcgtgtgtccctttttccaccacttttcctttctccattactaatatctcatcacattgcattgcagtggtcagtctatgtgcaatgaaaatgcaagtcctgttactcgctagcgacctcagcgttttcattatctctgcctcggttttactgtcgagtgcacttgttgcttcgtcacacaataggattgctggtgatttcagaaatgcacgagcaagtgccaccctctgtttctctccaccactcagcatcagccctctttctcccaccgcggtcgaatatttatcagggaatttcatgatcgtatcgtgaatcgctgctcgtcgagctgcattgtacacctcttcctctgttgctgaaaggtttccatagtgaatgttgtgaaatatagtgtcgttaaagagcacctgccatgtgaattaaggttaatgatacgaatatttatgattggtatatatgcctgataatgatattaaatttgtatatggaagttactttgaagtcatgcaatttgtagaaaagtgacatgttacattttaaactaccaaaacgtatgaaaaaggccatgatattaaaataaagattttagttacaattaagaagcattttgcagtgtcaatatcatttccttcatgatttatgtagtaaacgtgattgtaatacaaaagagtatacagtactaataatcaaaccccaatctgtaaccatatgctaacatactaaaaaccggtttagactcataacaacaaaatgtaagagctagcaaaatttatagtgaaaatggcaacttacagtatcttgagggacaactccaatggagcttctaagactctctagtctcacttcctttatatcctgaccatcaatttttacatttccggaatctacatcaaagaacctgaatatcattctaagaatagtcgattttccgcttccgctactaccgacaatcgccacacttttccctgccggtacctcaaatgaaatcccatctaaaatctttctctccggtagataactaaaatgtacattctcaaaactaatgcttccacctttcagaacaagaggagggagcttcctgtctatatctttatctccgatatcagatctctcctctagaaacttaaacatcgatttcatgtcgacaagtccctgaacggtgtcgctgtaaacaaccccgagaaagtaaagaggaagagacagttgaaagaggagaccattcaccatcaccaaatcaccaactgtcatctgaccattcataatcccctgagaacacaacaccattgctgttgacaaagctgtactaaatataaaactctgtccaaaatttaataaggcaaagcttttccgactttgcaatgcagcatcttcgtaattttcgtgtaactgatcgtactttcgagcttcgtaatcttcgttgttgaaatacttaacagtctcgtagtttatgagagagtcaatggctctggtgctagcatcgttttcagcttcattcatagcttttctaatcttgattctccactgcgtcatagccaacgtgaatgctatatatgatccaacagaaagacaagtaatcaatgcataaacagctccaaatttgtatgctaatatacatgagaccattgatatctccaagatcgtgggcataatgttgaaaaccatagctgagagaatcgtgtttatagcgcggcttccacgatcaatgattctgttcaaagcacctgtgtctctatttagatggtaacgaagatcgagatcgtgtaaacgcgagagaacttttctagagatggttcgtatggtgcggagagctactttggagaaaacactagtacgaagctcgttgaaagcagaagaaccagatcgagcaatgccataaccaatgagaacagaggaaggagtagcgaaagcagcaactaggtaagggtttgaatcaacgaatgaagatgaagagagccaatctatagctactttgaagaggaaaggaacttgaacattcaagaacttagctcccacgagacacgcaaaagcagagatgactctgaaacagagttttgggttgtctttcatccatagatagcttgaaatcatccgaaggatattctccgacgacgtcctgttgattttctctggatgtggagctgaagttgaagtggagaagaacatgacgcgtgcgttgaccataggagtaatcggggatggagattgatgagatgcattagtaggtggagattcaagaattgagttacgtttgatgagcttgaagaaactgtggtgaagatgatgatgatgatgataaccagagcgaagacggtacgaaagagaagtgcgacagagttggagttgagaaactctcatcattgcttcttgtcctaacatatacagtttcgtctggttcgtttcttatatttctgtagagtcgtctgtttgactttttgctcgacctctttctgaatccagtttcgtaccatagcacctgaagaagaataagattaaaaaattacctcttgcttggagatctcaacttgttaataacctccccagtctttgtttacaataagattatgaattagatatctcggagataaccggtcctggttcgattgccacgtgttttaggcatgagaaccggatacttcaaggactattggtttttatccaattcaatgattccaaaggtaatacaaatagcttactttaaaaccgaataacgaaactttttgatttgtcaaaaggtaattgaaaaaatcggtttggtacctctacgactataaatgattttcccaaggttacaaatatgttttattttttgtaacaaggctacaaagtaccatcaatgatatttgcaaatatatgattccaaaaataagggaagtcagcaaaaaaaaagaattagtgaggcgaaaacagaacccaaacactagctgtctagctcttgagattcacacctccagtgtactgttttgttgtgtccataatttagcgtatctgccagatttctccaacaacacttggtgtgtccctttttccaccactttccctttctccattactattatctcatcacattgcatcgcagtggtcagcctatgtgcaatgaaaatgcatgttctgttactcgctagcgacctgaacgttttcattatctctgcctcggttttactatcaagcgcattcgttgcttcgtcacacaagagaatcgctggtgatttcagaaaggcacgagcaagtgccactctttgtttttctccaccactcagcatcagccctctttctcccaccgcggtcgaatatttatccggaaatttcatgatcgtatcgtgaatcactgctcgcctagctgcatcgtacacctcttcttctgttgctgaaaggtttccatagtgaatgttgtgaaatattgtgtcattgaagagcacctgccataattccaggagtcaattgaggctatgattagtctagtttatctttaagtatgcaagttataaccattaaatcgatttgatattaaaatgaaaattaagatcatcaggtttaatcagaatcacttttggagtgtaaaatgtcatctgcatgtgatttatgtagaaattgtgactgaataacaaaaaagtttaaaataccctaaatagatttttccaataagccctaagtagataactaacattttacctaatttgtcacggtttagactaataacaacaaaatgtaagagaacaattctagtcaaaatggcaacttacagtatcttgagggacaactccaatgcagcttcgaagactctctagtgtcacttcctttatatcttgaccatcaatcctaacattaccagaatctgtgtcaaagaacctgaaaatcattctaagaatcgtcgatttgccgcttccgctactaccaacaatcgctacacttttccctgccggtacctcaaatgaaatcccatccaaaatctttctctctggcagataactaaaatgtacattctcaaaactgatgcttccacctctcagaacaagaggaggtagctttgtctctgtatctttatctccaatatcggatctctcctctagcaactggaacaatgatttcatatcaacaagaccctgaacggtttcacggtaaacaccaccgagaaagtaaagaggaagagacaattgaaagagaagaccattcaccatcaccaaatcaccaactgtcatctctccattcataatcccttgagaacacaacaccattgatgttgacaaagctgtactaaatataaaactctgtccaaaatctaaaaacgcaagactcttctgagtttgcaatgcagcatcttcatatcttccgagtaaatcatcgtactttctcgcttcgtaatcttcgttgttaaaatacttaacagtctcgtagtttacaagagaatcaatagctcttgtgcttgcatcattatcagcttggttcatagcttttctaaacttagttctatactgtgtcacaaccaatgtgaaagctatgtatgatccaacggaaagagaagtgatcaaagcaaaaacaggtccaaaattgtatgctaatatacctgtgaccattgatatctccaagatcgttggaacaacattgaaaaccatagcagagaggatcgtgttaatcgcgcgacttccacggtcaatgattctattcaaagctcctgtttctcgattcaaatggtaacgaagatcaagatcatgtaaatgcgagagcactttacgagaaacagatcgtattgtgcggagagatactttggagaaaacagcagtacgaagctcgttaaaagctgaagatccagatcgagcaatgccatagccaatgagaacggaagaaggagtagcgaaagcagcaagtagataaggatttgaatcagtgattgttgaagatgaatatgaagagagtaaatcgatagataatttgaagaggaaaggaacttgaacattcaagaacttagctcctatgagacacgctaaagcagcgatgactctgaatcggagttctgggttgtctttcatccatagatagcttgaaatcgtgcggaggatcttcttagatgatgctgttttggtttgatcttgatttggagttgaagttgaagttgagaagaagaagactcgtgcgttgactggagatggagatggagatggatcggtgaagaatgcattgatagctggtgatctctgaattgagctacgtttgataaaactggagaaactgtgatggtgatgatcagagcgaagacggtgatacagagaagcgcgagagaggagaaaccgagatcccctcatcatcgcttcttgtccgaacgaatcacatacaatttggtctaaatcgattctttaattctctgttttgttctctctgtactacagagtagcttaacaagaagacgaggaagaagatatcaactcggaaataaccggttttggttttctgtttttattaagataatgaaattagctatctcggagataaccggtactggtttgattgcaactgggcttgagagaatcagatacggtggtacacaccgcagcgaatctcagagtattcattctctcacatggactctttcgaaaattcaactcttctactatatgcaattaattaaaaaattgaacggtttatttggaaagtgaaaagaagcaacggtcggttatgtcttccctccagacgacagggtttttattcggacaccactaaaaatggacagctaaactcctttattgccttaaaaattcaattttaattacgtgattaaagattagattgccacttgattttaaaatactaattaaacctatatagtgatggtatctaactatcaatagctttaaaccggaactaatcagcaccgtccgatttggaaagatggatggaccaaaggacgtgtgggcacgagtcccccctctctgtacacgtgggtcccactaagccttctaagtaatctttttctagccgtccgattgaatcccatgaagctgacatgtgagcccccacttcttgaaaatatatatttgtatgaattttgtttttattttattttccagccttttaaaaatgtttttattaataccacggatactaccgttttgatatcaaattttctttgaaatctatccgatcttatatcagattttggagtcaaataccaactacaaaaatctgaacattaatacaataatatacattttgaaaaatcatgttgtccattatattttttggcatctaatcctatcgttaattgattataagtttataaatatattacaacggaatttcgcataattgtaaaacttccctatataaacttacgaaaaattgaaataattataccaaaagtccacatattttattttaaaaacttacataagtggatattgttaaaagaaggaaaaaaaaagagtttctagtaaatatagtcacggaataatgtgagaaatttattattggatcaaaaaaatgataaaattgggcgagaaataagactaaaagttagggaagtgaaaaagagacaaatcccacccgtcgtgtcttcttgttcatcctttgtttccctttttctttctcactgtttctgccttacttaaagtctcaatctttgcttcaaattcaacccatctctttttcctcccttccctcacaatcaaaatcttaattctcagcttctggttttgtcgaaaatggaaggcggttccgctagtggatcggcttcggctttgtcaaacgatgaaaatctcgtcgtttcttgtgaggattcttcttctcctatagggaatgagcttgagcttggtcttacgttgagccttggtcgcaaagggtatcgagattgtagggtttacgctgatgattcttcttcttcttcatcatcttcttctctgagcagagctagcgtaattgctgggatcaagaggacagctgattccatggctgcaactagtgggtgagtgaaattctcttccctttcctcttttacattttgatcaattatggtttatttggggattcttaatatcatgattatcaatagaactataaataaagatttgatttttgctttttatggttatgggattgattagacagaatgtccttgatcacagttatctgaaaagattcgacctttgttacgtatagatgactttgaatgtatcttcctgatcattagatagtttgctttggtcattatatcttcaaattgaatcttactatcgttttctagagatgacagtttttttcttcttggattctaaagtatttattagctttggagagaaagtgattaatcctgtatagtgattctcttggtatctgattttacaaggccctgaagtgtttataaccctttttatgtgtttactcttatttgagcaatttgaaacctttgaaaatggcaggcaagttgtgggatggccaccaataaggacttacagaatgaacagtatggttaaccaagctaaggcttcagccactgaagatccgaacttggagataagtcaagccgtaaacaagaatagaagtgattcaacaaagatgagaaattccatgtttgttaaggtgactatggatggcattcctattggaaggaaaatcgatctgaatgctcataaatgctatgaatcattgtcaaacactctagaggaaatgtttctgaaacctaaattaggtgtgcttttcgaatctcatggccttttttttggttcctttgaagttggttcttggtatgggaaatgaagttatgattctttctttaatcaggttcacgcacactagaaaccgatggtcacatggaaacaccggtcaagatactaccagatgggtcttccggattagtactaacgtatgaagacaaggaaggagattggatgcttgttggcgatgttccgtgggggtatgcatacatatgttcttatgcttttgatgctttgtcccgtgtaagcgtcaaattctgaagtttgaacctgagttttacttgtgtctaggatgtttattggttcagtgagaaggctccggataatgaaaacatcggaggctactggtaaaggtacatttactgattcgatcaaatcctgatatctgtattaaaatcattgttttgtcgttgtgaccgtgtttgtgtgatccttgtttacagctcagatgatattatgaagcaaataataatctacgaagaaccctttatgtttgaagcagtaataagacagatcacagatcaaagagaagacaaaaacattgtaagaagcttcttcttcttctctcccctttacagtttcttttttggctctgccatttttcttttagttagttatatgttctctttgtaaatcacactttaaaaatctataagaaaaccctttcttgcacaaaaacaaaacggttcagagcaatgcacaaagttaatatgatcatgtaaaacaaaggaaacttattctacatggaaaaattaaatcaaaagatacatatctctctctctttctctctttcttctacatacagaacacgaatcgaacgaatcagtttatcggcctcttttgattcttaaatctcatactaaagaaggccatttacaggtgaagtactaaaaaccgatgaatgtttctcggccaagctacgactagtgttctcttcattactattacttttcctcctcggtttagcctctccgagcatcgatatcacatctctcatcgaaggtctgtctttcgggagctttgtagtgcagagaagagcaatctgtagaactaaaagcatctcttcttgcacatatctgcagtttcctacgttaggatctaatgcttcttctagtgatatgttgtctcttatcttccttctcacccactccacaatgtctactgattctccaaactccggttccaatggtcttcttccggttaacagctccaatagtacgacgccgtagctgtatatgtctatcttctcatccaccttcaaagtgtatccatactctgcaaatgatcaaccatatgttgttagactaaaccggattgtaatcaatttagtaatcggtatggtatttaaaccttaccgggagcaatgtaaccgtaagaaccggcgaccattgaaacggtttctttcttcctcgccatcatcctggcgaggccaaaatcggcgattctggcgtcgagattcgcgtcgagcaagatattgttggatttgatgtctctgtgaatcaccggaggatgacaatcatggtggaggtaagcgaggccgtgagctacacctaacgcgatgttgtaacgcgaaacccaatcaacgagaagtctcccggcggcgtttttgccgtgaatcgcatcaccaaggtttccgttgagcatgaattcatatacgatcatcatgtttttgtcgttgtataagaaccctaggagcctcactatgtttctgtgtctcaatttcccgaggaggttaacttcgcctacgaaatctccggtggttccatcttcaatatccgcggcagatctccagagcttcttcacggcgagaactgtgcttgatcgtgacatttctgctttgtacacgattccggttgctcccattccgatcatgtttgattctttgatacatgccaagatatcggaagctgtaaaccctaatctatgaaacgccattaatctccaaggccattcacctttgctcgccgtctcgtcgccgcagaatccgttagaataccatttcttgtacagagttctcgtaacaatggtgagaatccctagagctagaaccgatgctatcccaatcaaccatccggcgacaattcgtttcccgtggaggctactgtgactcgatgttgctctttggaatttactacacggtggtagaacgccgccgcagagaccggagtttcctcttagatcatctggatttatggttttgagaaagccgttgatagggactggacctgtgagcttgttgtatgagacgtttaggagttccagagctggagatgttccgatgctctctggtagtactccggttaaggaattgttggagagatctagcactgctaatgcagacattgtcgtgatctgtctagggatttcgccggtgaggttattatttcttaggttgaggcttacgagcttctcgcatgaagcaatgcttgaagggatagtgccagtgagagtgtttgatgagagatcgagattagagagtgaaggacaatcctggaattggtctggaacttcgccggagataaagttatcggcgactaaaaacgcctgtaggttgtgaattgagaggattgtggaagggagagatgatcggatctggtttcttgagaaatcaatgaaagaaagtgaaactgaatcggagatgtctccagggatccctccgctgagacgatttccggctagttcgagtctctgtagcttctcaagcttgccaaagccgataggaattgatccgtttagtagattgttctgcattctaacacgaactagtgattggcaagtggaaagagtcgctggaatctgaccggtgaaggtgttgttgaagagaatgagcttggttagatttcccttgttgcatagagttgaaggaatctcgcctgagaaggagtttgaagaaacgtcaagccattgtaatggagaattcttcccgagatcgcttggtaactcgccggagagcgtgttgttccagagctcgaggacttgtaactgtgctagactgctgatggcgggaggaatggagcctgagagtttgttgcgcatcaggttcagtagctggaggttcttgagctttgttatctccattggaatctcgccggttaacgcattatcggagaaatcaagaacctttagcgtggtaatgcttcctatctctcttggaattgttccggtgaagttattctcgtacaggagaagcgtctcgagtgacttgagcttcccaagctctgacggaatctcaccactgagctttccgatggccaaatcaaggtacttgaggctgtttatgtttccaaattccggtggaatcggacctttgaattcgttgtaaccaagaatggcggtttcaagtgaagggagctggccgagaacgcttggtaactcgccggtgagattgtttccggataatccgagaaatctcagcttctgtagattcttgaatgaacttggaagtgacccttgaaagaaattccctcggagatcaagaacttctaaagagactaagttcccgagatcctccgtgagatttccggagagattgttccctgaagcattgaggtgaacaagcccaagtgattcattgctaaatagaaaaagactccctgagaatgaattctggctgatgtcaatagatttcaacggagggattgatttcgggagcagcgactcgaatccgttgcatgatatgttaaacgagacaaggctactcagctggctgatcgaatctgagattttgcctgtgagattcatccccgccaggtcgagcttctcaacattgccatttgagttgcaccgaacaccggtccaattacagtgatcgctggtgtctgaaagcttccagtctttgagaaagttgagaggatccacaagagttgatttcaccgacagcaaaacagagagctcgttgacattgtcgatggaagctaaaacagaggaagtagaaccaatgtaacagtagtaaaggaagagaactattatcttcatcttcatcttcaacttcttcctctgtctcaacagcttcaactgaaacttgactccttagttcattaccaagaacgagactagtgaacatgcaaggaggtggtggaggaagagagtagaataagaagaaactctgtaagtatatgcttgttctgtgtttattatgttatatatatgtgacatataaacacagagatatataaaaatgaatcttggttttatatggatgtagtgatcaaagagtatgtagggttacatgttctaagaaaaaaagaaataaacaagatcttggaagtatttgagaaatttcttaagacattgaacatgtgaagagagaatgtgttttcttcacaattacaactaatccaaaaatgtgttcggtgttttaaaattaattaagtcaactattgatttgctgtatagtgatttgtgaatgtgccatagatagcttaagcttaaactaatactaatataattactattttttatacatacacttggtgtgtggcatagaggtagcttatgcttaacttcattctaattcagcttttgtagaatgtctttatctattttcccacctttttccttttgtgtcttttaacgcttgccttctaaggaagaaaaacaaaaaatataccattagctcttagcaatattcgattacattacatattaatgatgaatcagtgattatattgtaaatctcgtatttaggatatagccaccgaggtgaacgttcgaagcatataagaatgggtgacctgcacatgtgatgaagaagaacagatgatcctattaccctatgctctgcagcatatttaaatatcagataggtccaaataaatttcattattaattaaaatcagcaataatgaagatattcccacgatcgatcttcacgtttcttcttaccccttttgaatttcgaaaagcttctttctatttggttggttaaaaaaaattaagatcgagcccactcatggccattatacgtgaaaacatatttctttagttcaatcatacttaccttgatgcgtaacaaaagtgtgaatactataatgtatgccactgcagagagtgcaggcttgttactgttctttcgtttgcatgattgattagataagaatcttcccatgttacagatttatggcagtgtaatataggtatagtataatattgttgataatataacaaataaaaattaaataaagtggttaattgtatcacttcttgaatgtatcagcaaattgtccctaattaaaatgctactttcttaaacgttcttcagatataaaattctaatttcgtaaactttctacctgatgtctaaaagactaaaagcatgtgtagacgtatacacccaaagtcagtgccaatgcctttaaggtaaagtaaaatggagacggaataaaaaaaacgtacgtcaaacgagagaatataatttttatttttttttcagactgcccaattagcatagcatagtaatttgatatcactaaaaagaatccaaacttgataaataataaccgtgacaaattcaacaccaagatgtttaaaaactcaaacagatatgtatgtatcaagaacgggtcgaggtaaactaactgatcaatttgataaaggataagataagctaaatgctaaatgatttgtgggaaaatggcagagaaatgcacacgcataatattcatcaaaacaattattgtaatactccaacaattacccactcctcttactgatttcatgtttccatccttcttattacagtactaaacacaaactgttgcttcacatgcactcatgtggacctgtcttttatacaattgttttttctttcttattatttgttgtttttagaaaacattccgatccgtagttaagttcttcatttgcttaattatcctttcgatcgttggataaaataccttaaattctacgattactcagtaagtaatttttttttatataattgatagaatacacttttcagttttgaatctttcgactgatcactgatatatacaatatcttaggaaaataaataaatttgatctacaccataaatattataataatcaattattacccaaaagaacaatggatggtttataggagattttatagactatagatcataaagaaataaacacttacaagaggtttgaaggcttaatgggatgcatgtggatcagcacctatagtgacttaatttagtattaatttctgtattatcagagagagaaacctaatcccacaaataagtacctaaactctttgcaaatggtgttttgttgggttatattattaataccatactaattaatatattaacaagtaagtatgtatgctgacgattcgtcacatggccatcagggatcaggccatgggattcgctatggcatcacagacttgagagtccagcttttccttacgatctacacgcatgtgccacgtgtgtttcatgcatcttaaaaacctctgagacagcaagagactctctgactctgtctaaagccaaaatgggtttattatatgacaatttgaccaaaatgggcttattataaacatctcgggcctaaaggtaaaagcccataagttgagacgatgacggtatccaaatgaaggaacggctttggtagtgacacgtcacgattctcccgccaccacaccacagctttttgcttcatctccttcttactctctgtgtctctaactcctcgtgcactcagacatcacagatatggcttgtgttcggtcgattggttctttaacttctgtcaaccattctcaacgaaatgttcctcgctcaggtacgcgaaaaaaccctaatttcgcacttttgattcgtcgaattggtagttgaaatcttcgtgttgcatgtagcttgaataaggaaaatttcccgtaattttcggtataatgctgaatccgaaactgtaacgagatttatcggaaacgaatcggtataaatcgtgtttctttgcgagctcatgatttctctgatttgataaacaagttgttaaggcagtaacttgatgtaatctgatcatggtttcatagtaaatgtgtgttctaagtaattgtggattagggttatggaaaaagattggatttttacatgtctcgctatcaattaacttcaagtgtgtaattaagaaccatagtttgatcccttttgttgcaggcattgtcttatcttcatgctctgttcttcccatcaaaagctcatctttcactggatcccctgtttctctcccgcgggctcaaccatcatcccgaacagctctaagaccgatgaaacccgtctctatcacgatgatggtaaagccggcgctccaattcatccaagggacggatgagatgacaatccctgatgttaagctgactcgatcaagagacggaagcaacggaatggcactgttctctttcgaccaaccatccgttttcgactcgagcggtgaagtcggagagattacaggattgtacatgattgatgaggaaggtgtgattcagtcgacggatgtgaacgcgagattcgtgaatgggaaaccggaagggattgtggcgaagcacataatgcgatcgccgaaagaatgggacaggttcatgaggtttatggagcgatactcggaccagaatggcttgcagtttgttaagaagcaatgaggttggagagaattttcaatgagcaaaacaaaatgtgtatgttacattaaattttttcactcttttgatttataatcttgtactctcctagttttgatctttacttgagtttcaacttacaatggtaatctaggcttttgttctgattaaatttggtttaatctaaacaaatccatgattttactaaaggtatgatcataatttcattatgaattgtgctattagtcaaatacttaactgtgtttgtgtttatattacgagtgttcaatccaattaaaccaaaaccgtgtaagagatttaaaatagaaaacacactccactgaaattgaacagaatcaaaactaaaccgaactttgagcatatccggttttaagttgatgaccatatatagccaaaagtcgttaagaatagtttattatgaaaaggggcatcaaagcattgttcctctgcatcatggcatcgacgttaatctcttctttggccgttgtcttgccgttaacgttactagctccgtcaatgtccatgaaaatctctcgaatcgacgtcctcggatatatttgtaacaacggcaccgtctccaacgaggaggcttaccggagatcatatcagattaacctcgacgcgatcagaggtgatatgaggcatgtcaagtttggaactcatgaacatggagatcctccggagagaatgtacgttttgtcgcagtgtgttagcgatctctcatccgacgaatgtagtttatgttggtcacgtgctaccgatctcctctctcaatgtttcccggccaccggtggttggtttcacctcgacggttgtttcgttagagctgataattacagcttctatcaagaacctgtttctcatcaggacaccaaggtagatggttatgttttgtcagaaatctcatatcgaaaatatgatgggactagtaatatataagtgctatagttggatcaattctgcacaaacttgtctaatacagaacttaatcctaggaatttagtgtggatccgattcttgaagaacaatcaactaaattgtcctaatatgtcgaccattttgggaatgtagatatgtgctagtgataaggagaagtctgcagaattcaaaggtttagtaaaggaagtgaccaaatccattgttgaggcggctccatatagtcgaggtttctcggtggctaaaatgggaatccgggatttaacggtttacgggttgggagtatgctggcgaacgctaaatgatgagttgtgcaaattatgcttagcagatggagctttatcggttacgagctgcttaccatccaaagaaggttttgccttgaatgcaggatgctacttgcgttactctaactataccttctataatgaacgtggattgcttgctatgagtatgtctctgtctctgtctcataacacttgtgttatttgtaaaaattgtgatccgtttgtattatgatcataacatttcttgtatgtttttcttgtaggcttcactaaagaaaaccttacgtatatatttgttatttccatggtgggtgtgttggctattgcagctggattttggtgtggaaaatgcttctatatgcgaactagtccaaagaagaagattaaaggtaagttccacaagactatattgtgctcataaaggaactaagactaaaaagtttcatttgtttggacatctaaggatagagaaagagtcagagtcaatatgtactgagtcacacttgatgagctttgagtattcaactcttaaaaaagcaaccaacaacttcaatgagagttgcaagcttggtgttggtggatatggtgaagtcttcaaggtttctctcttctctgtataactatctttctttacactttaccactatgttgattgattaaaaatccttattgtctttttgacagggaactctgtctgacggtagagaaattgcgattaaacgactacatgtatcaggaaagaagccacgggatgagatccataatgaaatagatgtgattagtagatgccaacacaagaacttggttaggctcttaggttgctgcttcactaacatgaatagtttcattgtttatgagttcctcgccaatacaagccttgatcatatcttgtttagtaagacactcttctctaatcacgcacatatcttcttacttgtttgaaaagtttctaaacattttttccttgacatggaaatgaagacccggagaagaagaaagagcttgactggaagaagaggcgaaccataatcttaggaacagctgaagggttagagtatcttcacgaaacgtgcaagatcattcacagagatatcaaagcaagcaacattctgttagacttaaagtacaaacctaaaatatcagattttggattagccaagttttatccagaaggtggcaaagacatccctgcttcttctctttctccttcttcaattgcgggcactctgtaagtcctttcaatacaaagaacttcgtagaggtccttactattggtctgatttagaatgtgaatgttacattgtttacagaggatatatggctcctgaatacattagcaagggaagactaagcaataaaatcgatgcttatagcttcggagttcttgttctcgaaataaccagcggttttcgaaacaataagttccggtctgataactcccttgaaaccttagttactcaagtgagtctccatcttcatcacatcaatctttaactctccgagtgaccttcatatataacccattttcgaaccttttaatttcttgaacaggtttggaaatgttttgcttcaaacaagatggaagagatgatagacaaagatatgggagaagatacagataagcaagaaatgaagagagtgatgcagatcggtttgttgtgcacacaagagtctccacaacttcgtccaacaatgtctaaggttatacaaatggttagttccacagatattgtattgcccactcctactaaaccacctttccttcatgattccatgtaaaaattcatgtagaatttatatagattcctcaattccttattgttaataacacattactagaaaacatacaaataatcattgtgtatttcgtacgaataactattaaaaattatgtttatttttcttctaagttatgtagatagattcaaaatatatatttttgagattcatcccaatattaacacctatatatatgtttatatatgattaatctcaaaatataatacaatgtgataaaataaatgaatgagataaagactggtctgacgaatgtgtatcattgtctgataagttagttagtgccttgtgttgttatttgtggaaggcttgtactgttccaaccgtccattactttttttgagaaaatttgttgagagggcaattttcaagtttgtaaatttgccacttcaataacttctttgatttgatttgtcaattaggtagttcttacttcttactacattgatgtcatgcactttcatttagctgtcattttagagaagaaattacaaaaacgttattattttaactaactacttatgtggaatactatctcatttcgggggtacattgttttaacggtggcgataaaaagtgttttgtaacagtgaatagagaataatatactgttgacacatgatagtgtaaaagtgaacattatataacgaacaagtgtgtggtaaatactatcaccagggtaaagtaaagacattgttgtattaatgtgacccatgctgacgaaaatatgtatgtctgtgactcataatgacaaaaattattaatcatacatcatgtcatcactttgccttaatttgttggttaatatagagcatatgttggctaataaaaagaagaagaagaaactatcaaaataaaaattacgagaacgttacaaaagtaaaaaaattagatgcatacatgtgttaaatgttttataaagtttaatttgtgtggagtatatcatttttgaacaaataaccataaatagaaaaacaagaaaatactcaattcttaagtcaaaaatagtattaccaaagtcaaaaatagatgtacgcatgtgttcttcgagtatctcaattctttcgaaggtattatatattttatatttatgctaaaattttacagcttctatgatagagagtgacttattatactatataaacgctagaccattgagtgatgcaaatcacaaagcttctttaataacacacatacagattctttcaacagctgccactacctttcgaaatgtaagcatctcctctaatctccatcatttttcagaatgtgttacaaatgaaatataataaaaatgtttaaaccccaacatatgtatgacagggaatttggtaccggcaacggctacagcaacgggaacggctacaccaatggaaacggccacaccaacggaaacggcaattacaacggcaatggccacgttaatggtaacggaaaagctaacggagccaaggtggtaaagatgaaaccaatggacagtgagttgctgagagagcaaggtcacataatggttgattttattgctgattattacaaaaaccttcaagactcgcctcaagatttccctgttctgtcccaagttcaggtttcttaacttctgaacttttcactacaatttatgtaatgtaaccagtcattatttgtgtgtgtatacatatttagagtgtgtttttaatatataacaaacattttgggtcgcagcctggttatctccgtgacatgttgcctgattcagcacctgaacgacctgaatcgttaaaagaacttctcgacggtacgtaacatatttctattttatagcaaaactagtaacatgaacgtacaaacccacatttatataattttaattaaatgggattttaattttgttgcataaactttttgttatagatgtttcgaagaagataatgccggggataactcattggcaaagcccgagttactttgcatactatgcatcaagcacgagtgtggctggattcttaggagagatgcttaacgccggcctgagcgtcgtcggttttacctggctcacttctcctgccgctactgagctcgaaatcatcgttcttgattggcttgctaaattgctacaactccccgaccattttctctccacaggttcgtcattattcattaatttgatctaattcttcttaaagattgaaagactttaccactattttaaatttacatatagatgacaatctacgttttcgtcactgtatcttagcgaccatacgtttttgtgaccacataaaattatatcaaattaatagagaatgcaattgggaccgtatatagtcaaaaaaaaaaggctgcataaaaaataaaaataaatagtaacaatatttgtacaagcgagcatttaattcaatgacttcataacaatgaatgataggaaaaggaaatggaggaggagtaatccaagggacaggatgtgaagcagtgcttgtggtagtattagctgctagagacagaattctgaagaaagttggcaaaacattacttcctcaacttgttgtctatggctctgaccaaacccattctagtttccgaaaagcttgtctggttggtatagtatttaatttacttttgtacaataacaattcactgattaataactgtgatgatgttcatagattggtgggatacatgaagaaaacattaggctgctcaaaactgattcttccacaaactatggaatgcctccagaatcacttgaggaagctatttctcatgatctcgctaagggttttatccctttcttcatttgtgccactgtaataattactcaaaaaccacatttatgtgttgaagataaaacatttacacacatatattgtatacctcttcataaatttatttcgtccattgctaaatatataagtgttccgggttttcaggttggcacaacgtcttcagcagcggttgatcctttggtcccattggggaacatcgcaaaggtaattaaacacatatacaataaatattggactgcatcaaccaaatttttaaccaacttcatccaccgtattgatcacactgcttcaaccactgcaattattagacatttgaatttggtgcacaaaacatagacatttgaataaataaatttaattcggttatgtgactaattaagactatatagtacattacatgtcattgtaaaaaaaagttgtactatgttgtgtagaaatatgggatatggttgcatgtggatgcagcttatgcagggaatgcatgtatatgtccagaatatcgaaaatttattgacgggattgaaaacgcagactcctttaacatgaatgctcataaatggttatttgctaatcaaacttgttcacctctttgggttaaggtatgttggttttatctcattcttaatttattgttcaattagtcaatttaaattcattaatagtatttttttgtattgtgttgtatatattggaatcaatcaggatcgatactctctcattgatgctctcaaaacaaatcccgagtatctagaattcaaggtcaaggtctctcatgttcatcattttgttacaaacataaaagaaccatctatctatattgaagatctaaagaagcgttatcatatacatgtagaatatataactaaaatgacaataagaaactaacaagttttactaagatctcaatggatatatcattcatgaaaatattgaaatcgttagcaatgtatattttaagacggtgaaatatgttgaatgagatgatcttatatttgattcaatggaaatgtcaggtttccaaaaaagatacggtcgtaaattataaagattggcaaatttctctctctcggagattcaggttctttataagtccatttgatgttgtatttgctggtcctattagtctaacaaacttatatgtacacgcatttgatttatacagatcactgaagttatggatggttttacggctctatggttccgagaacttaagaaactttataagagaccatgtcaatctcgctaagcattttgaagattatgtagctcaagatccaagttttgaggtaatatatacatgtgaaaaatgtttcagaacatcattgaacatcatatctattttataaccaaggctaattagtactatgtcaatttctttaatttactaacatatgtaacgaaagtttaatcactttattttcctgtttcttaatgtaaaggttgtcactactcggtacttttcactcgtttgctttcgccttgcgccagttgacggcgatgaagaccaatgtaacgaacgtaaccgtgaactgcttgcggctgttaactccactggcaagatattcatctctcacacggtgagttgtataaagatataatgacaataatgaattatatcattattttttgttaagagtactgatttattttataagatattacatggaaattgaaatttaactaaacatattatcatcaacaggctctatctggaaaattcgttttacgatttgctgttggtgcaccgttaacggaagagaagcatgtcactgaagcatggcagattatacagaaacatgcctccaaatttacacgcaacgaccattattaataatatttcaaaagaaacccactatcttttttatttcgatcaataaagtcctttattttcaacgatttccactggagggggacattgttatgctattaggaataaacttatcaaatcctcttttattgtaacttcctcaaagttgaaagtagtaaaatttgtttttactattcatgtgtccacaatcattcgattttactgtatcttttttttttgtaaacatatatattgagaggaccgaagttattgggattgggtatgtgagattagtttattagatttgggcctggccttactattaaaataattgacatatttaccctcatcatcaaatgtacatttttttttttaattcctatcatcctcgatacaaaaccctaattcaatctttctattatctagtaaatcaaaaactttccgaaaaatctgaagcgaagggaaacgaaatcccgataaaccctcctttgattgatgtgttctatctttatgagacatgcattctgaatttcgactggattttatgagcgaaattttgtctgagttccgatgagttcgatgaatcatatcgttgtagatgttagttcggacgaagatgatgataaaccagtagattactcttatttgttagaccgaattctgggagtttccgatgagaagaaacccatcaaaggtactgttttgttgaatccaacggtggagaatgaagacgacgatgacgattgtgtgattttggattttgatcctacggcg

SEQ ID NO: 1389 - DNA, 100310 bp, Arabidopsis thaliana
gattaacaaatataataattataataaaatattttatttatagtaaataaaatgccttgtattactattttaaataaatatattatgataatagaaaaaaaatctatgaattcttgataaaagaaattgttttttttttttaagtttgataattatctgtttttttataacttatctttgtttttttgttatatatttatgttgataatttcaatttcttgtatttatttaatgaattaaaatttgtacagtcaagaaaataaagctttgagaatttactctactacaatcttaaaaagaaaactagattttaacccgcggtataccgcgggacgatttattttttaaaagtaatatatattaaaacttgcaaaatgtttttttataaaatgtttacagtttgtaattgttattaattaacgctataccacgaatccatgagataattgttaaaaaactgaagttttaacttttattaaaacagcatactaataatattttaaaattttataaatattgattcaaatacatccaccatataactcaattccaaaataaaactctttctttaatttctttacccgtcccgtgattagtttttaaagtaataatttttaaattttaaaaattatttattatatataaaagttttgcaaattgtatcattctctaatacatttatatttttatagtttaattttatatatagtaacattatacataccacataacatttttggttttatatagcatttttctaaattaagatgatttgatatgtttaatattagtggttttaaaaataataaattaaagatttaaccaaaaataatctttgatgacccgtctttagatccaataagccctataattaagaaataaatattgtcgttaaataattttggtaaccttaatgacgtcattaaaagatttttttttgattaaatttttctaatggcattgtcctgtaattaattacaaaaattaaggttatatttaaaatgtacttcccaaataatatagtaagattaaaaaaattggattgtaagtttaaaagtaaaactacaacacaattagtaagtaatcaaggctttaagaaaaattaagacggtaagtcagacttacagcccaatcaatcatacactaaagttacacaatatacataatgtaatataaattcccttaattaggtttcttctttttgaccttacgctcaagtttgtgggctaatcaccctacacaaatctattaattccgtaattacagatttgaccgttcccccatataacactatcggtatgtacattcatattgcatttaattatacatttatgttcttcagaaatggtaattttgtgatacctaactttagacccacatgtcatttttgtcattagtaaagtaagtatattggtttttgccgtaactgtcccaaaacctctaatgataacaaatactattccaaatgtcaaataccaaaatatctcaatacctggctacctgctgacaaaagaaagaaaaagaacgcagccattctgtgatgttgtcaagatcggtttagatttccggttatcaaaacaaacattggtgccggtttagttaaaacacccgacttttcttcgcgattgcaaatgatctcgttggtcaatgtcattttcttatccatgctatcgccaaatcgccaaattatattggataaagtcacaatcgaatgattcgcccaaacgctaccgaaaccatcgaacaagtcttttattggttaatttttctttaacaaaacctttggtaagtcatttacttgcaacttataggttattaactcatttggatttgacgcgttcaaacatttaacacagtcaaactcctaacaagagatttcgacgttaaacagatcatcaaaacttcaattataacaaaacttcacaacaaagatatttatattggatcaagaaaaactagggaaacacaacaaagtattagataataatttgcattcattcatagattagtaccaagtggttacaatctaacattatagtcttataaaacacgattatattaatactatttcataattaaaaccctaaggcacatctatacaacgatcatcttagaaaaatcaggccccaaaatccataattaattcttattagcagataaaatacgagattagtaaataaaataatatgaacacactaagatcccttcctcttttccttggaagatatccaaaaaagccaatgagacttcgaaatacggtcagatttttttctttacatgagcaggtcagatacccacccgacatcaggagcctcacccaaattctgatccggatcctgggcaactcgatccatgcaattctccttgtgcagtttctcgcgcatcttttctcgtagctcacgacccgactcaacgacacgctccattacgggttcttcctccaaaccatactcccaaatatccagattccctggtcgggtcggtgttgtaggcagagactgaaacccaggacccaagatcgatccacggggcgacccgaatccgaataaaggattgttacgaggaaatgattttaccgaattaaactgtaaattcctaaacgaaggaacgacgtcgtttatcgaacaagacccgagagatcgactcagtgactgagtcatcggagaagactccgagtcagctcttggactcatcggtggcgaaccagaaaccggagaaatcgacagctgaaatgctctagcacgaatcggagacgaaacgtcaaaagaatcaactctgtcagggctccgagtatgtaaaaacctaagctgatccggtgaatgagcaaagaaacaaattttccggagacagttaccaccgtctttacacggctgagtacggtaacgagctggatgaagccaacactcgaaaacaccatgagcaaactcacaagagtcacctttcttgcagccacctttacgaaaatcaggacaagccgtaccagagtaatggtacttcctcggatctctccggcgagctttttctccgggatgagcgtacggacactccgtccaatcatgactccggccacgagcacacctcctgactttgaaatcgtacatacggaaatggtcgcatgagtaagcatcgattggtgaatccggacccaatagatccgggtatgactccggatccggttcgttagacggcaaataacgctgcaaccccgccaaagcttcaagcatgctacaatctggactattcatcaccggagaaaaaaactccgacgttgtaagctcttcaagtaccggccatggaggtatttcaacagtgggataagtcctgcgagtttctccgatcatcatcttctttaatactccggtgaacaataaatcacattagtcgacgaaagagttctttttttttgtttgtgttgtttgtttgtaatacaccggcaaagctacttatgtagttgaaacacttaaccgtggtttggttaaaattatttaactatggttaaagatattagcataggactaggttatcgtaacaaagctgtgagataagcatgtgaaacagcggctggagacttatccacgagatagacgtacgtggaccgtttcgtgatgtggacgtttatcaaaatgactttgacgaagtttaaagtaaccgaactgtgagcgtaaggttactttaggattattagatacgttgaagtcggtcgaagtttagattctccgaaagacgacaaaatagataatccacagttttagtttcattaattagtctatccattgccttattacttaatttgtttgtttaattattcgttgcatgtatctcttattttttatatgattcaatataataatttattgtttattattgtcattttgatttgaatattattatatatatcgaatgaggttattgtatcatttatctagcaataaaaaaaaagttgtttaataatttgctgttatcgaaaaaaataattttatttttgatatgatctgataatttgttgtttagtattgtcattttgaacctaatattattgtatctaaatcgtcaaaacaatttcattatatcacttatttagcatcaaaactataaaaaaattgtttaataatttgttattatcggaaaaataatcttatttttaataccaaaatatctgataatttgttgtttactattgttcattgtgatcttaatattgttatatctaattcgtcaaaatgattttattgtttcacttatctagcaacaaaacgacaaaaagttgtttaataatttattgttatcggaaaaaatgatcttgtttttgatatgatacaaagatatatgatactttgtttataattttcattttgatccaaatattgttgtatctaagttgttgaaatgaattcattgtatcatttatctaacaacaaaacgatcgaaaattatttaataatttattgttatcaggaaaaaataatcttacgacaaaaagttgtttaataatttattgttatcgaaaaaaaaaaattaatttttgatatgattcgaagaattctcataattttattgtgtattgttgtcattttaatttgaatattattatatctaagtcaaatgattttattgtatcacttataatttcattgtaccacttatttagtaacaaaacgacaaaaagttgtttggtaatttgttgttattggaagaaaaaaaatatcttacatagttctcaaaaattcgttttcaattttcgatttaattttagcaaaaaaaattagagaagaggataagaaatgtgtcggatgaagaggacatgttggaacagatttggaataacgtttaaagactttataggggcaaaaacatttatgtttctttgctaaatttggaagcaattccatatcctcctaaacaaaatcgacctctcatttatcctttgttctttcttttttgcacttttcttttctttcatataaatgtattttctcttttaaatttttataaatttgacaattgtttatcaaacttatagttcaatcaaacaattgacatggtcaatatatttgagtggtggcgatattaacatgttgaatgaataatagagaaataatagaaacatatttctataaatcaatgtttcctagatctaacgaagaagacaggttgcgaaatatctaaaaacgtgtagctcatccgattcaagaagcaattattatatttctttatttggaagatagtgaaattacacacgattacgacacaatgtcttcgttttcatagtcacttaacctattaaaccatagtaatacgtacggaccaaaaatatcttcaatgtcgtagctcagctcctacgaggctgaattgtattcttttataaagaaaacaaggcacacaaatttgattgaaagcgatttaatatatgcataataataaggaacatgtatatacatttcactcattaatgcttctttagacattagttcctctcaacttgctaatgcaatccaatcgaaagacggacttgaaaaactttagtagattacttctcttttgatttctactcgcttagatatttatttattcgacatttacgtttggcagccatacctttttgtctaatagtttaatgggatatttatccatagaccatagaataaatatactttaaaatatatctttttatttttaataatccaaaaataattcttgtaaatatagtgactacgttaaataactataagaagaaaaacaaaatagtttgtgtctttaacaaaaaaaaacaacttataatttcttgtaaatgtagtaagaaaattgtgtccattttaaccgctgcaatactagtctctctgatcaactaaaaactattcaaaattaagtataactatctgatgagccaaacccaaacatctaagaaaagtaggtacgccattgttatttaatttgatcaaggggatggagaatatatttgaaaagctaaactagtctagctaagtaaaatactattgaactaatgtcacttgagattaaaaaaggttcatgtatgggtaacaaagaaaagtatggagtggtaaactacatcgcaacgatgagcatcacatgtggaatggtatggttacattaatttattatcgagttcggtgggaaacatttagtacaatataaaattgcttataactcatttcaagtatttattagtacaaagaaatctctttaacgaagataaaattagtctatataaattttttttataaccttaataaaaagtcaactgttagtatagttataaacttataacttataacatttgccaactaaacgatatgtttcatgcaacaatatttcttgagaggtattaggttaaaaagaaaccatgtgacccccaaattccacaatgtgtaatctccgccacaagttttaagatgtcaatttattacttttactttttttttttattattattcttctcatcttttgtcttccatgtatactaattttctgcatacaacttccctttttgtcatcgagcatctcaaccaaacaacacaataatattcccaatttgattatatatatcttactactaagacgaagtttcttcaaaaaaaggttcgtatactctactttttagtttttaagcatagagtgttgttactgctgcttccgatccaaatcagaacttacttcattcgaagatagaaaacaaattgtaacagtttaaagcgtctaaataggacaccaattatttgttctctcggaatgtttttataatgtaaaggagcttatgcatgtgatgtacgtaaagagtgtatacgtacacgcgtcgatatcacacatgataatagtgccacctcttaaggaggcatgagggatcatgcatgcatgccccatccatctcgaccgttcattatgcttcaaaatgaatacttttcttacattattccaccaaacatttaaaataatttattatttatacatattgaattatcgatcccacgatcatgactactacgtgatcctctttattcccccttaattactcaactttgatttatatagtcaccatttcttggtcttatccacaaaacttcaactccatatttcagaaatttcgtgtcttttataaagcagtacttcgctttttaagttttaacgtgaatcatggatgttgtgaaaaattgaacgtagtaatttcttaaattcatcttttttttagttaaagttttcttaaattcattctatgtacaatacatcaatgtttagtatccaacacgtataatgaatactataatatttttaatactaaaaaatgcacgcaaaagtgacactaattaacaagaaattttgcaaatatataaacgttctaaaatgaactaattgattgttagacgcgtgtagaaaaacaatatcatatagtgccaatcgaatccgaatattttgttttttacgtcttcaactagcaaacttactttaactggttatgaagggaaaacaaaaaaaaaacttaaaatctgtaataccaaacagggatgaaatatcaaaaagaaataatgtgatttgtaatatcaaatatcacattatttgcctcaacgtaacgtgacaaagttcacccttgtggacacgtgtcttgtccttgcagcacgtgtctttggatggtaaatacagtaccaaattactttccgaaaatatttatgagaagttgaaataatcagtaatgttcacaaaattgtacggaaaggtatacgtggctgagtccttttggttgtttgaccacaagcgtgtcctttctcagtgacatcacaaaccaagaatctgaactctcgttaggatcttatcacgtgtcaacatgtacgtcgccccaacaatttgtgagtttgatcgtagattatataactcgtaatataatttgtcacttttctaattcgtacaagttataatatatggtttttaatgaattttcaaaaattatttaaaagctactcatacaattaactctaaaaagaatagagcactcgattagatggagccaatgtcacttccatttcacttcaagtggtacagagtctttttttttttttttttttttttgttaaaccttgctttcattcaatggaacatagaacaattacaagaaatagagtttaagaactcaaagattaaagcattacaacaaacggtattccccaataccataaaaagaaagataaagtgcatcgatttgaattccatgagagctttgaggcataagcaaagaagcacagtgcaacatgtgaggtcacagtaaatcgaaggatcatcctcgaaatagtcgaaggacaacaggttggtcacggtcaagggacgtagtgacgttgacaaagacatcgaagctatagatctcaccggggctagctgcaatacccacggaaaaaggatagcaaggattcgaaggactatggttctatagtcggttaaggttagctttaggatccaacacaaaaggcaaacaaatctccgatcaatagcggcatacactatgagacaatgaaacatgatgatggacatagtgatgagcttgaaggcgatagatgagctacttggtgaccattgagcgatgaaaacccataattcaaagccacatttgacacaaaggcaagtacaattcagaaaaattagagagaaggtcttcaagactttggaatgaggccacacattcctagatatagctaaaaccaggattcgcaaatgataaatgaagaaccaaaacctccatggtgatatctctatcaaatggtgtccatggccattgataagaggagatcgacacaaaaagattaatgggcctaacatagaattaaagaaatcagatctgagaataaaagccttacaagttctaaaacaacagatgggcttgggcctgaaaggaagaaatgggccagcgaaagaaactaggtccactggggaaaaccctagtttcatgtcgaggtgccaaaacgctgaggtagagcggcggctgtccaagaaaggcgagatgatttgcagcgcaggagtcatctccgatgagtgaaagatcgttggaagcagactatgaccatggctcaagtaggtggcaaagatccagggggtcgcatccttttctacatgggatagctccgagcacgaatctgtccaaagagctgcagcagaggaatgggagaaggagagagcatgttgcttcaaccttccttccttgatttgtgttgaagagcgtcctggtagagatgcaaggtgaggtagattggttaacaagttatgggctggaataacaaggggaataacaagaggggaaaggatgggaaaaagcttcaaaaggggaaaaataaagaaggaaactaaggtaacgaaatagcgacgaaaagaagagaagttggggtcccgatgccggtgaacagaggcttcaccggcgccggaaagagtagtcgatgagagagcttcgataatcggacctgaaagagaaatagtttttactttagttagttttgtggtacagagtctctgaattggaattgacgttttagatatacaatggtatccatatatatatataccaaattaccaatggtataataccatcataaattcattatcacatcacttttattttagtgaatgaagatgtaaatatgctattatgaaaaaaatttgatggaaaacaaaatcattgatataattgttttcactcgtacttaggaagactccctaatagtaaagcaaagttagacgatattgttttcgtctttggacacgaaatattttgaaaaccttccgacataaattaacggtgaaggccttttaaaagttttgtcgttaaaaatatgatttgacaaatcgacttagttagtgggtttctggagatgtgtactatcatggaaaagaacgagaaagatttttttttttaaaagttgatgtgattgggcccaattagaaaagttttcggtccatacaaaagcctagtaaggttgtgttaactagatcattattaaaaatatttttggttgattagtattattattaattggccgattgactgaaaaataatctgatatggttttgccatcttttttgaaataatcgttaaatcattttataaaactatccacatgtaaaacaatgcatgaatatatacagttgttaatcgtctaatattgttagtttattttgataattgaattgtactattcttgcagctgtttgaatggttagatgttgaatcttacctggtacacaaatcattactggttagagcacagaaatcatatatggaccggcacaacattgaaataagaaccatcttctctaatcaggtaactaaaaaggaggtcacgaaacctcaacgaagatgtgaacgcaaactaactctctcgtcacaactcttaaactcagtctctcgtcagtcgtcacaactctcaaggttttgttttagatttatatgtatgtaatacatgaatcttttgtttttgaacttatgtatacatgaatctaaaacgtgcatttttctaatctaatcaatatcttacctcctttttccaaatatttaatcgacatagtccaaaaactgtatgttcatccataattaataacaacaataggtcttgtaaaacccctttagtatgttgtaaaacctagcaaatctactagatcgcatctaacatatctgtttatcaaatttaacatgtgtaattatctagatttaaaagaatctctctcattttctaaaaaacaaattttatttttctttaacagacttttattttctaaacatcagatttaaattgtatttttaattatcttgatgctatatattgggaaccacgatactaacagactttcgttgtcgcatgtaaaatgttttttttttgtaatcagacttccaaccaccaacttagaaaagtatctataaaacagagaccaatcaagaatacacttatctcttttcttaaaagaatcttttttttttttttacttcattgactctttttctctatctctctagatcgaaagggaaaaggagatagagattgaagatgcgtgacgcaatcatcgccgatcctcttctggccatcgaccatgaaacagtcgcagagaagaagaaacagagcaaaaatctaaagatttctcttttactgcttctgattctcttagcaacttcaggtctgttttttgttttactccaataatcgaggaaacatttacttctagttaatgaaacaatacaacatcttttttcactagtgaaaaagacttgttttggaaataaatatttctgattaatgtgttctgaaatttcttaggttattatagctttagtgacaacattacaacagttttcttatcaagacaagctattgatgatgatcatagtcttagccttggaaccatcagtgacgtggttgaatctgagaatggtgttgtggctgctgacgacgctcgatgttccgagatcggtgcctctgttcttagaagtggcggtcatgcggtggacgccgccgtggctattactttatgtgttggtgttgttaatccaatgtctagtggaatcggtggtggttctttcttgattgttagctcgcagaaagattccaaagctgaggcttttgacatgagagaaactgctccattagctgcttctaaggtaaaagaagagcttctctaactaatctctcttgatccagttgttcagtgtgtaatgtgtttagcttgtgaattgatgattcaggatatgtataagaacgatgctagtgcgaaatcgttgggcgcattgtctatgggagttccgggagagatagctggactttacgaggcttggaaacggtatggccgtcttccgtggaaaccgcttttcgagccggctattaagctggctcgggacggtttcgtggtgtatccgtatctcggaaaggccatatcgaccaaagttgcgatgatacttaaagatccgggtatgcggagtgtcttctcaagaaacggacaggttttgaaaaccggtgagacttgctataacccggagctagctcagagtcttgagactatttctgagcaaggcccgggagcgttctacaacgggacagtaggcgagaagcttgttaaagatgtgaagaaggcgggagggatcataacgatggatgatctaagaagttataaggtccgagttaccgatgcaatgtctgtggatgttatgggttatacggttcatggaatgccgcctccttcgggcggtacagtcggtttttcgatggttatgaatatcttggatagttactcgaatctttacactgcttcgggaagagagctcgggctgcaccgtttgatagaagcaatgaaacatatgtttgcagctcgtatggatcttggagaccctgagttcgttaatgtaacaaactctatgaaccaaatgctctcgaaggctcacgcggaagaaatccaaaagaggattttcgacaacacgacattcccacctgagtactatatgaaccggtggagccaactcagggaccaaggaacgagtcatttctgcgttgtggatgcggatcgcaacagtgtgtcgatgacctcaaccgtgaattaccgttttggtgccggggtgttatcaccttcaactggaattgtacttaacaacgagatggatgatttctcaacacccacggaaatcactcccgacatgcttcctccagcgcctacaaatttcattgaaccaaacaaaagaccattatcttccatgacacctctcgtgatcaccaaggttcacaatcaatatatatctacttttcctgttatctacaactcatagtctcatactatgagttctaaccacggtccatggaaacccgcggttgtgatttttttatcgcaggatggtgagttcgtggcagcgcttggaggagctggtggaatgcatataattccagcggtgcttcaagtgtttcttaattgctttgtgttgaatatgaaacctaaagaagcagtagagagtgccagaatataccatagagtatgcatagttcaaaaccatctgattgttgttactaacattcaaaatgaaatactcaatgtattttggttgttgttgcagttgataccaaatgttgtttcctatgagaacttcaccacgatcaatggcgatcacataggggtttcagaagataccaagatgtttctagcagagagaggacatgagctaaaggagctatcaggtggagctatagttcaacttattgttcagagtttcaaggaagagaaagaagaagaaatgattattgaaattggaaggaaaatcggaaagaaatcgaaaccattaaagggcttacttactgcagttagtgatcctcgaaaagatggaaagccagctgcagtttgatttcgttattaagctaattacaaatttcctcattcaagtcccattctctatcatgtaaatttgaataaagttacatgagcctcaaagactcagcgtgggatatatacagaagcaaagttgtagttggaaccaagagttgttacattattctcacaagagttatctctctctcttctctttgcttgaagaatattataaaacaatttttgaaaagctttctattaaattaagaaaccttacttcccaaacaaagatgtcctcaagtcaaaacacaaacgaatgtttttgtagacagtgttgatcaccatttcatggtccctggttcaccaaccaactggtttgagtggatcttgtcagcttgcttcatgaaactcggttggttcgtcgaagacaaaagcctcgcccacattctgtcagtgatcaccaccttgttctgtttctccgtgatcctctacacaatattcaaaccatgttattaggattcccaaattgatataaatgtaagagatgctcaggtatgagtatttggtcctgagactcacattgaagggaatgtaagtatgtcttccattgacaaggccaacagtgaaaccattgtaaccagccatcactccatgaaccgcgctttgagctaaaagcgtgcagcatacattgtctgatgcattgctcggaacagctcgtatcatgtaggttggatctgaaagacaccaaaaaagaagaagaaactttatctattatgttccacatacacaaaagaaaaactcataagatatctatatacctatatatttgagggtaagggtcatcttcttggcaaaatgatcctatataagaagagacaaaggaaagcaaatcattttctcagtttttgtctcacgaaaatcctctgtttttaggaatgtcaataatgttaaccttgattctttgggagatccataggccaatgtcttgaagaagtttgtttccagaggcatctttgagagttgtggactctttcatgctttcagacaacagatcttgtcccgcaccttctgcaattacaatcaccatatgaccactctcctttaaccgtttatcgataaattcaaaaagcccgcccgagccttcaagaaaaaatggagattccgggatcaagcaacagtccacatctcggctggctagagtggcatgcattgcaatgaatcctgcacaaacccttaagaatccgtaaacatctcttcggtgctcagctaaacttgggtgaaaactacctaagtctagggaaacttcttaccgctgtaccgtcccattaacttcacaagaccaataccattctcaaagcttgtagcttcgacatgtgctgcattgatagcacgttgagcctcttctacagctgtgtcaaacccgaaagatctatcgataatctgtaccgagaaagaacaaacagtcattatcccaaacaaccataagaatctacgatacaatatcgaaatctcaaaccattaggggggaaaaaagaattacaggaatgtcattgtcaattgttttcgggattccggcaaccgcaactttaagcttgcgtttcctaatctcctgcagagacagtcattaaagaaataaccaacgcaattattgatcagaagtagttatgcctacctcgaatatagcagctgctcctttctgtgatccatctccaccgattatataaacctggttaatcccgcgatcttgaatactatctactatcttggtggtgttgtgaccgcctcttgaagtcccgaggatagttcctccgcttctatggatatcattcactgtttttaagtccaaatggattgtgtttctcgcgtaaaatcctctgtaacctccctgcaaccaaatttgatcacaagattaatatattgagctaaaaaattgagagcaatgctgaaagaataactaaaccaatgagacttacatcaatgccaaggattctcttgacaccatacatataagataatccacaaactatctctctgatcacagtattaagcccgggacatagaccgccacatgtaacaatgcaagcaagaacatcatccgactcaaagtaaacctgcgtaaacaaaacagtcccatcaacactcaccttctcaagcatagactctttgaaaagagacagaatctaccctttgacgtggtcctgcacgacggaaatgcgttcccctaggactatcaggatgaactactatctacaaaaaggcgaaaccagaatcttcatcaacgagagacgaataaacaaacgctaatggctaaaggagagagtgttgtacttactttttgaggaaccgtgtcatcctcatcgacaaaatactgcctgaaaacacattgaatttgaatcaatgaagaagctgatgattcaatcacaaggaaagaaagttaagttccctgaggtaaatcaaacaaacagtaacttacttaacaacagagtaagctgcattgtcttgtaatggatttggatatgtctgaaacattcgcatgacacaaacaatagatttcatcagagaaacgttaaatgatattttaaaaaggtaactttaaaccacaatcatattaagtttcagtctttttcccgctcgcattttcagtcacattatagattgaaatttaaaaagtcagagagacgtacaggatgatcaggaaagtcgtcggagaaatgaggaacgtcttcaagaatataaccggcgggaccagtaacaatcttccggtccgagtttggaacagaagatgacataaccaaccttttcggagactcaaagctctgattgtccgaaacaatcaaacggagaccagaatcgaagctcaatgatcgatattttctactgattctagggattaaaaaccccaattgatgatgatgatgatcggtttcagattgtgtactccgacgtgaagatgatcggaatctaaacaaatccatacaatgaaagattacagaaaatgtcatcacccattttttttttatatgaaacccaaaaaatggaacagtcttctttgacttcaatttttttttttatattgttaacaaaaatggaaactttagaaaataattcacctttgaagaaatttgaaaccaagatggaaacaagaagtaaggaggaggaggaagcagatcaggccatcacgggctggtggtgaatgtatggatgaagaagataatgaacaagtggcgatatgtttgtggtttttgcttttaatgatgagaagatacgagacatttcagaagagaaggttttaattactttggtgcaaaattgaccatttcaataattgaagagttatatttaaaattcgttgaaagatttgggctgtgtgtaataattattaataaaggactgatttttgatgttttttttttattttaaaaagagaatgattttgatattaatttttttggagtgggtgttttggttattggagtaggtttctagttatagaaattttaggatacggcatgaactatgctctagcctacaccggcatgtttctcatttgacataaattgtaagtcaaaacatatttccctaattgggcttgatttccctaattacatttattttcatattgcgtaagactaggcttaagggaaattgacacaaaaatgtgtaagggaaagaactaagtatgtccggcccacatgacagaacatctaatttaaaatgggtaaagctcataagcccactaatattctgatttctgaaccaattgaccaaccacaatttgcccatgttctaagatttctttcatgtgtttaccaatgcaagagactttaccgttagaatacaaatctattcgatcaaagttgtgttttctgtaagaatatcttccatcatgcaaaagtttattacatgtctatggttacaaattggttaataatatatctaatatgcatttgtaacctttgacaatcagctaagataaataacctaatttgtttttgtttcttatatctctcttcatttagcatccaaaaaattaaaactgaatttgatctagtagaactttgtgataggaaatgggataaaacggagctcaaattctattaagttctaaagacttctaaaacaagaattatggcaaagatatgataatacccagacaaagaggcaatcataggcatctatatgttttattcaagacatgtctttggcccctccatgatttcattctttgactctataaattattttgaattttcttcttttatttaagaaataatataattatgatgggtattctataaatacacaagattatatatatgtatgtattatatatgaatttctttgcctctctttttggtttggtggcgttctaacgttgggattgagattgtcatttttttttgttaaaggaatgagattgtcttttgtatatccttaacttgagttgtccaaaaaaaaaaaaaaaaaaaagtatatccttcacttgaaactcttgacgttaaagttacaatccttgagaaatcgaaatgaattttaatttataaatctagctagctatttagattcttttttgctgtggttatgttttcaatctaaacaaaccatttattatctcaaattatttttaacatttcggtcccgcttaattattatttttagcaatatatttttttttttactgatttagtgattttcaaatcataatgaatagtttaatttatgttacaagaaaagctgaagtataattttggcagtttatcttagatttcagaaccataagaatataaaatgttcaaagagagttccaagacctaaacacttcaatccaatcgaaagatctcaaattcaaggatggacccagagtttgtgggggctacgttaatcttatttcatactacatcatataagagccgtataagcatattacacctgacactttctagactaaaccgcttctaatcaaaaaatttaaaatgcagcgtgaccggaaatcaagaaaagcaaaatactatttttgttgttacaattaggattaaggcttatgtaaaaatgaatctatttttcttacacttcattcgagaattttaagtgtacgatacagttttcttctattctttttttttcctttggtagttttgaccatctattgatttttctttctcaaataagttgacgtaaaccacattacatagattatacgatagaactcataatcattacagtcaagatactcaagattgttatgaattattatatgatagatatgtttaaagaacgaacacaaattcagttaataggcgtaataatttcaggattccttcattaaacatttttatggcaaaaggaaacgattgtctgatttgaaacatatgtaaaaaagtatagttgccatgatttcataattcatgctgatgtaaacaaatctccaaagagaccatataataataataaaaaacaaaatcataattaaaaatattcgcttttctatacaatacgagagacatgattttatttatttcaaaagaaaataaaaaatacgaaagatatattataaattagaaaataagagatggtgtggtccatatgatgggtcgctgctcaaattgccttacttctcaagcaacctcttaattcctttttttttatctgcagaaattaaaataaaataacaaaacgaaaaaaagaagaaaaatgaataacaaaagaataatgatcacttcctccagctcgatgcccatgtgatctctcttccttcttctcgtctttttttctctcttcatcttttttactttttttgttttgtttattctcttctgttcttattaactttctacaaaaacttacgtttatcctagaaaaattagatgtttatagtatagtgtgaactaagaagtgaagtatattattttaatatatcatagatatagaccaagaatacaaaatccatgtagtaaataagttataaattttttttgtccaaatttacttatatatatatatatatatgtatttatttatacacatcatctaaaggatagtagaatacacaatgttaaagttaatagcgatgaaaatttccaatctattccagcatgaaacttacattatattataaagatacatagatggtaaaaaaaaaacttctgatattattttattttcaaaaattcatatctccactctattataaatactaaatttgtaatgaattttcgatgttttaaggatagctaaaatgagaagttaaagaaaaagagtagcaaaaaggaaaaggaataagttagaatgtagaaacctatactatacatacaaataaataaataaatatttttattataaaaaagtatagaatttgtagataaatgtaaacaaaccgcttgaaagactcatagcggcttcttaaaccagcaaaggcaaaataaaaggtgggtcagtgaatgggtttcagagccacctttcccttttttctcgcttacttcttcagttaaagtttgagatagacacatattatacatcatatagtatacatatttatgttatatactatcttaattccctcaacaaaaaatctctcgaatgtttttttttaattaatttatatacctttcacatcccaaactctcacactttctcttcttcttcgtcttctcctcctccttcgtcttcgtcgtttattaactctctctctctctccttgttctctctctctctctttttcctgatttgcagtactgtctaagatcttattccgctcgaccaagtttgttctttttagcataatttgggggagtttttccccattaattctcactttgtcttcttcttgtgtcggttaggttttcaagaaaaaccctcttttgtcttgtctcctcaaaatcagttgcttcttctctataataatagagggtttattcatatcttcactatctagcttcttcttctatcatatgtactccaactctcggatatgatcgaaagagctttgttattattatctttacaacttcacgcagacgcataagagagagagttgatcaaagatattcgagattgagatgaacaagagtaatcctgctggttcggtgactggttcggatataatagacgccaagatcgaagaacatcaactttgtggatccaagaagtgtcctagctgcggccacaagctcgaaggcaaaccagtaagtaatattcctttttttttcttctatttgatttcagttcacttaaaaaataaattctttctaccttctttttctcatttttaggtcatttgtaaatgttttttaaagaaaaaaaaaagaaaaagaggaaaagaatcaatgaagaacatcaagaatgatgctctctgttttattctatcgcttgcagcaattcaaaatccaaattttaaagcgtctatatacgagtctttatttgtatagttgtatatacttatattctcttgttctttttctttatattaattaagtttttgttttcccctctttttagcaggattgggttggtttaccagcaggagtgaaatttgacccaacggatcaagaattgatagaacatttagaagcgaaagtgttagctaaagacttcaaatctcaccctctcattgacgaattcatcccaaccattgaaggcgaagacggcatttgctacactcatcccgagaaacttcctggtacatacacaccttcatgcagtccatatatcacattcttgatatatcttcattatatgattatttgataagactaatatacataatagagcattgtgtcacaccaaagtttgattttgttttagttgagtcacaccaaattttatatctcttatactttggtcacaactacactatatacatacctttttgtataacctatacatctatatatatacattcttcatgcatatcttatttataaattacacatgcatgtcttcattataatatatgattgcttgatatgactaccaacggagggtcaaaccaatgttttgatttttctttcttttcatttggtcataccaaagtttgaatctttttaatttgggttacacaagaaacatataaattaacaataaagagatttttcttttttcaacttttataggagtgactagagatggtttaagccgacacttctttcatagaccatcaaaggcgtacacgacgggaacaagaaagcgaagaaagattcaaacagaatgtgacaataatttgcaaggaagtagtagctccggtgagacgaggtggcataagaccggtaagacaagaccggttatggtaaacggtaagcaaaaaggttgtaagaagattttggttttgtataccaattttggtaagaatcgaaaaccggagaaaaccaattgggtaatgcatcaatatcatttggggacacatgaggaagagaaagaaggagaacttgttgtgtctaagatcttttatcaaactcagcctaggcaatgcaactggtcgtcttctacatcgagcttgaacgctataggtggtggcggcggtgaagcgagtagcggcggaggcggcggagagtatcatatgaggagagatagtgggactactagtggtgggagttgttcttcgtctagagaaattattaatgttaatcctccgaatcgatccgatgaaataggcggcgttggtggtggcgttatggccgtagcagctgcggctgcggcggttgcagctgggcttccgagttatgcaatggatcagctcagctttgttccgtttatgaaaagctttgatgaggtatgcacccatttttgtcattttgattttttcgtttaataaaataactaaattaatttgcatactcactggtaatattaggaccaaaaatgtgatttgactattaattatatttatcaacctcgcataagattaataaaaacaaaggtgaatgctggaaaaataatgcttagggctcttatattggcttgtattgcaagtaaacaatgctcattttgtttgtgtaatttctgatttttctttgtcttattataatttagttacctaaggaaattaaataatcaatttatacgacgtgataataatgaacggttggtgataatcaatttttaactaacaatgtgacttaaagtttcacccgacgtgataaactcagaaaacaatgtctaaaccgcaacggtccaaaagaattgtgatataataaaagtaattaattttctatatataaaaaaagaaagtatatataatatcagttattttaattagcagttaaaagtttataaatgttcaggtggcgaggagggaaactcctcagactgggcacgctacatgtgaggatgtaatggcagaacaacatcgtcatcgtcatcaaccatcatcatcaacatcacatcatatggctcatgatcatcaccatcatcatcatcaacaacaacaacaacggcatcatgcattcaacataagccagcctacacatccgatatcaaccattatttctccatctacttcgcttcaccatgcctccattaatattcttgacgataatccttatcatgttcatagaatcttgctccccaatgaaaattaccaggtaaaatacctaatcttctctttttcttacattctagaactacaaaaaaaatagaaatgtttatcacccttaatttctgtttgaattaaaataactaattaatttaggagaaggatacgtacagtttcatgaaattaaacaagttagctgaaatatcactatgatttatatataataatcaatataaattacgttatgttactattgattgaagtgggagtcatgaacctatcaaacttatataattaaggctctcaccatttcaattaattattaaaaaaaattagggttgtgaatttgtaatgtaattaattatagaggtttttactgtgttcttccacacagtcacgtatgcatatctatgtcggtatttaattaagtagtagaaattgtggttcttgtacatgttaggtcttttagatatttgcatgcatgtgacttaacaatgatgggactacataagcatgcaaattgggttgtaccaaaactgattatgacaaataaagtatatataagatattggtcaaggatgttaaaaaaagaagaagatattggtcaagaaaaaaacaactaaagttcaatgtataatatataattatgctgatttagtttagtaagatggtgtgtctaactaatatccattatccaaagccagcaaaagctaagtcgctttttagtgtcagccaaaccaatgtggtctttggtgatggagagacaagatgattaattttaatgtcttaagatcattttcttaaggaattaaaatatatttccttactgagatatattacttttgtctttattgactgagcaagacacaacagcaactacgtcaagaaggagaagaagaacataatgatgggaagatgggaggaaggtcagcttccggattggaagaactcataatgggctgcacttcttctaccactcatcatgatgtaaaagatgtaagttattaatcccttttttgactcttaatttcatgaaaaactcctctttttaaccatcatgagctatcttttattcttttcaaaaaataattacgagtatctatatatatgactatatgagacatatatttatcaccaaaataaaatgtcatgcattaagtaagatgttgcttggtatcacgtagattcagaagtattgtatatggcagtcatcatacacaagagaaagagacttaaatcgagattataaataaatgttttaaaataataatattttttccgtaagggttgaagataacaacgtagattacatttgaatgaaagtgaagaatatttttaagaaattttttttctttataaatattttttctttatcagttttgcatgggaaggatacttaagactacatatattccttctgcgtttattctttacttaattggaaagagttaaaacagtgttaagtaaacaaaaccagaaaagataaagaaagagagatgtgtttgcttttgttatagtttgctttttacctataaattactcttctaaagaacaatacaaaaattttcagattcttttctcttttttaaaccatttaaaaattgttttaaaaggcaatgatggtggatataaacatgtatgtcatataattaatgtgtttattatacatgtaaatactttaaagtcttttttcatgcgtagtacctcgcgagacaagttcggtaagggacattagtagatttcattgtgttttcgtgggggacagcatgtctgcattcctttttttaatctgtctaaaatttaatggaatgttcttattattttggttttataaatcatattccacaatgtaaattatatatacacctgcaggcaaccataatatataccctatttgtggaatgctagcattgtatttttttgttggttaagttagttcagtttcagttagttcctaaccaaaccaaatgtgattgacttttttggttggtatatatgtgtgtaagtatgtatgtatatattgagaagcgatttggattggtgcaggggtcatcatcaatggggaaccaacaagaagcagaatggttgaagtactcaacgttttggccagcccctgactcttctgacaaccaagatcatcatgggtaattgtgccattttccagtctgatgatcttgtcgacccacatcacgaaaaactgttactatcatacctatcatgatgctcatcgtcatcatcatcatgacatctccatatggaaagtggtgcatagtttgatcttggaccaatcaagttatatatgcatgattttgcaatggtggagggtttttaagcagcaccaaagatcaagtgcctttttgttatatagttcaaaaggattttgatatatatataaaaaaaaggaaaaaaaggaaagaaaaaagcatgagagaaaaagctgttatattccaaagagactaagaagaagaaaagcaaggaaaattgcatgaaaatcatcaacagtccatataaaattagatataagtatgtttattacatgttattttaaattcatttcttttgttgtttgatttctttgtttttgttaattaggatatatgaaatgtataatttattggtttttgtttgatatatatgttggtaaataatactagctagtattatttgcttgttataccacttcccctatactttttaaatagttcattttacttttggtaataatccgatgcactgaaacccaagtgtcaattgaaatctgatactatacatttatatatttacgaaaggccggttagatcgtggaatcatctaaaattagtttcaagttatatgtttagtatattatgtcagacctttcactcaatactataccatacatgtgtcatggtcttaatagtattgtttcgaagtgtcataatcttaatggtctagtagcataacctatagttcagtatcataaaccttcagatttagtttgatttgtatattagtggctactagtctacagtgttaggaatttaattagaagacttttaataaggtttaaaatgttaataaagaagttattgtaaattcagtggaatgatgtataatgttaagaaaagacttctactatgttggaaactaattaaaatgaatatcttaaaaaccgtataagtaagagtacattttcattgtgtgagttttgatttgtttgaaacaagagaggagggaactacaccaagtcaactaaaaatgaattcctgttcgatttttttgaactgtggaataatggaatctgtaccctatagaatataagaagtaatatcatcttacaaaagcacttatctatgtttatgtttggtctctttagtctttaagtttgtccatataatatgtctttatctatacgtattgtttatattgcattccaaccttcttgatgctttgttctctatatatatatatatattccatattccactcgtcttctagcatattatcaaatgaccgctataacggcatgcctaactcatctttggatatttatatccaaaatatatagtgatatttcaatgttcacaatttcaaatttctaattaagtgcttattacattaacaaaatttattttataaatttagattaaccttattagttgacaaaattatatagtgaacaaatagtatgggatcgataacaaattcatgttgtttagctaacttaatgtagaattttggctgccgcgaaattaaggtagcaagtcatcaatatcgatccaaaagattcggttaagtagttaattgggagaggataaagcaaaatcaacatggggagagaggccggaagatgagacctctctatttttattttttatttttcttttttctttctgccatggttagatttcgaaactggaataaaggaataaacagacaatatttaccttttttgcttatttctttctttttaataattttttttctctttcgacaaatggattcgatttcccatttcatattttgaactcatattatattccttgaaatcttttttaacgtcctagtattcaaattgtatatcatgttttgtacttttatatacatataattatatatttaaattgcattgtccgtctttatatagactccacgaatcaatttatctttctgtatgcttgtttgttttttatgtggactccatcattactagacaaagtgttaatttagcaaatgatcaaaggaatcaatttatattgttattaacaatttctgaatttgaatcggatggtgatacatcgacaatcactagtataaattagtagactatataatataagccaagctaacaaaaaaaaactaacatgcaatatggagtttttaatatgtattgtaagttaattactagttgttgccccacagaacaaaaaagaagaagaagaagaagaagaaaatatctagtttttgaatacaaaaaacaccggtcgttttgtccaacagaagagttacataagaaatatgcgattttcacaaagaaaatagttgtttcgttttagtactaattaagtattcaaattaacttgatcgtttccaacggaataatactacccaagaactagcaactaggcttcttaggaactgggctcattgagcccattaaaggcctacttgcaattgaattacgtatgcattaatgcatgtcagcatatggttgccaaaaacgtgattatcatttgtctttgggtcttcctgtccgtcaaggtctttaaactgaaataaaaattgaatcgaactagaacaacgtttagtttgtgagtatgtccttgcctaaaagcctaaaaccaactttattctgaataacaaacagttgaacaaaatcaaagttttcgtaaaccctgatcatggccatttttggtacggatctcatgctcttttaatggttggtacgttatttcgaaaaatagaaagacttatctatttaaatcctgcaaatgaccacaaactgttttccattttttttgtctccatccatatcgtattgaaaactactttctagcatatcaatcctctttaaacagctcaactcaagttataagaaatagtagagcaattggtatttcgaaatacagagaaatttatttcgttgtcaataccattgtgtttgttgtgtttttgttttatagtgaatgcttggaaatctaaaaattttgttgtttagctagatcaagtaaagtaatttattgcaagagtataagctttcctctcaataattgcattgaaaaacatttggattcaatgcagctacatatattaaataaaattgttcaatggagacacaaatgcatttgtgcaattccatgtgatgcagtaaaaaaaaaatcacactcccaaaatatctctctctacaacacaagtcaacaacacaatattcacagtcacaagctatatgccttttcttatttatagcttcatctagattctgttcaattttttttccatttattattgcattcttgattacttctgtctaaaagattcacaatcaattagaacttgtttagtaggtggaacttaaaaaccattattagttaacttatcaagaacggaatcaaactagtgcatccattcaaatgacaaatgtaacaatttgtcaaaacatgtgattcaatattttacactaaaatgcattgaaataacaaagtggaacaaaaggaaaaagaagaaaaacccgtgatatgattcatgcaatcataagttgaacataaacagtaaaacttaacaatacaaaggcaaatgtgacataactacacaaggaacaaataagaactctttttgataatcttgtcccctctctcatatcatcaatgcttcttcaaccacatccactctgtttttcataatctcacactctctctctctctctctctctctctcacacacacacactcacacaaaactcattaatccactgaaacaatcactattcattctctttccttaagtgtcaaactcttgaaaaaactactttgaaggaaaaaatgtctaagaagaagaaaggcagcaacaactttaagcttctctgtttcttcctgtttttgggtggtttggttcagacagatgcttcttttggagtaggaggcggcgttggagtaggaatcggcggcggcggcggtggcggtggcggtggtgtttgggttggcggtggatacaacaacggtggaaatcgtaatgctgttccaggatcatcagctccaaacagggtagcttacaatgctcttcaagtttggaaatcagccatgagagaggatccatcaaatgttctcaaaacatgggttggatcagatgtttgttcttacaaaggtgtgttctgttctggtcaatctataacctctatagatcttaaccatgcaaatctcaaaggcacacttgtcaaagacctagctttactctcagacctcaatattctccatctcaacagtaacagattctcagggcaaatcccagattctttcaaatctttagcttctcttcaagaacttgatctaagcaacaataaactctcaggtcctttccctttagtcacactctacataccaaatctggtttacctcgatctccggtttaatagtttaaccggtttcatccctgaagagcttttcaacaaacggttagacgcgattctcctcaataacaatcaattcgtcggagaaatcccaagaaacctcggaaattctccggcttcggttattaatctcgcgaataacagattttccggcgaaattccgacgagttttggtctgacgggatcgagggttaaggaagttttgcttttgaataaccagttaaccggttgtataccggaatctgttggtatgttctctgaaattgaagtctttgacgttagctacaatgcattgatgggtcatgttccagatacgatctcttgcttgtcggcgattgaaattttgaatcttgctcacaataaattctctggggaggttcctgatttggtttgttcgttgaggaatcttattaatctcactgttgcgttcaatttcttctctgggtttagctctgaatgttcttccagggttagtttcgggtttgatttcgttgggaattgtattcccgggaggaattcgcagcggccgcagccggattgttccggttattccggcggagctatgagctgttttaggattccgacgcagcctttggcttgtgctgcgataagtgttggattgagagagagtaataatcaatactacacttcatctcctccatgaaagtttctaaagttagaagcttttttttattaatggttgatgctgaatgatctatcttttttgtaacttattaattagttgattagtgaccaaattaaacgttaattcctcttctgtgtaatccaatcgttgctaatgttgttttgtaagcagaagaattttgtaaaaatctaacgtaagaataaggtgcccagtaaatgtaattaaagcaaagacttggcttagtgaatttcaccggaaaatatcttgttttgaatcaattagatgaatgagtgatcaagcaatgtatgtagtacaccgcatttgggactttgaaagaacaatcacccacggcaaaaccttgcaagtcactccattgatcaccggtggatatagtatagatggctaaattagttatatatatatatatactatactaccaatttatgtttaggggttttcatgaacccgaccataacagaaacatgttttacgggaccatgataattctacattcccttaggggagggttgtttagttcatgggaaaagtatgtgttgaaatatgtaaatacacaccaacaaacgcacatatcatatatatatggtatacaagctcacatcaaaagtggattctaaccaaagaataatacaacgaaaaatgtttgctaaagagaagacaataatggaggaggaccgcgtgagattcatatgcaaaagaaccgtggtgagcactagatcgattgaaccagggcgattataccagttatcagtattggaccacgtcatggaaccaaaccacattcgtctagtctactattaccggtgttccaagactagagaaccgggagaaatcacaaaaaaattaagggagtcattagcatacacactcaattgttatccgattgtaaccgggagactggttaaagaagttgatggtatggaagagaataaggatttaagccaacgatggatggtaaagagcaacgacgccggcgtgaggatggtggaggccagagcaaccgggtcagttaaggaatggcttaggagtgtaaatagagaggaagaactcaagcttgttcattgggaagacatgtatcatcttcaatattattggtctaccttctgtgttcaggtatattcaatccggtttattttggtttggtttagtacggtctggttttgtcttactttttcttgtttatttttatctacaggtaactgagtttgaaagtggtgggttagctattggattgagttgtagccatctcttagccgatccagtttgtgcaatgatgtttattcgagcttgggcagatttaactttgtctcggtccatgatggctccaccactattccacccgttgccgcctcgccggttttccaaccaaagactaatctctaacaaccaactgcttagccattacatcaaatcttgctctctaacggcttcaccgtcaaacatgaccgaggaccatatggtcaccgttacttttctgttcccggatccgctggtcagagccggcgagaatgagccaaggatttcgacatttgagattttggctggactcttttgggtctgtgtgagtcgagccaaaggaaaaagaaacgagctcatggacatgtccttgtgcttagacgttaggaaattgttgcgtttagaccaaagttattttggtaattgcatggtttatcacaaggttccctactccaaaccggttaaaaccaaagataaactcttattccacgctgttcaagagattgagagcataaccaagagactagactacgacacggtcatggacttgattgagtggttgagtagcaataacggtgcgatatcaaatggttcggatctcgtgtgtactaatttagaaaacatgtctcattcacgtccgatgatgttcgaggaggatttggctctgagccacgtatcttgctatgtagaagggcctgtagctggaggtggacaggtcatagtgcttccctcaccgcccggtaaggaaccaatgagccgagtggttatggtcagtcttcctcaaagagtgatggttaaggttatagaagacgagcttcttttaagcttttctccggtcgtaattatggaagatacaaagcaattataattatactttatatgaaagtattagttaatgtttatactaaagatcaatgtaatataggagcaaaggtaatattaacgtctaaaacacataagtggttgttactcaatacataaaatcagaaatgaatagtgatcaaggaatgtagtacatgggatttgggactttgaaagaacgatcagccacggcaaaaccttgcaagtcactccattgatcaccgctattgccacggattttgaaaccttcctcaatcagtttcgatcgctgctcggatttgtaatttgtagctgacttcccttgatcatttggacctctgcataggtatataccgatttggtattgttaatgttttggaaattgagatacacgaaatttggttcaagtcttctgatttttatgtgtttacctcaagaggagacgttcccaaccggaataaccggcatcccggagatttgtctcggtggaagtcctttgatgctcgtcccgaccggttagcaaaatgatagtgaaaccaagtttcttgagagcattgtacagtctcaagctcgcatcaaaagctggagctgttccttgttccacccactcactaaatttattatcgtcatacggttcagacctactcgaccagaaacaaaagaaaaaaaaaaacaataaccgatcagcacgctagagaaaacgcagcaattacaacagaaccggaagtcttaaacctagaaccggatctaaattcgtaattcttaaacctactctaagattccggtttagtaatagggtcaacgaagtaaagtcaaatagtcaccgttgattattgtagataaaaacaaaatccaacggctaataatagatagaacatacccgtaaccatgagccttgtagtagtcaatattcgtgagaagcgtctcgtcgatatcgaagatccacacgtccttgccgtcgccggaaatttcaaccgatttcgcaaacgcgagagcataatcgacgatgacactgtaatcggataaaaactggtctccgttaagatactcggcgacggaatccacgcagattgacggaatcagatcccaagttccgacgttattggtctcggcggctaatctccagctgtcgcagtagcgagatccgtcgcttccgggaagcttgatgaaggaagttcgaatagaaatggagggattgattaagaagacgaagacgaagaagaagaagaaccaaatcgaaaggctacgaagagacgccattggagagatttagaaaaagagataatgatgtctcccatttattattggttatcgtttcgcaactcttaccaaaccaaaaactttaattagttaattagttagcagaatcaagaattttatatatagaaaaatgttgatcaaatcaattggattagagtataactactatctaagcattatctggattttgtttcacaattatgatcaaaattatttggttaatcagtccccttttcttacataccagtgacgtatgaatcctactaaaaatataggacgtggtacattaagaatggctacattcggtgaattatgggatacattcataaatccttattcatacataaatgataaattatcatgcaatatatcaatggcagatggtgatcaagcaacatagtacatgggatttgggactttgaaagaacgagaagccacggcaaaacctagcaagtcactccattgatctccagtattaccatggattgtgtagccttcttttacaacttgtgatcgctgctctgatttgtattgtgttgctgttttcccttgatcattttgacccctgcatttaccggttcataagtttagtaaattagttagtagattggtaaacaaaacaagagaagtggtttggtatagctttttacctcaagaggagtcggttccaaccgaaataaccggcatcccgaagatttttctcggtgacacttctatgaccttcgtctcggccagttagtaaaatgatagtgaaaccaagtttcttgagagctttgtagagcctcaagctcgcatcataacctgggtcttttcctttttccaccacctcattgtatttaatactatcgtacggttcagacctaaatccaccatcaacaaatcactcggtacaatatcgaaaaataacacaaaagaaatctcaaaccaagaaccagatctgaatccacaaatctcccggtttaatgcatggtcaacgaagttagtcaaacaatacaatcatattattcgttgataaaacagaatctaacggtaataataacatgagagagcatttacccgtaaccattagccttgtagtactcaatattggagagaagcgtctcatcgatgtcaaagacccacgcgtccttgccgtctccgccaaccttgaccgttttagcgtagtcaatggcgtaactagcgactacatcgtagtctttgtcgaactggcctccgttgatgtagtttttaatatagttttcgcattgggacggaatcaccttccagggtccaacattgttggtctcagcggctaatctccaactctcgcagtatgaagcgatggaagaccgaggcagcttgatgaaggacgcggcgcgagaagagatcgccggattaattaagacggtgaataaagcaacgatgaagaacgtaatcgagctgctacgagaaaaagtcattggagaggctttttctgtttttcaactattggatgaaagaagaagataggtcgcgaatttaaaatatagaaagatggaacattattgtcgtatttacactcccacgtgatttttgttgagaactacaacgtcttcactggctgaatttgatttggtaataatagaggtaaatcaaaacatttccaaaaattatactataaccatattttaatgaattattgttcaaattgtcattacacgcgctatgacgacgctaatcagatgcggtcactttggcagcgtttttgaacatggcaaagcaatgtattcattagtggttaggttataagctccctctttttgcatctttatatagttttgagagttggtaaaaaattatctctataaagtttccaatcattactatatatgtttgattaattttataattttgaaaattaacaataaggtggctgaaatcatcacctcaatgtttccattaaatattcaattacaagaagggctgaagaacttccaattttatttattcatatagattattatggaaaatattttcttaattataaaacattattatttagaatttgccactttaacaattataagtacacacacaattaggagttctactagctttggatgcaatacatttcccaactccattgtaccccgtatagcagcttaggcgacaatcaacaaggtcacatggagttcttggatcaatgattatagtacaatacttatcagtctgatctcccttacccttcttaaccactgaaaatattaaaaagtaaaataccatatgttatgatgtgaaacaatatagtgtatatgtgtacacgcttagatgtgtaatgtaatgtaaagatgaaaactactttttgatgtttggaagtgggaaacatgaaattacctgagaacacaagcatgagtataagaaaatgagaccatgatatgttggccatgatcaaatatatcacaattcacaacaacagaatactaatgttttgtaaattagagatgaaaaatgaaaagctattttctttgctttattgttatgtaatgcttgtgttaatatatatcgaggtatacatgacttttctttattattcacataataaaaacatctaagcagaaataaaagtaaaaagtaagtaaataaatgttgaaaaatgtagtgttgacttgactacattgattactatatgcaccttctcaaagtgttaaaacttaaaactatagcagttaacttaatacatagattttttttttttttcatgtgtatctctatccatttccatacttaaaaaatgtattcaaagttcaaacaaataatactagattaattaatattatcccatgattctcttatcacactgtagctagcaaaactattgtgtttgactgttttctatcctattcatcaccatatttatagattaattaacactaccccctaattttgttagtatgtatgtccttagcttttaggaaaatttcaaattatatatatttatcatgaaaaggttaatttgaattctatgggtatttttaaagatggtaattcatacagaccactgaaaattagaaataaatactcacatgcatacaaaaatcggaaggacgtgaggagaggccattgtgattgatttgtattttgtaatataaattacatgtaaatttttcttaattaactagaatgaggtatttattctcatttggtaaaaatggcttctcgacattgtttttcactctcctaagtcatggttaacaaattactcaaaaaccgattagtccgccaccaaaaatcttgaaccgagaaaccagatctgaatgcgcaaatctcccggtttgatggttaacgaagttagtcaaacaatcattatgaacgttagatataataacacaaaatccaaattaaggctaataatagagtgtgcatgggaattatccgtaaccatgagccttgtagtactcaagattcgagaaaagtttcatcgtataacacgtccttaccgtttccggcaagattgatcgttttaccgtatggcgtaactagcgagtacatcgtaatttttgtcgaactggccgcttttgatatagtttttaacgtagttttcgcattgagacggaaccaccctacaggttccggcattgttggtctcggcggtcaatctccagccctcgcagtaggaagcgacggaagagcgagattcgtcggagctctggagcttgatgaaggatgagacgtgtgaagagatcgtaggattaattatgacagcgaataaaaagtgaggatgaagaaggagatcgagctgctacgagaaaacgtcatccacaacacaaagattatgtgcaagatagaagaaagagattggccctgaatttatagcggttacaatgttgtcttactaactcttcgtgatttcgatgcaattgtatatacgattcgaagtggacaattttttccacacattaaaggttagtgctcgtacataaggtaacgtcttcaattcccagactatacaatttttcccacacattaaaggttagtttttttggaggttcttgctgcaagttgacccttctaacatgatctttgtgttgcggattattactgtatgttaagttgtcggtcattgtgatctatagatccgtccattgtatacaataggttatcattgtaaaatgttaaaatcatccagaaaaattatgaataatgttaatatcaaatattcggacatttgtttttttttaactattcatcatcatcattataagaattaagaaatttaagaaatgatgaggaactctcaaagttttattcatactgattcagaaaattaagtttttaactacagcaacacaattatttaaaacttacctctataagttatgtttaatctgattttatgtttttttaaaaaatattgacaacaatgtaagtgaaatcttcttaattttttcaataattatccaatcacaaaaaggcggaaaaccctccaaattttttattcatatagattatagaaattattaagaatttgtctctttaacaattataagtacacatacaattagcacttctaccaggtttggatgcaatacattttccaactccattgtactccgcatagcagtactgaacacaatcagaagggtcacatggagatcctggatgaatgattatggtacaacgttcatctcctttagccttctcaaccaatgaaaaaactgaaaaagtaaaataccatctgttatgatatgaaactatatatatatatgtgtacacgcttaaatattttatgtaatgtaaaaattaaaaactatttttttatatttgaaagtgaaaaacatgaaattacctgaaaacactagcatgagtacgaagaaagaagaacatgatatcttagccatgatcaatatatatcacaacaaaagagagctactaatgtttgtaaattatatatgatattctttgtttgttttattgttctatatacatatatgagtatacatgatcttttctttattattcacatgataaaaacatctaaacagaaataaaaataaaggaaagtgaatgaatgttgaaaaatgtaagattgactacattgattactatatgcaccttctcgacatgttaaaataatatcaattaacttaattcatagaaataataattatttgttccatgtctttcatgtgtaatatatagatacaccatttccatacttaaaatatgtattaaaagttcaaacaatgattattatattaacattatcccatgattttctatccattttgatactttaaaaagtcaattcaaagttcaaacaaataattatgagattaacattatatatcccacgcgttgattctctatccatttacatacttaaacattgcattaaaaggccaacaaataattattagattaatattatcccatgaactataaactagtaaatatatatctctattcactataaatttttaaaaatatggtagtcatgtataaatgacttttctttattatttacatattaaaaacatctaagcagaaataaaagtaaaaaagaaagtaaatgaatgttgaaaaatttagtgttgactacattgattactatatgcaccttctcagagtgttaaaacttaaaactatagcaattaagttaattcatagattttttgttttccttctccatatatatgcttctttcatacatagatagttaattagctacgttttatctctgtccatttccatacttgaaaagtgtattcaaagttcaaacaaaatccaaaggctaataatagagtgtgcatgggcattacccgtaaccatgagccttgtagtactcaatattcgagagaaaagtttcatcgatatcaaacacccacgcgtccgtaccgtttccggcaagattgatcgttttaccgtatggcgtaactagcgagtacatcgtaatataatctttgtcgaactagcctcatttgatatagtatctaacgtagttttcgcattgagacggaaccaatctccagcccttgcagtaggaaacaacggaaaagcgagattcgactgagctggggagattgatgaagcatgagacgcgtgaagagatagtaggattaatttagatggcgaataaagtgaggatgaagaaggaaatcgagctgctacgagaaaacgtcattttggagaggctttcttaattattgtcatgcgcaagatggaagaacgagattggccctgaatttacaacgttgtcttagaaatatttgatatacgattcgaagttggcaattttttctacacataaaggttagtgcttttacataaggtaaagtgttcaatttccagactatacaatttttcccacacattaaacgttagtttttttggaggttcttgctgcgagttgacccttctaacatgatctttatgttgcggattattattgtatgttaagttgtcggtcattgtgatctatagataatagatccgtctattatataagaaatgtttctttattttattgtgaataatgttaaaatcaaatattctgacatttgttttttgttttaactattcatcatcatcattataagaagtttaagaaataatgaggaaccctcaaagttttattcatactgacacagaaaattaagtttttaactacaacaacacaattattaaaacttacctctataagttatttttaaacataactatatatgtttgactgatttatatttttttaaattgacaacaaagtgactgaaatcttctgaatttttctaataattatccaatcaaagaaggggggaaaacttcaaaaattttattcataaatattaaggaaattatttaaaggttatttccatgacaattgtaagtacacatacaattagtagttctaccagttttggatgcaatacatgttccacctccattgtactcctcaaagcagtactcaacacaatcttgagggacacatggagattctggaagaatgattgtgctacaatgtcttttacccttagtcttttcaaccaatgaaaaaactgaaaaaatagtaaaataccatatgttatgatatgaaactatatatatgtgtacacgcttaaatattttatgtaatgtaaagattaaaaactacttttttatatttggaagtggaaagcatgaaattacctgagaacacaagcatgagtacgagaaaataagaacatgatatcttggccatgatcaatatatcacaacaaaagagagctaatgttttgtaagttagagatgatatttctttgtttatttgttctgtaatgcttgtatatatatatatatattgatcttttctttattattcacatgataaaaacatctaaacagaaataaaaataaaggaaagtgaatgaatgttgaaaaatgtaagattgactacattgatttctatatgcaccttctcaacatgttaaaaataatagcaattaacttaattcatagaaataattattatatttccatgtggtcatgtgtaatacatagatacaaataattattaacgttatcccatggttttctatccattttttatactttaaaaagtgaattcaaagttcaaataaataattatgagattaacattatcccatgcgttgattctctatccataaactctttttttttttttgtcaaacgatctatccatatacatactttaaaagttgtattcaaaggccaacaaataattattccattaacattgtcccatgaactataaattagtaaatatatatcactattcactataaatttaaaaaaacattatcgtcgcaatattatttatttatagagtttatactggatttgtataccaatcatgattatataatcaatttattgctacaaaaacaaaataatgaaaaaaaatgaatggatttattgccaaaaaggtaaatagtttttttttttttttttttacctttactttaaataaaatatatataagcatacaaactaataatatatgatgcttattgttttttatttaaaatgtagaactttgactatatcaattattttggtcaaagtcttcataattttgtatatatgtttcctataaagatttattatagatcatgtaccatttttcacagtctataaaaaggttatttctctctaccattttcaatatcaaaaagtttcttcaaacaaacaagtattagattaacattatcctcttcattttcagcaattcatggctaaactaatatattcgtatctattcatctccatgtttgttctctcaggtacaaatttttatgtcttgtatgtcattaaacatgttattaaactcaaatcgatgcatctagctcattaagcagaatcggatcgttcttcggtctttttaggaaaaactactgaaacatatatataagataaagatgagtgtgacttgacggattagatatagatgactagttatgcgataatcacttggcgtctaaatactataccaattaccaccacatttatttagagttatatgtatatatcattttcaaataatatatgctcgttcgtttaattagtatacttattcatttgttaatattttggtatattttatttgtttttagttcttttggcgttgccaaatgcagaaggagcggatattaaaagatgtgttgtggacgtgaagcttagcaagccatgcacttttcaagaatgcataccactttgttttcaaaggtacaatgggaatggcgtttgtaccggaaagaaaaacgaaatttgcacttgcgcctacaattgttaagctataatatgttgttagctagaccaaaaatctttaatgttatggtgccttagtaatccttgactccatgtatttggaggatatgatcatatgaataaagatcttttaaattttctattttattgccaattaaaaccgggattcatgtgagtgaacgagttcattcttaaaccgatgcaattccaagattttgaaacttaaccgacgacaaagggcttgggcctgatattacttaattcttttgtgtaagaataataaggaattaagacgcgattttctccaatgagattttaataaactgtcatcaacaggcccaaattttaccattggaatttcaaagtattgaaggaataataattgaacaaaaaagaagaaaccaagaaccggatctaaaaaaaacttgactcttacattttatttgataggatcactgaagaaagttaaacaactatcaaagacgtttcatttaaaacgcgtccaaaactaaaacactaatatcttttactcatatcgatcacgaaagtggaaaactttattttaacataatcttattttaaaataatccctctaacaattgtatagacaaccacaattagaacgtccaggaactttaggatcgtcaaagcattttccaactccattgtatccagaaaagcagcttaaacgacaatcgacaagatcacaaaaatttcccttgtcaatcgtcgtatggcatcgcttcccctcatcacattcaaccattaaaagagctacaagagtaaaacatcgtgttattaacacaaaaaaaaatcttatacataatgtaaatcagaaccttaaaaaagtaatgaactttaagaaatggaatatatgaaattacctgagaacacaagcatgagtataaagaaataagaacatgataacttggccatgatcaaaattttaacaaaacaaagtcactgatgttttgtaaaacaagagttgataacgaaaatcgctttgtttcgatgtaatgactgtgtaataatgttaatgtatgtgtgtatatatactggtcgctaggtacggtatgtgtatatttttaatgactgtaaaaaaaaatcagtatccttaataatagtactgattgatgtcgtaagaccatttttaacggtaattactctgtataattgataagtttattcataaatgtgcccgtaatcactccaatccaatccattttctaatcaatttcattttccaaaataaagaaacaaacaggagaaaatctttcgaaaacctatcatgacaacaaaaatatacactcaaaaaaaagccttgatagcggatgttctaacttttactgtcttttgctccaaaccttttctacacatattctgttctaaatctttattattttcaatttacatacttagtgcgtcataattgatgtctttgatttgtaatagctatgactcgaatcatataattatagctaacagatatctcgaattttatattactataatctacgtacgacatcaaaactaatcttccatatatttaattaaaaaagttatataaattgattttaataaataattagactaaaagtatctttggagatcatctatttaatcattttaaattcaagtttgactgttgcaaagtcgctaaaaaaaaaagtctctaaacttttcaaaatatatgaaaatttcatcaactaaacattgacaaagttttctatcgcataaaagttaaaagagagtgaagatgtttttttaaaatattttgtcaacaagacacattgtagatattataaggtaaatatggaactattggaactaaacttgaaataatttgcttaattatttttatttttaatctcatcatgaagaaaaaagattaacaataaagtaattaatataatctctgcaatttattcatatcggattatgaaaatcgaatacttattataccatatcaattataaaatagtagctctaacaattatagcgacaaccacagttatcaggtccaggaacattaggatcatcaaaacattctccaactccattatatccagtatagcagcttaaacggcaatcactaagatgacatggagttgctttgtcaatcgttaaacgacattcctctccctcaactttttcaaccattaaaatagctacaaaaattaagtacagtgttatgatgatatgatacaaaataaaaatcatatatatgtatgtgtatgtgattgcattttcagatctttggaaatggaaaagatgaatgtacctgagaacactagcatgaatacaagaagataagaacatgataacttcgccattgatcagtattggaaaacaaaagttatcagtgtttgtaaaatagagctagaggtgttacaactattttctttgtttaattttttttaatgtgtagtaatgtttatgtgtatatatatatatatatatatcgtagccatggacgaggttcttttgtctttattattattattaaggaaattaggcttttggctattaaataaatttaaaagaaaaactaaaggaaaatcattaactaatttgaataaaattcaatattttggggtttttcctttattggtcaatctaaaaagtatatttttgactattgaaaaaatccttaactagtaggattgacatgaaaaaagtaattcgatataaaaaatatatttaatgatagatctttaagtatctcaaaaataaaactaaaaaacgaaaaccaacaaatcttaatattatactagtgaatatctaataaaaaaactcattaattaatatgattttaaaagtattttttaagaaaaagaagccataattggtactactttctcactcatgcgacagaaaaagttgatcttcttctccttttgctctagttctcctcgtcgttcatctttgaatcgatcatgttctcgagcatatgttcctttctttttttctaataagtttaatatatcgttctttgatgatgggaactggtaatgttaaaatgggctacccggcctttttaggcccaaacccgtttaggtccatgcctattttacaaaaaaattaaagtccgtttcgagtcgcaaccttttaaacttgagcccgctcaaacccgtcaaatttgtaaaatttaggcccgcctaactcttacctgatttgttttgtttttgtggccatatttttgatgtaatcctattttagaattgatacgaaacatttgagaagtagttaagtctttggttttagacaaaaaaagttaagtctttggttctgcaataaaatccacaaacaccaacatacaaccttacgcgtatgtaaaaatgaagactttggttcggcaattcaaatccaaaacagagcctttgatagggaaaaatttaaatcgaaaagagttgttctttctgcaacaaaatcaatgaaaaaactgatacaatcaccattgacgttagttggaaacatatttcgaattttcattaaatcttctgattttgaaatcactagtagggattttcatggcgacggaaaaagtagaatatgagtgcggagatgcaatcagctctcttccagacttattctttctcctaacaaaacaagctgcttcaataacaattctgaccgaaagatggagaactctctattcagtgatgaatcatcgctttgcgtatcaacaccatctcgactttgacccttcatgtttcacgaaactgagcatattaataatctattctaaatctttatcatttttcaagttacatacttaatgcgccgtaattgatataattttatttgaaataggtgtgactcagttcctataattacagctgacacatatctaaaattgttataacaatttaaaattgttaaaatagttataaaaaaatttgtcaacaagacacaatgtagatattataaggtactgagataatttacttcattatttttatcctgaatctcatcgtgaaaaaagaaagattaacaataaagtaattaaagtctctgcaattttcgtaaagaaaatcattcaatcataaggaatgatggggatctgatttttattcatatcgtataaggaaatggaatacttataatatcatatcaaatacataaaatagtagctctaacaattatagatacaaccacagttagaaggtccagcaactttaggatcgtcaaaacattttccaactccattatatccactataacagcttaaacggcaatcgctaagactacacgcagttgctttgtcaatcgtcaaatgacatcgctttccctcagctctttcaaccattaaaaaagctacaaatatatattaaataagatgttatggtcacaaataaaaaaaaaaatgtatatatgtatatatgataacatttttagatctttggaaaaggaaaatatataagaaattacctgagaacacaagaatgagtacaaggaaataagaacatgataacttcgccatgatcaatattacaaaacaaaagttaccagtgtgtaaaatagaggtgtaggtgttaatcagttttctttgtttgattttttttttacaatataacaatgtttatgtgtgtataaaatatatatactggtagacatgcaggggttcttttgtctttattattatatatcaaggaaaataggcttttgacaattggaaaagtcattagctaatttgaataaacttcgaaatttttgagattttctttatttgtccaccgaaagagtaggcttttgactattgaaaaaatcattaactagtaataggattgttgatgtaattaaaaaatataaaaagatgtccctaaatagtcaaattcgatttgttgatcccgccgtgatcttgatataccatggaagggacgggcaagaactttccacatgtataacctaacgatggcaattggttggatgagaaacattgacatccttcacctctcttccaacatggttaaggttttaaatctttacattcccttccctcttgtctatgatcaaaaccatgtccatgaccactagtttgagttgcagccttgcaggttatgtataatagactttattcttattgggaagatggttcgcgggaaagtgtacctcggtttgaaaatcttgttaaaactctctttcgagacaaaatcgaaacgacaactacgttggaaattgcttacaattatgatggataacgctccaaagccacataaaaagtgtgtattcacaactcataaaactggtgggtttgtgttacgtgtagaacaaattcatggattgggctgaccaaaaattaaacatatcaataaaattaaagggttgggctgactcaaaaaacacataaataataagaacaagtgatcatatataatcaatttagaactccaagtaagatccgtaacttttcacaaagaaagtgagtatatttggtataagaataaccccaatgtattaaaaagaatgaagatatgaaataataaaaataatcaacacacatatggagagaatcagaagaaaaagaattaaaaaataaataaatatgatacaaagttgcaaacaacacaaagatcattgttgtctgtacagctttgtcgactttcatatcaaattgatccctcaaaaaaaatgaaaaaccgagatagctagcgacgaagagagctttgtcataagttcatggattggtcttttgtcaagtcaaaatgtacgtatgtatcttcactgatgagataacatattttcacgtgagggagctttggtcgtcgtgacagagctctttacgaagcttacgagagaagagctgacacgcgtcgacacttagatcaacggcggcagagagagcaacgaagagagctgcgtcggccatgcaagtcacatgctgtgctcccacgtggaccacaggcttgctcactttcccttctccttcgacgctcgaacccatcacgaaccctttcaccggcgatgatattgccggagactctccctggcctgagactctcctgtcaatgctgaactttcctccttgttttgtgctcattgtccctgtccatttatatacattattagattcactaatgatttcatggagtttattagcaaatcatgtataagggtatattggacatttgttataccgtatatccaaatatattcctaagttatatgttaatttgtgtttctcatagtactttagatcaccaatgctaattagaacattatacacattaacacaaactaatatattaacctacctcttgaaggtgcttttgtattttaggtagctttaattattcgtattaccataatgaatgatttggtcggttataagacctgctaattttgatttgacccacattatagtactaattaattatctcaacttataatatatgatttaccttctgcaataggaatgccggtgctagtactgttatccctcacgagctcgaacttgtaacccaatccatcaatagctcctctctcacgccaagcctcaagacgtccccacggtttccaactactgacacaagtcccatgaggcctaaggattagccacgcaccagggtttgatctagaaacacgatcagaccctggagatgccacgaaaggagtgatcattgaagctgctgctacaggtgatcccgaaagatcatggatcgttatcatccaacctttacgttctctcgcttgtttcttttcccactggtcacctgataatgttcttgtaatccatcctctactactatatgtaaatcctgatggtagagacctaacacacacaaaaacagaacaattacacactaaaaaatttcaacacctattgcaacattgtaaccaagttctattagaaatttaccgagatcttccgttacgatcggagctgaatttgcagctgaagacaggttgtttgagattatcttgaatctggtaaaccacaggactacattccggttcacctccaaattgaaacacaaaccgaggatccggttcagcacaaaccaatagatgtaatctagccgacggtttatctccatctccaccgagtttcttccatccgttatgaaacgcgacggttctagacaacgccgccgcgagatccaccgctacttcgactttacctagaagtttccctgaagcgacgccgcaagtgtgaccagtacgaccggcgtaaacagagacacggagtgagatcttcttaccggaaattcgtcggatcgcgtcggcgtcgaggtgaaatcccggagctgaagtggaagattccggtggagatgaagcgtcggagaaggaagagagagggagaagtgctttctgtgaagggaaatgtttgatccggagtttgcagtaacacggcgtagaagaaggatgtacttcgccgccgatttgcttgttcgtcgctgtctccggtagtctcaaagctagtgaatctattgttagccgtacaaatggacatggatccatcacaaaaaccttcgagtgtttcttcttcttcttcttcggaatttgaaatttgaactttgagagattcgaattagagagaatttgaagatgaagaaggaatcagttgaatatttgtcatgagaggcagaggtcgttgttcgtcgtcttcttgatggttctcgtttttgtagcaacatgagagtcagtggggcccaggggttctatgacaattaagtttgtttttattttgagattataatttttgattggtggtattgttttattttatttttaatcgcgggaaattcggcggcacaataaaacaattcatcatttttcattatttggtcttttttttaattaaaggttttgtttaatttttctaggtgaagcacaaatgtatcatgattcatgaatcttgcatactttgattataaacaaaactttttttttaatgtattatattatattatttttagacctttcttttgaatttaataagaaaaacctttcttaaaattttagttaatcattgttattgagacaatccagatattacgtgttaaatttgtattaaaaaaaaaatgttaggatactaaaagtctttttttataataattaaatgatattaattacgaaagattatatactaaatgatatgtaaccgcaagaaaaaactccaccttttcacaccttattaattgaaaatattaacaaaaccatacaaaaatggatttggtttatttgggaaaaatgaaattgatgggaaatagattaaatgaaattgatggaagaaacgaaacagagaaagagataagtttgcatggacccaaattccagctgtgttgagttgttcgttggtggcgttacggtaattttgggctaagtattgggccactaattatcatatattagtccgtcaccgtaacgccgtcaggatcgtcggcgggagagaaggaggagcgacgtggcatttcgctggctgtttttttgtcgttttccgtccgatttgttcggcgctctagatcttctgtttgttgacggcgctcgtagactggtagttggtagtggcgtttgactgttatatttataaatggtgaattagtgtataattgtgaattaaataattactcgaatcaattaactctttcgctaatttattttaatgattcacaagacaacactaatcatatttagaaactttcttcatgttcaacaatagatagtcagactagttttcaatctttgagtctctctggtccgaaagaattatagacataggtccaaaactatagtactaggcgcaaaactttttggaaaactaaaataacacaaaggagcacacgttcagcatgaacatgatgttagagagaccgaccatgaaatgtgttggcttactcccaaagcaaaagaaaaactttagattgaaactaattaatgaaaatttgtgtttagatggttaaatatacagactaaccaagaataaactccaatcccgtgtaattgttaaaacaatatgatgtaagtatatagtatcacaataataattgcaattatatataggcatgcaagactcattcataccatatgattgattcttgtacaatacaatagctcactggaaaaccaaaagagaaaacgttttaactgaaatcagtgctaaaacagcaagttcacgtacatatccacatagttgacttttatttttataatagaaaccttttcactttcttttggtttaaggataaacgaacttgtatatgaagcttcttttaatgaggtgaaggaatttattagcggaggaaaaaaaaatcattactacttaatacttatcaaccaaaaaaagagagaacaagtcgatatttgtgtttaactgtaattatatgtcttgtctacgatgttggtcatggtcgaaatgaattgttaccaaacatgaacactatatatctcatatttgacattgcgtaattcatttgacgaccctagagtttatgattactctaggtaatttcaataaacttatggtatttcgatagttaatatattatgttgttcgataatgggtcctcccattaaagaggagacttggttattaaaaattagtgatttggttctttccgtattacggccacatgcatgtaatatgctacgaaatcctttatacattaattgacgacaaaaattataaagaaaaatagacatataagctcgagtaaatttatggtaattcgcatttcatatagaattttacattttattccgctgtttggttagagtaattaggacttatgtaccaatttagaaggtctatatgttacgttccatactaatattgtaggtgataaaatgcacttacctctcttgatgttcataagttataggacaataaaagccttttggtaaagaaaagagagagagatactattattgaatggattattgcaaaactttagtaccctaattgatttaaggaacgtactatttgcttcactgaaaatgattcattgccatccataatattcttttgatatcttctgctctaacttggatatatgttagccaaaaacaataaaaacatctcgatcacgtgcaaagatcttgaaatagatatgtctctctattttttaatgtctatgaaaggacgtaacaagtttctcttctatttcgcatttggtaatacattaatgttttaagaagacatttgcccaagttgctaattttttctttttttcctgatgaatattcaatgcatctatggctttgacaaaaaaagagataaaaaatgaaggaaacaaaataaccaatgcatgtaagtaataatactcttctcgcaaatgaaaacaaaacctcgaacaatcaatttactagctatgcgctagggccaagctactatactaggcactaggtccgatttattcagaatcagttttgatatggatattggtcggattcgttcaacccactgattccaatttggttttgaaaaacaatgttcggccatttgcatccagagttatttaaatcacgaaaaatatagtttgctatttatcatatacatacggaatttgcatgttaacactattgatcaactagatttttctaatgttatattttttttggtggggaagtattgaacttaccttaccactctttttcgattcaaatactaagaatcacatttatcagttgtgagtttagctaaatatgtgggtggttttaaatttgtgagtattaaatttgtcatttctatcacaaaacaatgggagaaaaaaacgaaaaactagtttcccgacattaaacatgcgaattactgaaacatggataggtccaccatttttgccatttgacaagctcggtctcttgttttccttgttcataaatgattttagtttgtttgcttttttaaacgcatctttctatcacttttttcttttggttgcaaatatgtcgttttctctcctccctccttttccgggatttaacttatcacaatgtaatgaaatttgcatgttcctctctcgccattggcaagttccattgcgatgtctctatcgataggtcaaacaatccaaaagaaccaaaaccttttttcttttcttttccactcacatttaatctagggaccctttaatcttattcattttctcaacgataatgtaaaaaagtatagttagtaaactgttaactgtgtagattatacatgttttttaatcaatcatataattagaaggggtatttagccgtccaaaagctgttttcgcgtgactatgcatgaaacccacttacgtagcctccaacgtaacgaccaataaaaagctctaacttaggaacattacaacgaactaatatttaataagttatataaggtcatgaaatgaaatcttataacgtatctaacaactcacatgatctataccatgtcacattttttatcaaacatatgttaaccacctaagcactaacactactctttgatcaaacttatatttcgcatatactccaaaagaaaccaagtggcatattggcatatctcgtaatgtggtgccaaaaatgcttatcaacttaattatagttcagatattgtctccgtatcgtatcttaatatttgtattcaacaataggtattatgttgtattagctaggtgtgatttgtaacgagaagagatatctcgttctattgtgaggtaaaaataaaataaagcagtacaagaacataacggtataaacggtttttactgttaaaaaacttgtaattgtttatgtaccaaccctattgattgtgtttaagaaattatttttaaatcttgagattcttattcaaatataaacattgaagatcgatattgctcaatatcacaataatctttctaagttatgaaaagaacgtctactactatttgtttaaaactacataggacaacatcaaatcagttttgaaattcattgtaaaattcttttaatactaaaattgtttacagttaatgagaaattacaatattatttttagcagattataattagaaaatacattattattattgatcaatttaccttgcagttccacgcaaaaccaacaaaataacaaataacaaagcattgtgtggaatgacgtaaggatgagtcagcagacaaggagtgagatcgaatcgggtcaagattatctggttgggacccgtcacatgcacatggaccctctcccgtacctaatccaggttaaataatcttgattttctgtttaattaccttaaaaacacattattattgaaactaataataaatctcggatctttggttccgaccatacttgcgaaagatcattgctttaatgctaatgtttctctaattttgatattccttgagattagattccctttgcattgtcttttcttgttaatttgttagggttcatattcttacattattttttttggcaaagaaaaaaacatttataaacatatctaattcgagcctgatctattaatgggtcaaataaaagcctctttggcccaattcaataaactggccaactggggatcatcatagagacagactactagagagtagagacgcatcagaaagaagagaaattgatcccacaagtttaaacacgattacaaattaaaacgtgccacgtattcaagacggtgaattaacacgacgtggcaaggtatgattggataacttacgcagctgcctaacaaaaacaagtgatttgagttttcagatgattagaaggaaaaaaaattctggaactttcgagcttctgttttgcggtgctctcaaagcttatatcggatctcgaatcttgaatcggactcagaacctcggatcttcgaaaatcgacgaacatgtcttctcctggcgagtgagttccgttcccctctattgaaactttgcttcgattcgattttgatcgagagattcttagcttggtcttcgtacccaggattttgagtccttaggttaataattttcatgattcgtttagcttgtataggggtttttgaagcattcaactgttgattcttctcaattcgagcgtaattttgcaacaccaagcgagttctgtgaacttgagctaacgctatttttagtatatagttatcaatttgcattgtcatcatttgatattttggtgatttgagatgtaaagaaacatcttttatgccatggaagttagtacaagtcaactggtagttagttcttgaaatatggaatctcatagtgtcttgaagcaaaactgttctcgtttgctgtatcatagttacaaggctactttgattctcctagctacgatagtctaaaatatctctgcgtaggcttgtctcttgtggtaaagttttatgctttagctgatcttgatgacatttcctgattagaaatttatagatggatggaatatgtatgattttgattgtttatctgtcaaattgtttcttagatcgcttgttattgattgcagattctataactcacttccacctataaccaaggcttatggtacgttgtgctttttcactacagtagccacgcagcttggcttagttgctcccgttcacattgctttaattcctgaacttgtacttaagcagttccaggtatatgatttattcttttttatgattttcctttctttctcacaaatctctgtcatcctaagttcctaattcattctgcaatttttgatctatttggtgtttgtagatctggaggctgataacaaacttgtttttcctcggtggtttctctatcaattttggaatacgtcttttgatgatgtgagcatactattttcacatatatagatgaacaaagctaatttcgatttttattatcttaacatactcttttaaatgattgtgcagagcaagatatggagttcaactcgagaaagggccatttgaaaggcggacagcagactttttgtggatgatgatctttggatccttcactctattggtatgtaaagcctcccctgtattctattcttactgatcattgttattggttctttgagaaccccagtactagtatgtggtatgccacaaagtagataatcgctggtacataatatcccaaagctgagaagatcagaagctctcaaagaattgaatcagggttgcattttattaaagcgagacaaaattttggaaggtattcatactagtaaatccgtgtgttaaaacagttaccttgttcaaatttcaggtattatcagtcataccatttttctggacaccgtttcttggtgtttcacttgtgttcatgcttctttatctctggagccgagaatttccaaatgccaacatcagcctatacggtcttgtcactcttaaggtattgaaagtgtttcttttgtaatcaaatccactccttggtatatataatgttaatggtgaaagttggaattactccacaggctttctacctcccatgggcaatgctagcacttgatgttatcttcggttctccgatcatgccagatcttcttggcatcatagctggacatctatactacttcctaacagtccttcatcctcttgctaccggaaaaaactacctgaaaaccccaaaatgggtgtatcctttattcaaattctcgattatttccagatgattgtttctctcgcttctcagtttttgttttgctgttgtaccttgacattctcaacagtaataaaatcgtagcaagatggcgaattggagctccagttgcaagtgttcgacaagcaggtggtgtaggagcagcaggacccggagctggaggaggagtaggaggaggaggagcttattcaagcgctcgtgccccacccgagagttcaaacacagcattcagaggtcgatcatatcgtctcaccgactgaaatagaaatcttctcgagtttctttgttttcatcatatcaaatctttttcaaacaatgccactaactaatcccaggtagctttgtgttttcgaacagtacagtttttgaatatatgactctgtaggaagaatctttgaggttttaatacaatgttcttttcaaaatgtggttcatgtttctatgtttttgtttttgtctagcaatcatctccttactaaattgaattcgataaactatagccactatgaatataatcaaatgaaatttgtgacataagaatttggacgtaacgagtttgaatatctatctagataagttattaaattcgtgaccaaagagtttggtcgtaacaagtttgaattttttaggacataatattattattggctaacaagattacgactaacgagtaaataatcattccttcggtccttcctctaaaatgccgttggtgatcgtttataaataggggaaataggaaaagggaagaaagtagacgtggcaaatagcgaaacaatgattgagctataacaaaggcgaaacttgagcggcactaattgaaaatcactccttgtttttttgaagaaaaagtaagatgtagggctgagaattcgtctatgtgatccaacggttttaaaatgatccttgttccttcctctcctatttatctgaaggacgaagtccccacgctgcacataaccggggcacttaacgtatagatcataaacaaagaagaagaaaaaaaataagaaaagaagaagaagatgtcgtggcaaacttacgttgatgagcatttgatgtgtgatgttggcgatggtcaaggacaccaccttactgctgccgctatcgttggtcatgacggtagcgtttgggctcagagcgccaacttccctcaggtatttgatttcattgcgtctgatctcaatgtgatttagatcctgatagtgttgctatccgatatgatatgtgtttttacaatgtgatttagatcatgcatcatgttttgattagattctatcaatgtttgtcatgggatatatatatagtgtattttgtgtgtgtgtgtttctttttatatgttttgcatagatttgaaaacaaatgatgcatgttgtctcatggtaatcgactaatcgtgatttggtctttcatatagttcaagggacaggagttcagtgatattatgaaagatttcgacgaaccgggtcacttggcacccacgggattattcatggcaggagcaaagtacatggtgatccaaggtgagcccggggctgtaatccgtggcaagaaggtaacctaatcagtagcttcatgatcagatatgcaaataccatgttgaagagggttctaattcaatatatgcttctttcaattagggagcaggaggcataacgataaagaaaacaggacagtcatgtgtgtttgggatctatgaagagccagtgacaccaggacagtgcaacatggtcgtcgagaggttgggtgattacctcctcgaacagggtctctagaatcttcttacaatgttccaccacctacatttttttataaggccattgtttctcctatttttttcctttgggtgatttgcatctctttctctaattgatattataagttttgggctaatggaccttcctggtttctccccatagcaaacttttaagaaagctgaagcctaaaaggcttttactctctttgccttggtttcttatttatatgcatgttttagttgttttctctttgcttttttgtcaattgcattctgtctactacactaaatattaacgtattgattgagaaaattgcattatcataatctatagaaaattgtatgtagtgtagtagagacattaatctcacaatactaaaaacactttcaaaatttacacgagcatttaacacatacatcaacactcattatttacaacagaagaaaaaactgatacgcaacgcaatctttcctagtgatttcattcgtaagaaagaaaaaatgaacatgagaaagaaaaatggcaacaggcagaattcattcatcaactttaatctttaataggaaagtaataatagtacaattatgtcggaaaatcattcccatcccatctgtctttattatgtgctaatctaacagctcatcgagaaatcgaatctcagtcttttttccctattattacattatcacttagatataaggaaatttttgttatctcacaatattcactttgaatcaatacgatgcacatataacaaattaacaatagcaagtgattgtttctcttcaataactcaaaaacattttttttttttttggaatagaaaaaggtttattaaccatctttctaaattttgggtaattaagaaacatttattgacaatgacattaggaaaagagaacattaattgtaaagggtggacctaaataattggaatattttggtgtatggcacacaatgcaagagcatatccaccctgtaaacaaattatggccatacttcgatctcttttctttgattttggaaattaaattctctagtattgttttttttagaaaagaaaaaaaaacttttgtattgtttatttatgtaaacttcatttgttccaataaaatctaaaacgttttcacatttggtttgacaattttatttacacaaattttcaatatacttttagcgttagatcaaattataccatgcaagaattatatgcattttctatatgatcttgtttaaaaataaaaactgtagaaataatgtaaaacccgagaaatgaaattgttaatagattaaaaaaatcatttcttttaaccggatgcaaattttaatcattttaaaaatattttcttttgattatcattttaaaattatttatcgactttcacacaaaacattttgaatttcatttgtatctactttttttttttttttggtatttcttttagctgtctttatcaaattcagtaaataaataaaatatgtattttaatggaattttttgcagtagaaattaaaaaagagtttttttttattggaaggctaaatcgtgttattaataatttaagctcaaaggttgtccaagtctacaaaccaaaagcacgctacagaagaagaggaagaagaagaagaagcagagacaacaagaagaagaagaaacagtctcatctcgccggagaagaagaaagatgtcgtggcaatcatacgtcgatgaccatctcatgtgcgaggtcgaaggcaaccacctcacacacgccgccatcttcggccaagacggcagtgtctgggctcagagctcagctttccctcaggtttttcttccttcttcttcgcgtttcttccgatcctctgtctcaaataagttcatcgatctgattcaatcgtctgatttaggtttattccttgtgatccgatctgaggaaacttggatctggttttgatttgctagcttctgacttgttctctctgacaatctgattttctcagtgattgattggagtttgattctgagattttcatggtttcagtagtcaaatcttgtctataggtgttttgcttggcacagaatcttatctcctttcaattcatcaaatgataaaacttttcaccaaattcttcaaaatttggtattttacttgaatttgagatcttagggtcattgcatatgaattgtcacctctgctcagtattgtataaaccatgtaaaggatctgttgtattggtagtagtatcattgctcagtcggttgaagctaattgcctactttgttgttcttgttcatgtatttagttgaagcctgcagagatagcaggaatcaacaaagactttgaagaagccggacatcttgccccaaccgggctattccttggcggtgagaagtacatggttgtccaaggtgaggctggagccgtcatccgagggaaaaaggtaacatttttcattcgagaagactctttttttgtggttttgattgagataatgaatcaaaggatcagtcttttagatcagcaagttaaagtccatgcttacttcttgcagggacctggtggagtcactatcaagaagactactcaagctctagtctttggtatctatgatgaaccgatgaccggagggcaatgcaacttggtcgtggagaggctcggcgattaccttatcgagtctggtctctaagttcactcaaagtgcttcaaacaaatttcatttttcgggttctttcttcactagagaagcacccttctgccatgtattgtgatttgattgttgttgtgcatcaaacaaagttattatactcttaaaaagaacaaagaaacaatcatatttgttatggttttgatcctctcctatgatggctcttatgtttttctcttgtactgtatttcgtaatgtataattacgctttggaataaaaatttgagtttgtgatcatttgttctcgatcagctcataaaaattttctaggttcagtcacaaatacatcaccaagcttgacatttcggttacgtggtgaaagaaattaccaagttcaacagttgggctaaattctagtttaagttcgctcactactcaaaacttcatacaaaagaaggcgacagtgcattcatgtacacacttgtcaccaaatactcgaacaaactacaaaacacggcaacaaaacagagactgcaaccaccatttgtctgaatgcttcattggttgacgaaggcgaagccaagggggaatcaatggcagttatgtttccagtgatattacccgccattgttctgttgaatctgcaaaagtaacaacaacaacatcagcaagtaagattcgtttttccagttcgatagattcaagattgagtaatcagagagagaagtcacccgtcggtagccggagcaatcatgtacaaacagttaccataacctgcaatttcgagagctcaaatgagactactatggcttcacattactcttaatggatgtgttttggaaagtgtatgtatacaaatacttacttggatccttgtcaacttcaacgctggctccattaaagctgcaatctatgctgcttgctccgctctgttggtaataagtgttgaatgcataagatgcgtgtgagagaacagtatctggttcaaagcaaggttggtctggttgaacagctgaacaatcaacatttccaggaccacaagcccagtccaatgcagtctgcagttccgttaccgaagcttgtgaagaagcaatacaccatttcttggttcctcctcctcctcctcctccgatggttactgtcgagttaccgttgataattggacttgaacttggacttggactggtacctgtggttgaatttgttggagaaacaggcgtagtgttttccccagtgaagtctaaagcgtaaacattagttccgttcgcgtagaacattccccagtttctctcggattctatcccaggcttccggttctcattgaacaacgagaataagtacacatctatctcttctccaggctttgcaggagtacctaaccaatagaaaacaaatcagttcataaaatgcttccatctatctttgtatctaatgatcataaaaagattacctggatcaccaatgacatggcggatgaggttggtattgtaagccagagcgttctcaggagttgcagctgtctctttaggcgagcctttactcggccacccggactcagtgaccataaccttaacggtcttaaagctcatagcagtcaaagcgaaatagatagcgtcaagctgagcatcaaacatgttggagtaaagcaaacccgtggcaggatcaacaacctgcgaagatgactcgaatagagcatactccaacggaactttttcagtggaatctctgtaagcataatacggatacaggtctatcataaagggagactcattctcaaccaagaactcaagcattggtttcaagaacgctgaatgcttcttgctgaaagaagctgacgaaggcgggaaggagcgtgacaagatagcaagggaatgtgagctcgagatcttgatctttttatccaaaccagacttcttaagagctgtgtgaatgtttcgcatcgcaggtaagactagaccagtggcattgtctggtgcttcagttacttcaagaccaactgaaatcgaagtgattttggtagatggataataaggaaggatgttgttgctaagccaagtatctacattggattgaaactgagcaaatgcaagtagatcagcgttagggacaccaatcataagctcgattccagtgtttgcaaaagctttaagaacatcaatgttggcgtcatagattcgaacaaatttgatgttgagatgttggattagctcagagactctgttaggacttggaagattatcagcatttcttccataacatatcccaatcttgctagccataccaaaatctgcaacaaatccacaaaacaagtctcaaaaatggctgcttttgaatctcaaatgtcgattccaaacacctaaaagtagttcaaagctaacagattcgagattttcagacaagaactactacagtgaaacagagattaacccaggacaaaaagtaaagcatcgaactttaacatcaagaagacaaatttaagagatagtgaaacatagaagagagaatcaaaggtaaatgcagacccaaaagaggatttgagtgtaaagacatactcaaaaaggcaagaatggagacaaaaatccagaagactagattcagtctttgacccatttttctttcctctgtctttctcaagctttaaacttcactcaagtgtttattctacacccttgaacccagaaatgaaacgtctcactctcaagaacacttaagtaggaagcaccgactttttaagtgacgcaagagagatttagagatagagagaagtcactggaggtgaacgttgtgtgctttctatatcagagttcggattccagctgaaaatataaaattgagtttgtagaaacgtctcgattccgtgaattaagcgagcatgtttgctctctctctttgactgttgtagtagattttactgcttcgagaacaaaaaaaaaaaaaaaaaaaaacttttttagatttataataataaaaaataatattaaaaagataaatgggttcgagtgcaaagagtactacagtacagacagaccacagtggtctgctttttttttttttttttttttttaacggtccaatctccactcaatgcaatttttgtatttaccaaagtaattgcaatttcttacatttgattttttaccatttgaaaatgtaaatccagtatgttgttttggaattttagagtgcacaagcataagttgtttttgggtctggctactagttttatcagattttaagcagtgtcataagtagttgatgagaacatgtggaacattataaaggcttacttaaaatcaagatgatctattgcttggaacaatgataataagagtttgagcctaataagggtataattcaaacgatgtatctaatatggatttgatcatggcaatgaaggtactgtatacaaaattttattaaagatgataatgtcgtaccaagttaatttcttgatttgagtgggcgtgggccaattgggtttcttctcctatttttctttgggcattaacccattaactacagtgaatctttttttgaaaaacaacggtgaatttcttctcgattctcttaacattttgacttcaaaaatttagaaagaatatttctattttacttttttttattcaaaaagaatatttctccccaaatctacactacacgatctcaaaattctaagaatatttctgcttagaattgcctgagcaccaatctccccaatggttatgtggaaccccaaagccagagcgggaacaacaattttttatgccgagatttccttagaaacaagatgcaatggaagtgaggtttagggtaaggctgagtggtggtctgatgctatggttacacaatacgagtcatatcaattccagcattgtataagtctttcggtttgatgactctctcttatttagtctcttggagattgaatgtcccttttttttttttaatattttgaaatagaaattttacgaagatatcatacaaaaatatgattgagttaaattatcaacaatagttaattagaacgataaaacactagaagtaaattttgaccatgcttttatctggaaagcattgtttcaatgaaattcaaaggtttgtgtagcttttttatctttggttcaatctccactggtcacagttttattgtaaggttttgatatatatagtcttgcttttgtattaatcaaatttaatattaaaaataaaggcagctagaattgagctattagtaaacctcttgtgatcaaaagaaagaagatttgaaagagaaaaccgtccgcaagttagatccacgcgcgactctagcgcgtggaatatagctattagtttgcctatctattgtacatatcttgagaaataaaatttagattatagtaagatatctcttttccaatggaaacttgataaattttccctttgatttttcttttgactacattactatctttctttacatcagggagaaggatttctatatatttgaaccccatttcatgatttttgtctccatcaccaccaaagatgatccccaaagaagaagttgagcggccgcagaaaaaaacgaagcttccgtcgttaccatgtgagacgtcgttgttcttgcaacttcccgacgagatcctggtgaactgcttggcacgtctctctaaatcgtcttaccgttcactctccctcgtctgcaaaacctttcgttctctcctccactctcaacccctctactccgcgcgatatcaactcggaaccacggagatctgctgcctttatctctgtctacggtttgttaccgctacggaaccagtctcacgctggtttactctcagtaggagaagtggaagtgttttggttccttctgatcattctctcccatattcaaattcaaccgtaacgatgggttcgaaaatatatggtgaacatatgggtgacgcttttggtccgtcttcagctatatggatatatgactgttttactcgctcgtggggcgatgtccccaacatgaagatgaagagggaaaacgcctccgcatgtgttttggatgacaagatttatgtaatgggaggatgtgactctgggggcatcaattggttcgaaatgttcgatgtaaagactcagtgttggagacctctaccggcgaatcctgacgttaaggtgatgacggaagataatgttcgaaaaatcgatgtggtgggaggaaagatttacgtaaagactggggctgagtttatggattggatttatgatgtgaagcgaggtaagtggagtgctgcagatgagtatatgagtttactatggtcgaactcttggtgcgtgatagagaatgtgatgtattgttactcttgctctagatataggtggtatgatttagaggctagaatgtggagagaagtgaaaggtttgaaatatttgaaaagatacagtagtgctagtaatgataatcgtaatcgtatggttgaattagttaactttggtgggaaacttgctattctttgggataggttcgagcggcctggtcgtagtgagaacaagaatatttggtgtgcgatggttgcgctcaacagagactttgaaggtgaaatttgggggacggttgagtggcttaatgttgttcttacagtccccaagtcatataatttcttgcgtcctatagccgtttcggtttgatgatctcttagtcaccttgtagagtcatccttttgcttttaccaaacttaaatgctttgtcttgtgtttgttgtgagtctttttttcttttttctttctacaatttgttgtgagtctgtaaaatcctaaatgaattcatctgatttctagactttgtattgtttcaatttgcattctgcattatgaccatctcctatcgttttgttggtttaattctggttacagtaaacactaagtccttgtgaggcaaatctctttgttctttctaggtcttcatctaaataatgccagtagaagaatttgagtaccttttgatttcactttaaagtgaagtgagattctcctaaacttaatatattattttatatatgccttggtgagatttacattcaagattagatggtttaacatttcagtgttccactttaatatgcttttcctctcttcctctgtttctaagaagaaagagtcatctcgtattcggtcaagttcaaaaccctttagtggctacaaacatttgctatattgtacgtatggttaagacttaagataaaatggataatggtttgtgttgtttcgatatgtagagaatagttgttacttgtcaccggctcataaaatatttagttttccggccgactaatcccggactttccagtagactcttgatttaggtttagctaatcatattttttcatctttttgtggagagtggaaatgtgcagagcaaattcgtcagttatacacttttgtcattatgaaattcgccaaaatggtataacacaagtgagacaaattgagtaatttcgtaagcttttacgttttatgtgttctgtttaatagatcatatacgattattatatatatcactagttcgttagatatctttttttttttttttaatcaaatttttgaaagtagtttgggattcaccgttcaagaataattgaaactttggaaaattaaagatttactagattttcacccgcggtataccgcgaggacaaattatattttaaagttagtatatataaaagtttgtaatttgtaacaatctatgtaactatctataaatatttttattttatagtttagaattgttattaagtaacgtcctgtcaaacccgtcccgccaacccgtcccgtaaaaaaaactcatttattttattaatgttgatcttatttatcatatgtttatgaatcattatctaaatattttgtaattttgtagtaattaaatgctatcaaatatttctgcggtttgatgattataattgaattgtaatagtcatgtagaaaaacaataataatgataattttgtagtaattaaatgatattaaatattttgaaagttttattttaataaccaatcgtgtagttaatgtagagagattttaggaagattgttaaatgtcaaatatttaattcgaagattttttttctaattatcaaaaacaaatattaaaatccagtgacaaccattgtaaataagtcccaactacaagatttatttcacaaaatggctgcaaaaatgtatatatagacatttgtaaagaatgtgcataattacagttataaccttaaacgatgcacatcctttataaaatttacttaactttgttttattatatagttctaaattactaaataagatttcatttggaaataacttacaattttctagtaaagttcccaatttaaaaaaaataaatagaaaaagtgaaaaagaagattttttttgtttgtggaaaaaaagttcagattttttttgaaataaatacaaaagtcgtaaatctaacaaattaatatttttatacatgttaggaataataatttttgtaatgtaatgttaaactaaactaattaagaaatttgtttagaaacgtgtcgaattggggttaaactcatccaaactataaaacaattccgaggaagtccaaaacacgtatctttttcctccgtcgccggagacgattctctttatcaccggaataatcagattccatgttcgaattcagctgagtattataagttataaccccaatcgaaggacaaagaattttaatttttaaaaagtcttcgatgggaaacaaaatcgctcgtacgacacaagtctcggcgacggagtactatctccacgacttgccgtcttcatacaatctggtcttaaaagaggttttaggtcgaggaagattcctaaagtcgattcaatgtaagcacgatgaaggattggttgttgttaaggtttacttcaagcgtggtgactcgatcgatctcagagagtatgagcgtcgtctcgttaagatcaaagatgtgtttttgtctctagaacatcctcacgtttggccttttcaggttttaattcgatttctctgtatttggattgtggtttagtgattcatcgtttggataaaggaatgattttgcagcttctggtgctagattagtgtcgttgaaactctctggttctgttcatgtttgtagttttggcaagagactgataaagcagcgtatctagtgaggcaatacttttacagtaatctacatgatcgcttgagtacgaggcctttcctcagtcttgtagagaagaagtggttggcgtttcaggttttttttttcttggtcttgtaaccattctatttgaggcacaattttttttttttttgactgtgtttgttctgcagttgcttcttgctgtgaagcaatgtcatgagaaggatatatgtcatggtaagctttaatagtctgagagggatgatcatcgtgatggtgcattaagttgattcgtttgaatttgcatccttttaggtgatatcaagtgcgagaacgtattgttgacttcctggaactggctttaccttgctgattttgcatccttcaaacctacatacattccttatgatgatccttcagacttctcgttcttctttgacacaaggggacaaagactttgttatctggctccagaggtactatagaaccattatcagaatttatttcttttgtttgatcgtcctagatctgtcaaattgttctattgcacttctgcagaggatattatccctttgtttgtggtgcaccaaatagaactctatccgtatcacttacaaagatgtggtggcaaagaaccatcaacaacaaagcacccttgctaattggtcatgtgtctgtttagtttttagtttattcaagtttaaacagtttgttgcttaattacagagattctatgagcatggaggtgagacacaagtagcacaagatgctccattaaagccctccatggatatatttgctgtggggtgagctcatataccatctctttttgtatcactctatatgttcaatgctcctaatggttcaagcacacataccttttcaaaatggaaaaacattttcaccttaagtattagagtttttatcatattgtaatagttttatcttaatgcttcaggtgtgtgatagccgaactttttcttgagggtcagccactatttgaactggcgcagcttctcgcttatcgtagagggcaacatgatcctagccaacaccttgaaaaggtatttcctattacgatcttttcgcatcgattctcttgatgttcatataacattcttttcaccttccatctgagtggtacatgggacttgtggcttctgtggttctgagttggatttttttttttggctgactcttctacctttatttctactcatctttgctgttcttttaactttttgttggattcagattcctgatccgggaattcgcaagatgattcttcatatgattcagttagaacccgaagcacgcctatctgctgaagactacctgcaaaattatgtgggagttgttttcccaaactacttctcaccatttctgcacactttatattgttgttggaatccacttccttcagacatgagggtaaccatcacattttctgtaaactctctacattccgcatcaacttgtttgatatagttttgcttcatttcgtttaggtagcaacttgccaggggatatttcaagaaatacttaaaaagatgatggaaaataagtcaggtgatgagatcggcgttgattctcctgtaacttcaaatccaatgaacgcaagcacagtacaggaaacttttgcaaatcacaaattgaactcatctaaggatttgataaggaatactgtgaactctaaggatgagatcttttactctatttctgatgcactcaagaaaaatcgccatcctttcttgaaaaagataacaatggacgatttgggtacactgatgtctctctatgatagccgttctgacacttatggcacgccttttctaccggtagagggtaacatgagatgtgagggaatggttctgattgcatctatgctctgttcttgtatccgcaatatcaagttgcctcatttgaggagggaagctatacttctattgagatcttgctctttgtatattgatgatgatgatcgcttacagcgtgtacttccatacgtcgttgccttgctttctgatccaacagcaatcgtgcggtgcgctgccatggaaactttgtgtgacattctgccgcttgtccgagattttcctcctagtgatgcaaagattttcccagagtacatatttccgatgctctccatgcttcctgaagatacggaagagagtgtgaggatatgctatgccagcaatattgcaaaactcgctcttactgcttatggattcttgatacattctttccagttgagcgatgtaggggttcttaatgaattgaattcccagcagatctccactacacctgctagtgagacccctagtcatttgcaaaaggcaaatggcaatgcgcagcttcaacagcttagaaaaactatagctgaagttgttcaagagcttgttatgggtccaaaacaaactccaaatgttagaagagcactccttcaggacataggggagctctgctttttctttggtcagaggcagagtaatgactttctactaccgatcctccctgcctttctaaacgacagagatgagcagctaagatctgtattctttgagaagattgtttatgtatgcttttttgttggccagagaagtgtggaggagtatctattgccttatatcgatcaagctttgagtgatcagacggaggctgttattgtcaatgcattggagtgcttatccacattatgcaagagtagtttcttgcggaagagagctctcctccaaatgatagagtgtgtttatcctttgttgtgctatccatctcaatgggtaaggagggcagttgtcactttcattgccgcaagtagtgaatgcttaggtgcagtcgactcttatgcttttattgccccagtaatacgctcttatcttagtagactgcctgcgtcaattgcttctgaggaaggtctactttcatgtttgaagccccctgtcacaagggaggtagtttatcgtatctttgaaaaaaccaggaacccagaattcatggcgaaacagcgaaagatgtggtatagttcttcacctcagtccaaagattgggaatctgttgatttgtttgacaaagatgctggggagttgaattcagtagaatgcagggccgaacagaagcaaagtgtggaaggaaaaaaacagattaagagtgcatcaaagcaaccagaagttcaaggaaagtatgcagaaaaggatgctaaattaagaatcccgagaaacccaagacctaatgcttctaacactgttgagctacgtgatcccgtgtatccagagaagttacagttctctgggtttatggcaccatatgtatctggtgcgaatagctttattgaaccagagaacatacctctctattcgtttagcatggacaaacgagcagctacaaatcctcctgtggcttctgagtcttcattgcagatgaactctctgggaatgggttcattgtctgtgccatggatggattccatgagtaaatcatttaacttggctagttcggtcccagtgcctaagctgatttctgggtcattccatgtcggtaccaatcctaaacaattttacagagtggtacatgagccagaaagcagagaaaatgatcaaatctcctcagccatcagtaaatttcaagacctcggagtatcaagctcctcaaaaagtgcttctgtaacttcagaagatgcttcttctccagcggatcttgtaggagagccatctctgtcaaggacatcggttccggattcagggtggaagcctcgtggagtattagttgctcatctacaagagcatcgctctgcggtcaatgacattgccacttcaagcgatcatagcttttttgttagtgcatcagatgattccacagtgaaggtgtgggactctagaaaactggaaaaggacatctcttttaggtcaaggctaacatatcatctcgagggaagcagagggatgtgcacaacaatgcttcggaattcaacgcaagttgtagttggagcctctgatggtgtgatacatatgttttcaattgaccatatctccagaggcttggggaacgtagtggagaagtattcaggcattgttgatattaaaaagaaagatgttaaagaaggcgctctagtttctctcttgaattatactgctgatagcctttctggtccgatggtaatgtatagtacccaaaactgcggaatccacctttgggatacaaggtcagatttagatgcatggacactgaaagcaaatcctgaagaaggatatgtgtcttcattggttacaagtccttgtgggaattggtttgtctctgggtcttcaaggggagtgcttactctttgggatttgagatttcgtgttcctgtaaattcgtggcaataccccatcatatgtcccatagagaagatgtgcctctgctttcttcctccaagcgtctcagtgtccaccactatgaaacctttaatttatgttgctgccggttgcaacgaagtttcactctggaatgcagagggaggtagctgtcaccaggtaatgttgttctaccattctaatgcaccttgacttcggatattgaaccttctcgagttatgacttatggtttttctgttagggttacaagtttgaatatggatgttagtttaatagtgatgggaggctcactgtgaattagtccatgaaaaaaaactgttttgatagattagaccattcttggatactgattaggacttgtaattgagctgattctgttgggattctgtaggtattgagagtagccaattatgaaaatgagacggatgtttccgagtttcaatggaagttaccaagcaataaggtaaatccgaagccgaatcatcgtcagaacatgagctccaagtacagaatcgaagagttgaacgagcctcctcctcgtcttcctggtatccgctctttgctccctttacctggaggtgacttgttaacaggtggtactgacttgaagattcggcgttgggattactccaggtcctaaatctaaattatttaacttgtgtttgacaatcaaacgtttcgtcacacctcttgacgcaattcatgttttttgtgttttgggactaccacagccctgagagaagttattgtatatgcggtccgagtttgaaaggagtcggaaatgatgatttctatgaactaaaaaccaacacgggcgtgcaatttgttcaggtctgttgatcaaatatatctctgatcttcgcataacgatatcttgcagtcgtgtaagcttataatgatatttatgatgaaattgtgtttgtattttccgcaggagacaaagagacggcctctggctactaaactgacggcaaaggcggtacttgcggctgctgcgacagacacagcgggttgtcatcgtgactcagttcagtctctggcatctgtgaagctgaaccagagactgttgatatcaagcagcagagatggagccataaaggtctggaagtaaagaaaccctgacggtctttcgtgtacagtgttatagtgtttattttattttaccttgtcattgtaccatcaaatgctaaaagaaattttttagccttgtatcctttttactcgataaacttccttgtacagatttttccattgtagtaaaaacctttgattctgatcgttcaaaagcatatacttataaaaaggtatcatcatattacatcatttttgtatctatgtaaacacattgcagtacaattctaagtttctaactctgaaatgtcaatccgttgaggaacatgtacttggctcgagagtaaacagtgattgtagaatgctatcaaggttgcaaataacatatgtcgaaaaaagtatggtcaaaagtcaattcgatggagaaatgaacaagagaattacatcgtctatagaaaaaccaaataagcaaatatcgataacaaagcggatattgcagaattcatactaacgagaaagtaaaacttcaagcttcatgaagtgtgatcatcatcatcatctacttctcagaagagttgggtcctctcttcttgccaaatccaacaactgaaaaataacaaataaagagggaaatatacttgagaaccagtctactatgtagataagcaaagagactaatagcaaaattgaaggaataatcaaattctgagatctctcaagaagaaagaatctaaacaaaacaatcataacaaatgaatgaagtagacagattcagcaaaagtttcacaaaatcataacaagaattgatactctaacaaaggcacgatacaaaacttagcatttcttctacagtatgagctgatatctgaagttactaaaacttggctactttcattcaaagcctaagaacactagctcaactaaacaactcaaatcagagatcttaactaaatctcaagttaacaaatgaaacggaatatattaccggcggttacgaaacggcgattgtgttgcaaccttttgtgagcacggccacgtggcttcttcttcttatcctgctttgccactttcggtgtctgacctctcaccttaccggcacgagccaaggaaccgtgtaccttacctgatgattccaaagcaaatcaaagacaataaaaagcattaacgacagcaacaaagaatgagattggtaaattctaaaattgaatacggattcatatggaatcaaacgttaaagaggaattacccatgattgtttacgaggattcttctgacgacggaatcggcgctctctccggttatagtgtacggcaacgcttttaactcttctcagagattagggttttctatgactgatatttaagtgatgaagacgatctgtactgatacggcccattagtggtttcttaatgggcctatattgttatcatttggaagcctgtgcaacgaaatttagattcctagttagttgggttgatatcggtccgattgtgacagtaacagatggtttagatcaaatctcactagttatttttgttagccacgtcagcttaatattcgtgtacgcgcaagctcaccgttagctatgataaaccccttcactatcatctcttacaaaaacccattagcttcttcagtcttctctaaaatacttgcaagcaacagagtcagaggttaagtaagaagaagaaaaaataatgctaaggtttcaatgttttcttcaccttcttcagccttctatggcgaagaacaacagcaaccactcgaatatttgtttacacaatttggcgccgtttcgggtcaccgacacgattcctgtacagaagatccaggagttacgtgcgaatcggtcgagggagagtggaaagttgcgagtaaatggaataggtagagaaatggaagaaggtgtggaagaattcgaagaagtagatgatggagatgatgatgaggtagaagatgagttctcggcgaagaagagaggcgtttacagagcgaagaaagagaagattgattacgataaagaccctgagtttgcggatattcttggagattgtttagataacccagataaagctcaaaagaaggtgaagttttaaactttgatctttggatcttaccatttcgatcgagaagctgttgttgagctgatgtattgacaaagtaacgtttattgagctgaaatttttgagtagcttttgattttgattgttattttgaaatgggttgtttatcaatgaactctttttagatggaagagagattgaggaagaagaggaacaaaattcttcatactaagactggttctgcaacttcgatgccagtgacgtttaacaagtgagtgatcctatgttgcttttgaagttatatgtgattctcttggttgattttgcttgctcatttgatctgcttgttcagtagttgttgatgttcagtgccttgttcttctcattgtttattaaactcttggttttgttgttctgtaagatttgagtattcgaattcatacatgtggttggagttttacaacacaccgctggacaaagacatagccttgatctctgatgtgagtcctcaaactgaatctttgcattcctatactaatctgaggagatagggaaaatcttaacaaatcactcactgttttgttttgatggctaaaatcttgcagacaatccggtcctggcatatccttggacgacttggtggatacaactccatgaatatgcaagtatgtctatgattgagaaagtgaaagcatttatctattcggtttccttttgttttctcgcattataagcattaagctgtttttttatcttttgctcgtatggtgcagttatcacaagcaccactggataagaggccaaactatgatgccatacttggagctaatgtcgagcccaccacgttttataacatcggggatcttgaggttcaagacaatgtcgctcgaatatggtgataactctcactacaccctaaaaacattttttgcaagtcttgttgttactcatcacataaatgatggttttgacaggctcgatattgggacctcggagccgttgattctcgatgttctgataaacgcattgacacaaatcagctcagagtgagttcaattctctccttctctctgtatgtttattaactgaattaagcttttgagatggacatgtttgaaatgtgtgtaagctctaacgtggtatttgttttggttgtttctagttatgtcgggataaagaaagttgtgtttggtggatctgagttcgagagctggaaggagaatatgacatccgaggaatctggtttcagagtccacaagatttaacatcttatacacacacccattagattacagctgtttcagaggccacaagagttcacatatgtgtttatttagatttgcactgtgatatattatggaaaattagaatcacatcttcatgttcaattacatctttgtagcactagcgcaattacaagtattgagaaatcagagcagagtgatattatgggaaattagaatcatattttctcgttcagttaatctttgtagcacttgcgcaatgacaagtattgagaagtgagagcaggcagccaagaatagatcttttttgataaaagccaatgatggtagttttaatatcatttagtgaaaaaaggatggtggtacaatccttgagctgttcaggaaaaatcttaacctacaagctgctgtcagaaactcttaatggctcacaacaagctttttagaaaaagtaaacaagatattcagtagtggattcttcaagcctgtctgtttctcctcttgggacccgacttggctactctaagacctttgctgatagcgctaagcctagcaagtgctgctttcttcaaatcaggcctgtagtagttgtccactacctgaaaagttgaagacaatcaatcggttagtacttttactgatagaaaacaaaacagatgcaatatgaaatggtgcacagaagaaagatttatctcagaagccaagcgtaacaaatatatttcatagaagaaatacaccacaaaggagtacctcttcttacgtgttagctttctcatcactgataggtacgaattgcagactaaataaaagtaatctcaaattctaggtatgctacaataattcatattactattaactcagaagccaagcgtaacaaatgtatttcattgaagaaatacaccacaaaggagtacttcttcttacgtgttagctttctcatcacagctaaaattagacagaaaaatagacgaaatcattaaattgaaacaaatagctaaggatttagctcagaagccaagcgtaacaaatgtatttcattgaagaaacaccccacaaaggagtaccccttcttacgtgttagctttctcatcacagctcaaaaggaccaaaaactattatcaaacctattgttccatttcattagaatttttttatgttagcttactcattactgataaaatttgtcacaaatagaaacagaaaactgtcccaaagcaatggtaaaagtttatagctcagaagccaagcgtaacaaatgtatttcattgaagaaataccccacaaaggaatacctcttcttacgtgttagctttctcatcacagctcataaaattaaactattctcaatcctaagtctcaaattcactaaagcacttatccgtaagattttccaaataacccaacatgtataaccgcagataaagcaaacaaacattgatcttaagaagatgagtagtacctgattggcaacaactttactcatcctcgagaactccttcttgaggatagacttgttaacagagagcttaggcttgttttgtctcttagtcttggtggttccgagtacaacaccttggtccttgccagccgcctgaatggtcactgtctttttgttggccaaacctataatcatataaaaaagactcaaacttcaatcacattatcagatactaatacaaatccaatcacccaatagcatgtaaccaacaaaaagatagtcatcaattcaacaagttgttaattttcccaattacatttagctagacatataaaggtaatgacttgtgttcatatcaacagattcaacaaaagaacaaacttgagataaatctagagtaagcaacagttgtgtattaccagagtgcttgtacgagttgatgttgacgaggttgttgctctctttgctgaactgaaccttggcattacctctaccgaattgcttcaccaagaaacagttgtttctcttcacgatctcccagatcaactgtcctggaactgtggccatttcgagctccttcactgattattgaagaagaaagcatttagtaacacaacatatatgaagcggtaaaacaagggctacacagattgaagaacaaagaacggcaaattggtttgtaaagagatgattcaagctcaccttgatattagcagacctagatgacggcggtaaagagaagagaacgagactcgtgccggagttaagttatgatttatgtcgatgcgttaatatatatacattctctgcaaaaccctagtttggttctcggaggcaatgtttataagtcaaatataagtaaaccagacttttatcaaaagggcgtttggtctagtggtatgattctcgctttgggtgcgagaggtcccgagttcgattctcggaacgccccttctaaaatcatttttttttctgccaactaaactttgtttttcttcacccttgctaaattttccaaacaactctgcatccattagactcaaattgaccacttaactggataaatgaaaatcatcatcagacataattttcacttcaatggagcaaatccaaatcttgttttatatggtgaagctatagatcttacatggtgaataactatctatatttgaatacaaactcttcatgaagcattataactccctgaaaagcatcagcacaacacaacaacatatgaaaacactcttgacacattctttgttaccatcatcatcatcatcacagaagattccaagtttcagacttgaatgttcggacttagacccacatatcttcacctccttcagcccacattccccatttccatctcactctcgggttactcatcatacatgtcgatatcagattgcttcttactctaggatctttgtcctggtgaatcatcagtctcatgtctgtcaaacctctgtacttattaacaatagacctgatgaaagaaactgtttgatgaacattggtatgatctgacatctgtacacgtgctgttatttgcttcaggctgtctgttcccttcatatcacctaggccgccttggctttggaaatgtgtttcgatatctgaccaagtcctgggactcaaactaagagaagtaatgccagggaatgctttgaggattgttgccagtccaagttctaacctctcagattgttctatagactttactgaatccactgcaagctttttgatcttgttgccaaaactgatgttgctgattaatctgtacatatcaggagatacgagctctaaagtcttcagatcttgaaactccccaaaactaacaccttcagcgtcctccacagaaagatggcattgcaccaacttgggcgtttcaactagaagagatttaggcttgttgcattttagcttcagttcaagcaggtttggcgccacgatagccaaggaaagtggagcattcgacacagtccaatgacaactctttaggtgaagaaaatggattcttggttccttaagtcctccaacaccaatcaaattcagctcttgaagaaaagggaaacaatcattgaccttctctagattctcatcatcaagtctgatgaattcaagtgtcaagtatctgagattaggcatctcagtcaggccaactacagagagccaagcattcttcacctctagtttcactaacttactacctgcaagatacaaatagacttaatctagttactatcatatatcatcatcatcatcatcatcatcatcatcgtcttccaataaaaaacttctatttcaaacgaatccgaaacgaaactagaggaaatgatgatggagaaaaaaaacttacagtttgaagaaatgagcgccaaaatatccgattttctccagcaagattgaatccagaaatccgaaattgacaaattctccaggtcttcacgaaccctaggcaaccactccttcacaaattcgacatcggtcaggtacaaatccttggaatcttcttcattgaagtcgtcaaacgacattcccttaagcgccttatcgactccgactgagattgagcgaattttgctagagttctcgattaggcttctgaagatcgtcttgaacggtgtgacaacgacgatggaccgcgattttaagtaccgagaccaggtacagatgagattcacggcgcgaacctctcgagaaagcgagttcaatgtcttggaagcgactctacatcgtgctagggattcggaatcgttgattcgactcagaattttgatccagagctctggtggtaactcgtccatggtgtttcttgatttgggaaattgaaggaaaggaagaagacgaaggagagaaggagttatagaaatttggaggtacgtgtggttaaaatcccgcacgtgttaaaattgtaaacgactaaactacccttatgaattctggaaaataacaaacgtgtcatagagtgaagaaaaacccttattgttttctagatttctccgatttgtgtagtatcgtcgggattttttgaccggagaaatggggaggaggattttgaacgatgcgttgaggacgattgtgaatgctgagagacgaggaaaagcttcggtggagctcaaaccaatctccaccgttatgtcttcgttcttgagaatcatgaaggagaaaggtgaaatttttctcccttttgttttctaattggttcttgatgcttacccatttatcatttttgggatcggaagctcatcaattctcatggacactagatttagtagtattttagaagctgcaattagttcgtgagattgttgggcttacttacttgtgaagctacaacatttgaaagtttgaaacttgaaacaaagtttaatgttttttgcttccaagtttatgtttttgcttttatgatgctatcagtggtctgagttgctttgttctacttatgtatatatatacctgttgattcatattaaggatggttagataattcttctgctaaatggatttttttttgggtaatgttgctagatagcgatttcaaatggttattatagttgtaagtagctttacatgttacagattgtttgatggaatcagcttttccttagtgtgttttaactttacaaaatggtaatgttaaatgtaggttatatcaagaactttcaagtgtatgatccacatagagttgggagaataacagttgatctgcaagggagggttaatgactgcaaagctcttacctacaggcaagacgttagggcaaaagagattgagaaatacactgaacgcacacttccaacacgtcaggtttgttcattgtctctctctctccatatccagaaatgcagctaaatagcttagcctttttgatttgttccatgtagtggggttatgttgtaatcacaactccggatgggattttggaccatgaagaagcaatcaaacggaatgtgggtggtcaggttcttggcttcttttactgaatagcttgagctagcacatggcaagaaccttctagtgtcaaaggattcaacaaaagattgaagtttcggtccttctcctgttgctttttgttttttgtaacttgcattgtctttgaacagattggcaattattagataacacatttgttgctaaattcaaagatcttgttgttagtttatattttggacgagaaatttgttcttccatagctatctgaataatctatatttcttctatacacagacgggttaacagttttcttattatcatggtaaacataacattcctgtttcgtccaccaaaatagtacatcaatcaagatattttcttctctcgatttgtcaatcgtatcctcaatcattacaaatctgactgtatatatgacaagaaagccaaacatgtaatacaaaacagatgagatatctcacggcaaaaaagttatgctcaggatgcgaaattcaagttcaaatctacaagcaaaccaatcaaagaaaagaattgagggctaattgaacaatgaatatgtatgtatgtatatataaacaaacgggaagaattcagcgacgaagagccccgagcttggcaaatatgtcatcgtaatctgggagtttgggatgtacatggctagctttctcctttgccggagtttctgggtcaggtgatgtcacagttttgggaagcgagcttgaagaagaagctaatccttcttgcttagccattgacttagcctctggagttagctttgaaggagattctctatagtgagagattttttcagtttttggaagagagcttgaagaagttgctgatccttgttgcttagctgctggcttttcctttggaagtagctttggaggagaatcttgatcgggagaagctttgtcagtttttggaagaaagcttaaagaagaagctgatcctcgttgcttagctgctggtttttcctttggaactagctttggaggagaatcttgatcgggagaagctttgttggtttttggaagaaagcttaaagaagaagctgatccttgttgcttaatcagtggtttggccccaagacctagctttggatgagattcttgatcgtgagaaactttctcagttttgggaagatagcttaaagaggaagctgatccttgttgcttagtcagtggcttggcctcaggacttagctttggtggagattcttcatcaaaagaaactttgtcaatttttgcagtaacgagggatggtcttctctcttggccctttgttcttcttgagatggaaatataaggcctggtttgaatgtgtgcagtatctctatggacttctttctcatcttcatcgtcactggacattgtgtgaaaatatgaagcagaagcagaggcaggggtggtcttgtgggtcctcctatcttgacttctggtagaagctcgagtcgggatttcttcctccaagtccttatggctgacacccgaatgtagatgtgtgggccgggttcttgactcagttcttttctcttgatatctgaaagaaactctctttggaagttccatatctgattcatcatcactagaagatgaatctggaggtatagagcttggtcttttgtctgagttacttgctttctgagtgtaaagttcattcctaatactgctagaagaagctgtctgcagagaagaagaccttgacggatcaacctctgttggaagatactcttttatagatttagacgacgtcttgtctcttggcggactcgatccataagatgggagagtcgtttcattctcaagtccactggctagaggtccaaacttaagacctgtaggagtctctgcgtcagattcttcctgtgttttggaatcatctccttggtcttctgtgtctgatgggaaaaagtaacgtcctaaatcatcaggaccttcagacatgtgagacttctgagctgtcagcttcgactttccttctgcacgtccggaaagtcttcctagattgtcttcttcactttcagaatctcggtcataatcatcaaactttgcagacggctcaggctcatgcagagaagctggaggacttgtaggaccatcatcaaatgttggaggagaacttggcttctccttttcaagaacctgtgaggttgaggctgagctgagttttcccagatccttgtgtccttcgaggctccatgaacttatctctgtaggcatatgatccgatgttttgctgctactgccaagcaatgaaaatcctaatccttgttctggttcatcatgataagcatcttctgtgtcgaattgaggtttgtcaaaaaacgagctatagtcatcaaaagccggagcaacaacaacaacaggactgtcattgtagctctctctatctccaacagtgctctgaaatttgttttcctcaaagatacttggtgaatcgatatggtccaaggcagtgacatcattatcatcggaaaaattgcttgacggtgaatgcgatgaagctcggcttgattgtttcttatttagaacatctgctgaactgctaaggtttatatcatccatacctggctgctgtttctctctacctattttagcaaaggaatcattcggcctcatctccaatgagttctcccgagaatgacctctcctccatgaagtattttctgatagctcatcaacagtcttcttagatgactctgctctagtagtagtagtagattgatctacttgcctgttattgctttttaataactcttctttaccaaaacctccgccttgcatatttgagctactagtacgactatgtgggggattgcttctaagattctcatacgaggatgagttccgcgactctgttgaattctgcatcatcatcattctttctttacttgaaagctcagcagctctacgtgcagcaaaactcgctctttccgcagattcagcagcagcacgtgcagcactcgttgcatcaacaaatttcgtttcgaatggagatgtatccccatgacctggattgtgatccctgtgttctctaccgtcaactctatctcctgtattaaaaaagacgattagtttttttctaacactcaacaccaacaaacatccaacggaaaacgcttcttatagaaaaactaaccagaaggttttgggtcttgatgatagtgatcaggtgtcttcccaacgttgaaatcagtagatgtcatgcggcttgaagatctcccatcagttgcatatgaattctgcgacacattgacagtagctgcagcttgaaatactggaggttgattgttctggattcttgaagactccgactttattccagttgctggctgagacacagatgaacttgctccactctgctcaaagaaattgaaactgctaatgaggaaacgtatactagagaaagagacgagtgaaagtaatatttagctgaaaatgtattactaaccgccgacatggtttcctttggatctgattcaaccaaagactctgcttcccaagttacattatgctgcgtagcaatctccgtcaaaattttgatctttgttggaccatcaggagctttaacagacaatttctctactaactaagcaaaataaagagagagtctcaataaacaatcatagctctcttctacaaacagcggagtaaagtaagagaacacgcagtaaaacaacttaccaaacgactcacaccagaatccggttgcaaaccaatagcagctgaaacaaaatctttaccatactttgcagagaaatgcttaacaatatctgagagctccccaacatctgttaacctttgagaagcgtataagacacttgcgacagcttccttaagatcattaggacatgtcctgaagtaagatcacaaacaatgatcaacacaatgaagaaaaaacaaacaagggttgttcaaagaaacttacttttgagagtcaatgacacccaaacgagcaacaagaagttcacaatatataccaacgagctcataagcagctactgtcttttcttctcttaccacatgctccacctgacaatccatgaattcaaaatcacagatttcatacaaaacaaatgaaaatttgattgctttttacttacccgaattttagctgtttgggtttggccggattcaagcaaatgagctaattctctcctcagttgcttaatctgtgtatcctttttgttcttcaggattttcaggcgtgaagccgccatttgtaaagcaattttgcttcattattgaaaataacaatcacccaaatgtatcaatattccggtaatgtgaagaaactcgcaagaggaaaatgagaaagtgaatataccatttggcaggcttgaaacttcgatgaagcaccttcttcattgagcgaaacttgattagagaaacgaaaggtcaagccttttgaggtcttgtggagtctccgagtacacacaattgaaacgaaaaatctgggctttaagggtttttgttgaggaaatcagatggaaattttgtgatctgaggaaatggaccttcacgtgacacgaagaaaagtatcaattttggagaagacgcagaagaagaggtgaaatagagacgataaaaaagaaaaattgacttttggcaaaaacgggttaaatagtgttagaagattttgattaacgcgtcaaaatgacaatcatgtaagaaaacaaaaactcagaaaaacgagttaatgaaaaagacatgtgtcatgtcgacagtaatttaaacaaaaatcttgtatattaacattattgattttgtaaggttattcaaatattagattttccaactttgaatatctttcgttactccaattaatccccgaatcatttaatatataaacaatgatttttatcagatcttcattaatatcaaaacaatcttgaaaaaataataattaagctaataaaatttaaagcgttacaaaataactagatatgtattaaataattataaccgattttttgtatatgtctagagttagtgggtcacatgttttgaaatgtctttaaatgtagagacaccgacaacagataactgaaataccataaaactaaatttcaaaattagcattttttgtattagacaaaaaaaacaattgtttaagaagaaattaattgatttattttcaacaaaaataacatgataaaactctatacaatttaatagaaatatatgattcatcactcaattcaaagcttatcaatttgatctatagtacgttaatttcctagatcagcaattatgagaaatatgaatcattcatttcatcacaaaactattacaagtaggattttaacggaatcgacaacgatcgaattttatacaaaagaatttgagtagaaaccttttagaaattgtagtcaatcataatatgaatctgaccatacaacacaaataacctatatagaaattatccaaacctcttttaatccatttggcttcgtcctacttctccgtaatctctttgactttcactggctctgtggctcacggtccagctcagcagctaggcactgtttcagctccgctacgatctggttcatcgttggtctattcgatcctttatctctgacgcaagacattgccacatccacaaacttccaagctgagtcctgcgagaagtctccccgaagcagcgggtccacgacgccgtctagttctctagcctcaaagaacggccaaacgtagtgaataacgctgatattgtctccttcttctgttttgatgatggctcgctggccagtgatgagttcaagaagaacgaccccaaaactgtacacgtcgctcttctcgttcagcacaaatgttctgtagtatctgtcaccacacgtcgcaaattggttaccatgtattcctgataaacttaaaaagggtccgaactgaattggccaaccctaaccctagtctcactaaaccgctctggtttgtgaagctaccagccagaacatgtgatctgtattgattgtgaaaaggaacttactcaggatcaacgtagccgggagtgcccatgacggtagtcacgacgtggctgagatcgtcttcagggaagaccttagaaaggccgaaatcagcaatcttggcttccaagttatcgtttattagaatgtttgctgttttaacgtctctatgtactattgctggtctgcatccatcgtgcaaatactccaaacctgccaagggggaaataaaaccaggtttcacaatacagaactaggctaaaccaggtttggtttcttggttaagccctgaggaatcaaggttgccaaaaccgggaccaaccttgtgcagaatctatggctatatggagtctcttttcccaactaagatcctctgcattctcacctgcatgtccataaacataacacccgtgagctcataggaagcaaagcaacaattggtaacagagatatatagagagataataagatgacttgaaagataagcctgcaagttgccgttggccatgtactcgtagatgagagccatgctacgatcatcatcgcagtatccaacaaatgaagctaagttacggtgatgcactgtcaaaagaagctctgcctgcaaacattttacagtacttaagcattttaatttctaaaatatttgatcatgtttttggtgttctttagatcacctcgacttggaattggttagaagcccgggataatgatgatgatgaagttcctttaggttttgccaatgaagaatcgtttatcatctttacagcaattttagtcccatcttcaagggaaccaaggtacacaataccaaaccctcctttaccaatcactttattgaagttgtttgttatgctagagacctcattatatgtgaaccttctcttccctgaaggcaggagtggtcctgaataggctcctgaaatcaaaacactcgtttttctcagcataaaacaacttcaattcattaatcctgaagtaaatattccagccatctaacctttttttctttgccttagtatgatccatatgataaccaagacgacaacgagaacgatcactgatgctgctacagctattggcacgaccatgctcttcttcttcttcttttcttgacatgagttacaaaggttttgctcatccgcactgcaaaacagaggaaatcacaagattcagagagagtgcttgtgttgaataactttctgaataatgctagaaactgttacctgagcgtaagtaaaccggcctttaactttttcataagggattttgggataaacccagtaaaattgtttcctttcaaattccttacaacacaagtaaatgtgtcaagaggcaaattcattatttaaatagaccaacactgtgtatatttgtgcttacttacaggactttcaaatgttttagatcagccaaaaactcaggcacattttgttgcaggtcattgttggataaatccctgagaaaaacaatgcataactctctgatagttcatgtgcataaaaagtggtgaaaaatgtcaattgtatacgtatacttacaatgactcaagaagagagagatttctaaatgccaagactattggtcctagtaatccgcttgagctaagattcagggacttgatttgatgattattattgttgtcgctgcatccaacaccttcccaagggaataatcttggggagcaaggatcaccactccaaaccttgttcactttataagttgcttttatgctttctatagcatgaactgcattaccaagagaaaatgtgactatgtgagtttcagtagaaatctaattctatctaaatagagattgaaagtggaaactcactgtcttcaattgtggtggaaaattcatctagagattgtgcggtaaaaatctctatagcattgagaatcggtggaagcgttgaatctacagtcttctgaatagaaatccagtgatctttaccagtgaaagctcttggattagaaaacgtcgttgaatattttgaagaaggttcgaaagaagtttcagaaacaggggaaccattccacaaaatcttgatctttctagtctcattcttctctagtgtttcgagttccgcgaagtaaagatatgcgtagaaccgaacatttggatcgtctgatgtccagaacaattccaacggatcatcaacgttttcaggagcagcagctgtcttaataacttcatcaggtggacaataaccgttctgaaaaacatcgatatagcccgatgttataatcgagttccaggagatatttgaggagtatggagaccaaatacgatcgaatctatcgtcttggtaccgtcctgttccgtttaaatatccaatgtcccatcttcgatagagaaccaaagagacatttcttccaaattcagtaccgtagattgagctgttcactggtcggagctctaaccctgaaataaaaggagttcctttgcctttattcacaaggcaaacatatattgtatccgactctgcaaagcttaaaatctctttggtgacttgatcagaagcatttttgaatttcactgtcgaccagaagttcacgtttacatagagatcaaactcaggcaaagcttttttaccatcgtagtttccatacataaaggaagctctaatgagataaagatgatcttttccttgtgaaagttttaaggtgtaacagtttctgtttccttgagggaaagctcttacttcagcaagagttgacagcaataccgggttttttggatagccgtattcttcagagaccttgaagtttacgccggtggttatgaaagcttcatcggagacgtaattaatgttagtcatagtgtcttcaggggtatcgtaaggaggtatgccacaatcgatgctgatgtaacctggatcagaggagaagaaaggggagttacttccaacacaagtaaaattgtttatgacgtctgagaacgttcatggataggtttaaaaatctgcctaacttcgtttctctatattgacaaaaacgtagatcacaactttcaagaaccttcaagaacatcggtcaatttcaaattagaaaacagagaaaagagagaattgtatgattacttgtaacacaagacattgtataagggtttgactaaaaatccaagacatgtttaaaagacaaaaacttttcataataaaactcaagctttcttcagtctgaacctcgcctcaatttcaaatcaaaacagagaggagaagagggaacctgattggtcttggccgtgaactaaaatggtggtaacaagggcacaaaatatgccgaaaacgagattagccctcattttcttctctcttttttcagaagttcttcagcttaccatcttcaggaaaaaaacagactacgtgcgagtaagataagcttaattaaaagccaaaaagtgcaaagtctactctttatggtattagccaggtgtttgtagacttttctttcatcattggctcagtaactatatatatttcccactaaggacaggaagacaacctggattttataagatggaattagtgacaatgtcacgttttgactttagtgaagttattaaagatgtgattaacatccaaaataatagataaaatacatagactgagtcattgattgccagttgattttgatctgggacagaattcaaagtctttttttgttttatgaattttctataacaacgaagttacagagagtagtcactttagaagatgatcaagaaatagtactagaagggctcatatatttaaagaagcagagactttggagccttcttttgtttgaaggcctagttttgttccaaggccatcctttgtgtccactttactccgagcgagatccacctccacgacgggcacgcttcccagcaccgggggattaaatatattacctgcgcagagattattcacatatatcttatcataagaaatgtcacaatgtaacagaaaaagagtcatgtggtttcatcactagtactagcttatattgaatgtcacaaaatcagagctcaataattacctatcccactgaagaaaatgccgtaatccattccattgaacacggttggtatcactatcgaataagggcattgtgtggagaatccaatcttttctccgttagagtgtttaatagatttgcttagcttgtttacgcaacgtttgaactgcttgtggcagttaacgtaagtcatacctaataaaaaccaaatattaactcaagaatggttttcatgcatagattatgttgttgattggtttaccttttaaatcaacacaattgtcatgagtcatacaacaagcatcaagatcatcacaaggtggctctccaggacatccaaagtaacctatcccacaatacttcccatagcgaataccaagacctgaaaacaaagattggatcaaaacatataatgcatgcacaagtttttttctccaaaatcaaaggaaggcataagaactaagatgataagaaaaaaacaatcttactgttgcagttctgtgcaatgcaggtgttgctgcacttctcctggctgctaacgacggcgaggaggaggaaggcggttaaaccgaaagcaacacgtgacaaagcaagcccggtgatcatctttctaaatctcgctctctggttgaagtttttgggttttgtgttctttcaaattctgtcccaaactatttttggctctctctggaatggaatatcccatttttggttggtcctcctgctttcttgtccttcccctctctctctcttttacgtacacaagaatttaaaaaatgaagaagttgcatgactaccaatcaaatcatcatattttatggacgttccttctcgaagaagcattatcatggacggtaaaaacagagtatcatttttgttacctcttggaacagaacacgtttaagctatgtattcgcaacggctaatgattttcttaatgcaatctgttacaaatagattgcagattaatatgtttcgattttcgtatcattgctgatttttacatcaagaaacaacagaatttatgtttgatttattagaaaaaaaaaatccatatacactttttcttcttttctacatttgatttcttatataagtatgaattcgttttgaatcctctcatatctagagtaaaagagaaactaatgtaatgtataaaatacatgggaatcatgaacctgagagaattcaagatcttgatcatttttcataagacaacaaagttaaataatctacaaaacttgagagttatgagtcacctaatgatcaagaaggagaagggttcatcggaacagagactttggagccatcttttgtttgagggccttgatttgttccaaggccatcttttgtgtccgctttactccgtgccagatccacctccacgacaggcccggcacttgctggcttcttaggtataatgatattacctgcgcgagattattcgcatcttatcagattttaacactagctaaactaagctatttgcagtgtaacattagaagacagtatagtaagtgctataatacaaaatgtcacaaaacaatgtaacataagtaattcggtttcatcactagcttatggtttccgaagtctataagtgattctcatagtgttattaataaaccagtgcttatttagttacctatcccactgaagaaaatgccataattcattcctctgtacacggttggtatcactgttgaataagggcattccttggaaaatccaaccttttggttgttagattcttggattgattgtttaagctcgtttacgcaacgctggaactgcttgtggcagtcaacataagtcatacctgtaaaaaagcaccaaatgcagcattctcagatccaagatgcagagtgcaattagatttgtagtggacaaagtagttaaaagatgttaacttcactttgtgtttctctgtttatagaatagttttacgtagatattcttgattggtttaccttttaaatcaacacaattatcatgagtcatacaacaatcatcaagatcatcacaaggtggctctccaggacatccaaagtaacctatcccacaatacttcccatagcgaataccgagaactgaaacagagataggttttgcttcagaaatgttctccatgttcaaaggaatgcataagaaaaatgaaaatctcaccattgcatttctgtgcaatgcaggttttgctgcacttttcctgacattttgatccaacccatcagaaagaactagcaataaccatcatttggaataaaccacaacgcacaaacatgaacaaagaacagtaagtgatatgtatcaacctggctgtgaacgacggcaaggaggaggaagacggttaagcctaaagcaacatgtgtcaaagcaccaccgcggatcatgtttctatcttaccttctccagtagaagtttgttgttttgttctttcaaattctgaccccaagaattataattgtgtctctttggaatggaaggtcccattcttggtcctcctgctttctcgtccctcctctttctcatatgtaaaaaaagaagacgtttcatgattaccaatcaaccaccaaattttatggccgttctttatcaaaaaataaaaattatggatgttaagaacagagtatcatgaagatctacataatcttttagaaacgatatttattagattgcaaatgataatatggtttcaaattttgtatcattgctgatattgatattaaacaaggacaaaaacattatagtgaaagcaatttcctgggaaattttgttcttattgagagcaacctttatcaaagagttatagcaaaatggatttttctcagcttcaaagcctccgtttcagggataaactggaaaaaaaattgattcaagagagaatcatgaaaactaaaaacggaggggattacacaatcttcaagttattgttactctccttcatgggtaatagcctgtgaaggtgaatcctctgccggcgatttcacctgcgcaataccatgcaaagcattcgagaccaaacaatgcagcgattcctgcatcttctaccttcagaccggatctgttcttccataggttctttgcgtagtctacttccttccagaaggtttcatagcgtccgggaatgctgtaataaggagtggaagagtgttagatacttaacactatgggcaaaatcaagattgcaaaatgtgaatcaccaaaactcttcaattcatggcaaaacaaaaggtggtgatagaactcgcatatgtataaacttttcaagattaaggaacaggacatgctctaaagccgtcatcaagaaaaaggcaatatactgagacctcttttgtacccgaaaatatggaccgtaaaagattaagagtcaggttattgtataatctaagacttagtagactggaatgatcgttgcaaatgggcttattagagattaataatcgaacaaacttaagattgactactttaatacacaatcctgcaacttatgaaaacagattaaacaagacaaacagctcaacaaaaagatagcatcacgaggtcatagaaataagaggatagaataaaggattcatagtatgccattttcagttccatgaacagccaagttttgtatgagctcagcattccctggctatcttatacctcaaagaagatgctttattgacaaaagtctctttctaaccagaatctagataaggtaactatgaccagggaaatgttcatatagaaggaaaagagagatatcgacctagcaagacgggtgtagagcaactgcttagacaactcttggcacttctcaacagtggcaggttcctggatatactgcttgttcttctccaacagctgtctgtagtaggaagttccatgcttagccacaaactttgaagcctcacatgcctttgattgaacttgtatcaacttcgatgccatcttcacaaccaaatccttcaaatacaaaaagagattctttgaatcataaaatttaaattaatcaaattttgacattgaaaattttgtaaatttccctactacagcaaacaagagacgtttcagtgaattcacacaaatcaagcttaaagacttaaaaagcctaaaaccccaaatcctatattccataacgatagatcgaacaaactacagtgtgaatcaatcaagcaaatcaaaattacaaatcagtcactcctagaacgaacaaatcgttatcgaagcaagaagagatcacagatatagatctaaaagtcaaaccacaaagcatagcatatacaagagaagcaggagcaaaagcctcgacccaattgagaaacatcggtcagagaccagaaactcgccgtaccttcctgcagttttgataatgcagcaccggtgagctgagagatgagtcgattcgagatttcgggccactggttcaacaacaactgcgtaatacttctcttctttatgttagaacgacggcgtaatatgcgtttcgattggaacgatgtcgtttctttcacactcttagaacgacgtcgtatatattcgttttcctcgagttctataaaaacgacagcgttttggatatttggctttattattaggccttgccggaaaaacaaaaaactagctcatcgtcgtcatgtcgtctctgtctcctccaccgattccaatggaactccacgccggtaaccggaaaaagttactagaatcaatacgccgtcagttatctagttccaatcgttctctcgatggatttgttcttctacaggtacccttgattagctcttatatacataatttccaacacgtatcgatgatccgattccgagctcgctttcattgtgtttagtttgtaattttcttgattctggacgatagggtggcgaggagaaaaatcgatactgtactgatcacaccgagctcttcaggtattgatttgaaattttatctcgaggtttcttctctttcaatctgttcaatgtattgagtggaaataagatgatattgaactgacttgtaggcaagagagttattttgcttacttgtttggagtcagagagccagatttctatggagctattgtgagttttgctagctatatctccatttcttaagaacatatgacccgttcaccattttcattctatatatgttgattgttgcttaaccaatgacattgagtcactttcgatattggaaggacattggaagtgggaaatctatcctttttattccaaggttgcctgatgattatgctgtttggttgggagagattaagccattgtcgcattttaaggtaaatatttgaacttttttaagtcttgttaatttgttcagtgagtttatagtgattgcagtttgtgcttcttgttgcaggaaacatatatggttgacatggttttctatgtggatgagattattcaagtctttaatgaacaatttaagggatctggaaagcccctgttgtatctcttgcatggtcttaatactgacagcagtaacttctcaaaacctgccagctttgaggttttgacatttcatcctttcttcttcactttctctggagatttggtcttatgtttgtcttgtcttgatgctgaagatgaattatcttaccgcatgtcttgtgatctagaatttcaggattctgatgctcgtactgttttcctgatatttggaatctcatttgtaattatttctttttactgttgtcctgtcttatttcaggggatagacaagtttgagactgatttgactactttacatcctattttggcggaatgtcgagttattaaatcaagtttggagcttcaactaatacagtttgcaaatgatataagttctgaagctcatatagaggtgtgaatttgatttcctaacatgttttctctcgaattgttgtttgtctttttaaatggtatgcttagaccaatgaatgaaataaattgatgaaacgattttcttatctgttggcttgttcacaatctgtcgtttttgtatcatcttacgacttaggtttctgacctcaattcttcttatccactccatgtagacagtttttttcttctctttttgcaattctcttacatctttccaactttaaccatgtgttttttaatccacattaaggttatgaggaaagtcacaccgggcatgaaagaatatcagatggaaagtatgtttttgcatcacagctacatgtacggtggctgtaggcattgctcgtacacatgcatttgtgcaacaggggataataggtaagtttggtggataaatcttgttattgctgaatatgcagaaatattccttttcaggtgtttgtactgaaaaactaacaaaacgatgttaaattgtttgtagtgctgttcttcattatgggcatgctgcggctccaaatgatagggtaaagggaacacacattcctcgcttttttagttctctcattattccctgtttgaaaatgttttaatacttgttgcagacttttgaagatggagatttggcattgcttgatatgggtgctgaataccatttttatgggtctgacataacatgctcattccccgtgagttcttctagcatcaaatctattcttaattttcctctgaattgtctttgcaccgcattgacttgtgtttttaatcttgtttacatgaacatcataatttgctgaatgtagttatctagagaaagtggtctctaatatttatcaattggtgtgcaggtcaatggtaaatttacaagtgaccagagtctaatctacaatgtaagtgccttacaagattggtgcaacgtggatgtattagaaatgtgtgctctattttttgtcttcgcacaatccagagtttggtgagtctcttgaagctttacatctgaataagtttctctgattttgccttcctttcaggctgttctggatgcacataattctgtaatctctgcgatgaagccaggagtaaactgggt

SEQ ID NO: 1390 - DNA, 38340 bp, Arabidopsis thaliana
gatagtgagtgactatgttttcgaagattgttgtccatattttgggataatagcaattatgaatagaaagttggaatcttagtctgacatggcagttggaattcattgtatttaatgccaacagagacatgcatctatgcctgtatatagcaatagaaatacataaagtggttttcttaagtatgtctcgtaggcgtggcatagccatgcaacgaaagagagatcaatgtttgccgacttgaagaggttaactactgcatgtagagctggtgctaacagaattgttttgatgcagagatatgacccggacccagctgcaaaggcagctgccgcaactgtcctggcatccaaattgggtgccgattcaggcttgaaagtatatttaggagatgaatcccaactcgatccatcctcgggcaagagcaatgacatggaggttaaccaatcacgtgggttgaggaatcgaaggcaaccaaatacaagaccccacggttctgggagcacttcaacacatcattctgatgatgagtctcaccattctggaacaagcgagagatttccaggcaccacagagcaaaaccagcagatgttggttgagcattacagccctcagggatatgctgctcatgatggcagttggatctcacgcattgcggctctacttgtgggcgaagatcccacacaatcatatgcgctcatttgtggaaactgtcgtatgcacaatggtgaatgaatgtttaagcaaatcctttacctgaatctttcaactatatacttatttctaacataattttgcaatatgctttgtaaatgcaggacttgctcggaaagaggattttgcttacattacatactattgccctcactgtaatgctctgaacaaaccgaagcattcagaggagaatgtacttcttcctgctatttccgcttcaccaatcacagactctctgccactgattgagaccagcgaagtggttaatagcagcagctcgagtagtgaacgtggaagtagccccactccagaaataaaagaggaagctgcaattactgagaccgggacaccgagctgaggaagatccagtgagctaagaagaaggcttagtcgtgttggtgctacagagaagagattttgtgtgtgcatgtgtgtttgtggatgcgagtactcattcaggtaatcttatgctatggattgctaatatatgaaggtgcttacagttttgattctggtttgtttctatacaacaagacaatagggttttggtgggtaaatatgcgattctactgtcgtaaacgacgattgttatacgttttgggggtttgaattctaattatcttttaccattacagattgtctctgtttctgttaaatgtattcactcttggatgatggatcattcccttttcgattttagcactacgagcctacacctttcttattaatcttcttcaatattcaatttattggatagcgtttttttatacctaactctgctttttcattgtttttttttttgttgtattttactagttcatgatatgaatatgacttttgcgatagtagatttttaaaattatctttagtaaattaattaccaaaattgtttgcaaaacacgtgatgatctacactttaaagactttgaaatatattttaaactggtaaaaaagatgctttccgccataaagttgatctcatcaagaaacacaaagagaggtagcaattaaaatattcaaagatgaagagcattattagcacgagcaactcttttcctctgtctccacttacaaaggaacaaaacttgatctgctttatagtaaagaacaaaactcaggaagttcaaatttgcttgggcagagaaccatgagctacaaaaatacaaataactctcacttgattctcttcaagctgttacttcttctgatcctttattctgcagatctcacagcttcaagctcatgtcgaagtgaatgtggaggatgcaaatgtggaggaattgcgatcccatacccttttggaatcggtaagggctgctatctcgagaagtcatacgaaatcgaatgtcttaatacttcaggaaagcttgtcccctttctttctgtaattagcaaagaagttgttagtatccatcttcctggtaggcaatcctttgggtcagttcgtgtcagaagtccgataacatccgcaggatgttctagtgatggaaaagactccgcaccagtaatgaacttgacggatagtccttttttcgttagtgacataaacaaccttgtgggagttggttgcagcagcaaggtgtcgttggagcatataaagcaaaacatggtgggatgtgagttgaactgcagtacgactaacgcgtcggatagcaacagcatccctttcttcgacaaaacggggtgctctttttcttatactttcgcccaggtttgtacaggaaacaaaccggaagatatgggatgcgatggtaggggatgttgtcaagcgagtctacctagagagcctcaacaagttattggtatcagaatagagagcaatgatggaaagtcaacaacaagtggagactgtagagtcgccttcttaactgatgaattcttcagtttgtcgaagctgaccaaaccagaacagttacatgctaagagatatgctacattaagtctaggatggataatgcagacgaggaatacttccttcgtcaactccttggcctgcaaaatcagaaaagacacggacactgcttactctaatgaccagagtataaagtgtatatgcgactacaccatgagcatcatttctgatattaggtatgccaattgtgaatgcaacctaggttacaaaggtaacccatatgattcggacggatgtagaggtcagtattatgttctttccttatgccctcctctttttttgtgtgtggaagcaagcatcctttctagagaagtttctttcatcgtttgactatcgtattttcatctttcaattatagatattgatgaatgtaaagagaatcccaaatattgtaaagaaacagacacttgtgtgaatttcgagggaggctatcgctgtgtgggcgataagactaaagcaataatgataggtaggtcactgatttttgttccacaaatttagagcttttaaaaagcaagtgatgatcaacctataatattcttgtgcggtttggcaggggcgggtactggttttggggtcttagtcctagttggtggagtatggtggttgagaaagtttctagtgaagagaaggatggcaaagaggaagaagaagttcttcaaacgtaatggaggactactgttgcaacaagaattgaatacaagacaaggcgttgtcgaaaaagcaagaatcttcacctcgaaagagctagagaaagccactgaaaacttcagcgaaaacagagttcttggacatggtggtcaaggtactgtgtacaaaggtatgcttgtagatggtagaaccgttgcagtcaagaaatcaaaagttatagatgaagacaaacttcaagagttcatcaatgaggtcgtgattctctcccagataaaccatagacatgtagtcaaactcttgggatgttgtcttgagacagaagttcctattctggtttacgagtttatcatcaacggaaacctctttaagcatatccacgaagaagaagctgatgattacactatgatatggggaatgcgtctacgcattgctgtggatattgcaggagctctttcttatcttcattctgctgcatcttctccaatttatcatagagacatcaagtcaacaaatatattactagacgaaaagtaccgagccaaggtggctgattttggaacatcaaggtcagtaaccatagatcaaactcattggacaacggttatttcaggtacggttgggtatgtggatccagagtattaccggtccagccaatatactgaaaagagtgatgtttatagctttggagtcattctagcggaacttatcactggagataagcctgtcataatggtacaaaacactcaagaaataatagccttggcagagcatttcagagttgccatgaaagagagaagactttctgacatcatggatgctagaataagagatgatagcaaaccggaacaagtgatggcagtagcaaatctggcaatgaagtgtttgagttctagaggaaggaatcgtccgaatatgagagaagtttttacagagttggaaaggatttgtacgtctccggaagattcacaggtgcagaaccggattgacgaagaagaagaagaagatggagtagaagaagaagaagaagttgtgacaatagtacacagaggagattcttggagcattggtgttactgctccagcctcaagtattgtggcttcacctccatcttcagatgttgaaccattgaatcctcttctcacatggtgacactcaatcagatcttaaagtaatgatgatgaatgaatttgatgtatctcgttagaaatgttttctgtaataaatttgagtagttgttagtctgtgtttcccgcttaagaacgtttgttgtgtgtttattattcctaacgttcacctttgtgcctcaccgatcacagactctctgccattgattgaaaccagcatagtggttaatagcagctgtcgagtagtgaacgtggaaatagccccactctagaaataaacagaggaagctgcgactgctgcgaccggtactcgttcagataatctgtttttgctaacgtagtcactcttgaatttggatcattttcgattttaattctaggagcctaaagtttcctcgtgtttttctcgtgttagtttattttattcagaaatgaataaagttagttatggacggtgtttttatacccaactctgcttttcaagtttttattttttatttttttgtattatacgatttcatgatgatatgaatatgacttttgcaagaaactgcatttttgccagagtagtttttttatctttcttctgtaatcaattaccaacaatgtctttccaaaaagaattgatgatctccactttacagactttcaacaatatttaaaccagtaaaagagaagctttccgccatataattgatctgatcaagaaacacaaagagaggtatcaataaaatatccaaagatgaagaccattagcacaaggaatcttatcctctgtctccacttacaaaggccatctgctttatagttaatacaattaactcaggaagatcaactttgctctagtagagaaacatgagcaacgaaagtacaaattgctctttcttcttgaatctcttcatgctgttacttttgctgattttttattctgcagatgcttgtcaaagggaatgtggaggaatctctatcccataccctttcggaatcggaaaagattgctgtctcgagaagtattacgaaatcgaatgtcgtaacacaacttcaagaaagcttgttcctttactttcttttattaacaaagaagttgtgagtatctctcttccgagtgcagatagtcattttgcttatgaagtatctgatcaagaacgtcatgaatcatttggcttagttcgtgtcaagttcccgattacatccgccggatgtttcaacgatggaaaagagtctggaggcggatcaaaaatgaacttcacgggtagccctttcttcattgacagatcaaacagcctcatagcggctggttgcaacagcaaagtgtctttgatgtatataaagccaaaaatggtaggatgcgagttgagttgcaatacaagcaaagactcatatagcaatagcatcccttttgtcgaagcggggtgctcaagcaacgttttaccctattctcaggaccaaggttgtccagaagagatagcagaagaaacaggatgcaatggtatcggatgttgccaggcaagtctacctaacgagcctcaacaagttattggtatcagaacagagaataatgatggaaactcgacaacaaaagtagagtgtacagtctcggccttcttaacagatgagatctacgctttgccgaaggcgaccaaaacagaacacttacttgctaagagatatgctacggttagtctaggatgggtaatccagacgagtaatagatctttcctggactccttggccttggcctgcaaagacagagaagattaccgcaatactactaacttggaaagaaagtgtacatgcggcagaatcactatatctgagacaagttatgcaaactgtggatgcacctatggttacacaggtaacccatatgttttgaacggatgcaaaggtcagtatatgttccttccttattctctcttctctctttttgtgtgcacgcatcttttgagattttacaaatcatccctagatgttataattataagtttttctttcatcatttgattataatatgtcatctttcaaatatagatattgatgaatgtaaagtcaaattcgaatactgtggaaagacagaaacttgtgtgaattttgaaggaggctatcgctgcgtgcgcgataaaactaaagcgataatgataggtaggtcactgatttatcttccaagttgagtcacaaacatgtagaacttttaaaaagaaagtgatgatcaacctgtaatattcttgtgcggttttgcaggcgcgggtacgggttttggggtcttagtcctagttggtggattatggtggttgagaaagtttctaataaagagaaggatcacaaagagaaagaaaaagttcttcaaacgtaacggaggactactattgctacaagaattaaataccagagaaggctatgtcgaaaagactagagtcttcaactcgagagagctagagaaagccaccgagaacttcagcgaaaacagagttcttggacatggtggtcaaggtactgtgtacaaaggtatgcttgtagatggtagaaccgttgcagtaaagaaatccaaagttatagatgaagacaaactccaagagttcatcaacgaggtcgtgattctctcccaaataaaccatagacacgtcgtcaaactcttgggatgttgtcttgagacagaagttcctatgttggtttacgagtttatcatcaatggtaacctctttaagcatatccatgaagaagaatctgatgattacactatgttatggggaatgcgtctacgcatagctgtggatattgcaggagctctttcttatcttcattcttctgcatcttctccaatctatcatagagatatcaagtcaacaaatatattactagacgaaaagtaccgagccaaggtggctgattttggaacgtcaagatcagtaaccatagatcaaactcattggacaacggttatttcaggtacagttgggtatgtggatccggagtactaccagtcaagccaatatactgaaaagagtgatgtttatagctttggagtgattttagctgaacttatcactggagataagcctgtcataatggtacaaaacactcaagagatagttgcccttgcagagcatttcagagttgccatgaaagagaagagacttacagatatcatagatgctagaataagaaatgactgcaaaccggaacaagtaatggcagtagcaaaggtggcaatgaagtgtttgagctcgaaaggaaaaaaacgtccgaatatgagagaagtttttacagagttggagaggatttgtacttctccggaagattcacaggtgcataaccggattgacgaagaagaagaagaagaagaagaggaggaagaagttgtgacgacaataaacagaggcgattcttggagcattagtgttactgctccagccttaagtattgtggcttcatctccttcttcagatgttgaaccattgtttcctcgtctcacatggtgactgacacttaatttgatgtttcttcttacaacgtttgtgtaatatatttgtaacatctatatatcttgttactttagtcttgagttttgtattaaggaacctgttatgtttgtttttgtaaattaattgtgagtgatgatgacacgtggaagagcattaacgttatgtgtcttcttcagagcacatcaaatcaatggcggataagagttttatgtgtcactgacggagagaaatcacgtctcttctgtccacgaagatgatcgtgcaagaccgaagcgataagtctcttgcagaaccaacttttaagatttaaggttgcttgtcccttttttggctccttaattcttggattgatagagaaaatggatattgggattagaaacggatggagaactccgaagacttcagaaagctctggatctaatttcctgggtttgcttagatcctaccctaacaccatccccaggtgtttatactttcttagtttatcttcttcttttggtttattggatttgataggtcaggagctctgtttcagggagagaattcatatgggtaatgttcatagtggcaaaagagcaatggtgatttctagtttaaagaaagcgaatatctctgcttcgaggaagcagagaattaagctagagattaatggagaaaaggagctgactttcagtgagtttttgaaacacccatctggcatggaggctgtgatcaacgcaaaggctttgcagagttaccatttagttgatgatagtgatgatacttacaggttctttctttaactctctcatatcaattaatgttcataggacactggaagtttctctcatacttgtctggcatacatggtctttgcatctgttttgggatcttcatcgctttgattgttatatctgcaaagcataagtatccgaagagtgtatctctaatcataaacatagattcgtctaattgatatccagtcacaagcttgtcagatgttttctaatatgttagcatcattatttggaaatatgccttctatctggaaagggagatagtaaatctttgtcttacagtgcagatgtacattgccaaaagttcagttaatgagttttgaagtttatccagtactggttttaagggtcactcccacacaggaagattgtacagttgagctgctttcctgcaaggttgaatgatgaagattcccgttctgatttagcagatatatattctattgttttccttttaccgacaaatgttttgaaccactgtcttgcagttggaaggatcagagttattggagaaccaaagtgaaaggttttcaggtaactttcctcttgtgaagaaaagcacttggtatctaatgtttcaaaagtaatacaagtgttttcccatttctggttcacagcaataatgacaaactgcatgacttggaacatggaacatccagagccatttttggaagttgacgtgagattgaatgtcactctagaggtagtgtattgcagttcagtttctttcattccttcataacttcattctcgtgcaatcctattagccttaagagtatcaaatactgcactgtaccgtgatggttgtctgtgatccatcattgtgtggataggtcatgtcgacttatgattctcatttcggttttgtgtatatgaaaaagctttgtttcctatgttcatcaaaatcccccttgttcatggcagatctcaacgcgaccgttcacaatgcttccagtatcagctgttgaggctcctgggaatctgtaagtgtacattattgttcgttttacatttcttctgcttcttggctcgaagtgcccgagtaatgttatattttgatacgatgattgcagagtaatgcagacactggtcgatacactggttccccttctgcttcagcaattacttaaagattacgacgaatggattaaaaaacagcaacggaactccttaaacgcaacttcttaatctattaccaatgttttgtcaaacggccgaggcaggatttgttgggtcgttttggccgtttgagattacagcgtgtattagagatagctctgaattactgcaaaaagtacaaacaattaaatgaacaaaatagatttgattcacttgtatactttggccttttgagatgaaagagatagctttgtattaaaagtgcaatgaaattactgaaaaagtacaaacataaataaggtcaagagagatttgattcactcgtaaactttagtctttcttgtgacaaaaatacagcacaataagattacataactttttcgtcatcagtcaaaagtctctaatcctaaaggccaacccagtacgaacggccattggtgttatgcatcggagatggagtaggtgaagacaccgaccattcataccaaacctgaacccgaaaatcagaggatcaataatagttctttagacaaagagttagttgtatggaatcttgtggtttcaactttttttacctttgaggaaccacaacacctccaaaagtgtacttctaatggagtatcagggtgaacctccacaggcttcctcaatgggaaaaagattgggaacctgccaaaaggaacacgattttctctcggttgaagtaagaggttcgatagaagaaagctctgttttaaaacatttatagacattaatccattaccagctgaacatgtttggtgttgctgttgtaggctcgatcccaagatgaacatctttataaaggacggaatcaaaatagccagcgaatcctattatgatcgcagtagattcagtttcagattacggaaatggagatgtaaaattgacattaacaaacaaaaaagggctagaaaaaagcaggtaccatgcaccaaagctgagccagcatcgcttggtagactgaactgaagcttcttatagcgttggttgttgactttcgttgagaagtttggatgagtaaatgtgaaaacctatttaagaccaaaccaaaaatcctgagatggtcagatcgacaagacttgcataaatgtatttaaagagaacactttaagctattagaaaatgctggagacagagagagactcacagactgggaaggagcaagctttgctacactatgcagcttgacaacataagcagtttcaaagtgcgcaagatctttatgagccttaacctgccaaatggatgaaaaagaacttgagttaatctgaaaactcttgcgagtacatagcaaaaagcagaagaacctacgtcattgtaaagcttcgaagctgttataggctgtatgaaacttgtatacctgaaaaagtaataacgatgttcctcctccagttagagaaacaaaaggacagatgagtttcttatgaaatttcaactaagcgaaggagtacacatacgaggatggtattgaaattccgtctggcttcagaaacctttgggctccatcaagacactcaggagaaagttcattgtctccaaaagaacccagcagttcgctaacctgcatagaagaggcaaacgagaattagatgaactgtatataatgtcagcatgagtattagctacaaaaatctgtacatactgaccaatatatcagcttgctcgggagcattccaaaaacgcatgtcacaggatattatcgtaacaacgtcttcccatccttccatcttaaccaaattctatcagaaaaaataacaatgctctgagttaattagaaaccacactgcacgtccgaatgaaatcacaggaaaattagcaattttttaatcgactcagtgctgacaactcacatggagtgttacaacggcattaggattcttttccacggcataaactttcaacttccgatcagtttcttcagctgcctggtaaaggaaacaatgaacacatttgattaatgaaacaaatgaattttcaatgtctccttgtgcatcaggactttacctgtaacgatgccctcacaaggggtccccttcctgcccccacaaccatcaggacctaaaaactaaaatttcagtcctactgaagtatttcatatgaatagcagaaaaaaaacttataaatgaaaatgccactttgtaagcaaaacattgacatatgacatacagtagtcaactcggatgctttttcatcaggtaccctgtccaccaaggctttctcaactgctctttgatactaacaacacaaagatggacgaaagttaagcatgctttaaaaaaaaaccaggctatgatattaaattgttcaacatgattcatccatcagtccactctcctctgcaaaccgaagcagaaatagacgaggggaaatctagaaaccaaaggagttaaaatttaagatgtgaggggaaaaaactagaatatgcaacatacttggatgtatttaacagagtctctctcaaacgtctcataggtttgggcttcgaggttgtccataagaggctgtattcattaaaaaaaaaacagtagaggctctttacagtaagaatagagcattttcatacagggtaaattatcatgatgaacggacagaaatcagaattgcttatgaaaagaggctaacctgcaggggtgcctgcaaaaaatccctgtaacccagctgtacaaagagtaagatttagataactgtcagaatagagttgtatctgccagcttgcatctagtgataaaaaacatagaaggactgaggcaaaaggatgcaaaaaacgacctcgatgcgttcctgttcagaaagtgattccatcttttggaacagataagcaacatagtccaaatatatgcgcagaggattcttctctgtacctgacaaacaatgcccgtaataaaatatttagctcaaaacttggaatcaactatgattataacaatgcccgtgataaattgagctacggaaaacaagcccagaggataatagctaattttcagaggacaaaagattatacagaaaaattaccctccgagctagaatcaagaggcttttgaagattatgaacaggctttccacaaattacaacctgcatttacaagattgatgataatgagcaccagatcgagtctaatagatctcttttgtgagtcaaaagaagattttaatttatttctatatcacaaagagtgggatgtttgttacctgggcagcatgatcaaaaaatcctgctattaacttttggtggcgtttggacaagcaaggataaccccgagcatttgttaagaaagcctgcaacgccaaattagaggcattttgtgattcgcaatacttcaaagtggagtttataataatgcggcaagaagtcaggcacttacatcagtgcttaatatggctgctctcacagactctcccatccagcgccctagtgaagtttcagagggtagtgtactcctatatgaagaaaatggtgttatgttagtagagtggaaaaaaaactttgggtccacattaacaacaataatcaagagtttctctcaactcacagaacatcaagagcaacagacagcttactgtcatgctcacaaagaagacgaaacgaattccacagctcccaggaatcattctgcatagaagagagtatatattaaagtaatcctcacacaaagtgtacaaaaacgtgaacagatagggacatttatttgtatttctaggtttaaaaggcagccacatcaagtgattccaagggatccgcattagagagtcccttaaaaatctgagaaggcacaaaaagtactaacaatcttaagtttgcataaaatttgatccaatgtcttaccagtccctctgaggtatcatccattgaatcaccttcagacttcaccagtggaacccttagccataacttcagcgcagaaatgacatttaaacaaaacaaagaagatccacaaaatgttagagcttgattgaaggtgatcttgtaaagaaaagtctcatctgaaataaagctagaccggcagcaagaaactcgtaaaccacctgcaaggtagtgaggccttgtaagatctggttcacacatctggcataattggcgcacgatttccctttaggagtgggaagaaggcatgcctgcaacaaaagaatttctcttcaaaatcactttgcaggcaagaaaacaaagagagtgagttaaatccatagatgcacaagcacctgtaaggagagatgagtagcccaagctatttcttgcttcaatgtggtttctgaatccatccgtaagacctcatcttcagaatccaagtcaatccacgaactaatttttcctagagaatgaagatttaccactcaaatcaaaacccatcatattcataacgagtacaaaatcacacggtggagaagcaaatagaatcataccaacaacatgactgctccattgagaaggtgacaagactaagtcagagccacagactggaagaacctgagtatctacaccatttccttccaccaagctcggcctatacgaaggatccacctgcaggaagagaaagaagtaaactccgtcaaagatataaaatttcaaatcccaattgatacagtaacaacaggcaaggacgtgagagtcgaggaagaagaaggaaacaaaccagaggagcgagaacatagtcaaaaccgccggtggaaatgttgaagttgagaagatgagtaacatcgttggagaaatcagtctcaacgccgcagtatctggactcggtcctctcccatcctcctctctctccgagcggcatctcttcttctctctctattgagctcacagggagtgaaggaatttgcagatggaagtgaatcttcttttctcgagcggacgacgaaaacgaaagggtttttgacagggtttaattttactgatctgtagtttatatcgggcttttctaatgggctttatgatatgctatacctagcccatttatgccatcccaagctccaaccattggctctaaacatgttaattggttttgacataaaagagtcttatggtttgtgatagtagtactagactactagtagccacccgaattcaagtgaatatttacatattcttagaaagaaaaatgttgatatagtgtgtgatttgaagtgctttctcatatcaattatgtcaaatgtaagagatataaccaaaagattatttttcacagatacagcttatgaatcacaatgcatcaaggtgcagagatgggtttcataacattctagccaatcattaaaaaaaaaaaaaacaacagaagaaacaaattattattttcctaatcaaacaagtagaaaacaaatgaaaaacccttcttatacccaataccaataaaagcatatcattctctcaagcatcaatcttgagattcacatccctggaggaagagttcccatcgatgcttctgctttcaacttcatcaaaatggtcttcacgggcgttatcagcgagcatcagagcaaccaaccagaaaaggcacgagtccaaagacacaaaggcacctccaccaagcagaccggtcttagccgtggggcaactggtttctaagtttcggtgaacattacgggtcaagtgaagttgttctgtaatggttggccagagcaacagagacaaggccagtccagatgttatcctacacgacaataaccataggtcacaaaaagactcctatttttaggctttataataccggaatccaagaatatttgtaatggtctagctactgtgttcttgaaaagaagaggaaatgcttacaaggcaatgttgaagaacacagagaagctggtgcttttgaacaagacagagttaggaacagactttcccttgtaagagatgaacaaggatttgtatcctgctacagtgcaggcaaggagaaaagcagcagaaaggtatcccaaggcaacagttggatcagatgggtatttgcagataactactccttttccacttattggagtcccagacgcaggctaagatgaaaacacaaagaacagaaacaaatcacacaatcagtaacacataagaataagaaagccgaagtggtttacccacttatgaaaagctcttgacatacggtatcctagagagatcagtgacaatgatgaggtcaaacaattgtgtagaaagagtaagatttagctacgggtcagttaagatcacattggtttcccatcattagatacaattatgaagctgtgagaagatcacattttttcatacaatccaacaatatcacaatatcagagtcatagtcctgtgactaaaacaaatttgacatcctccattcacagagaatagcacaaataacaaccaaagcatcctaaagaaacaggaaatcaaaacaattgattcatccatagttagatcactgtttgatacatacaattccagagtgattatttcctgtgcaaaaaaaaaactaacttgcgccaaaaagcaacaggaattgtttatgtggtagtagtagataaacacaaagaagaagaacaaaaatcatcatcgaaaacaaacaggaaatttaaagttttctcacgaaataatcaaaaggagacgacttttttttgtaccttcttgttctcggcgataactcccaaaacaaaggataagacgcccaaagcagagacgaccaacgacatttgtttcatactaaccgccatatttgttgtatcttcttctccgtctaaccttaacctatataatatatccgagagcacacagatatcaaattcgatttcccccaaaacataaatcagatttgaaaatcgaatcaacgaacagagtcggaaaaatcgaactgtaaaagaaaaacactcaccgagacgacgaatgaatctggagatttgtggcttcagagagataagagaaatcggaagatatggttagttaggttgcttagttttgattttggtttaattcgatccacttgcactgataattcggggatgagccctaaaaagtctccgagtgttgttgttgttttgggctcttcaagattctgttgaccaaaaaataaaagattccatatttatcttcttccacatgtattcatcatcttatttttctttataaaaaaatctacgtaatagagattttcaactgatttacttcctcatattattttttattctgaatatagatattactataatttacaaaataaaaatatatcttgatcgtataattatttggtataaaatattatcttcccacgtaggtatataatttaccaaaaataagtttaagatggatttaccaagaatccaatattattacttgcgatactttatatgggaagtagaataattggatatgatattggaatttctttttggaaagtacatattgaaaatgttcattatcgtatgaagcagaacttaaagactggctgggatagttagtacttttgagaaatgggattatcgaatctttgaagataatctgatgttgtatgttccaaagagtctgtcgagttttgtatgcggaagctttcactgttgtaacactttgcaacacttgttctttataaaatggtaacacttatggggatatttaaaaaaacaaagatagcaacatgtttagcttttataaaaatgtattatttgaacgataccagggaatcaggatgctagatgcattatccggtcggtgaacgatcgtgacacccaagcaacaaatatacaagaccaaaattggccacgctctctcctctacccctccagctttacttgtccttatcacttccctttatcatctgaattaatttcatctcattgatgcttctctatgtataatgatccaacacaaataaatcaatcaaatcaaaccaaccgatcactttctctttttcactcataatcattccaagcatgattttaaaatgggcttttgttgtctctcataaaaggtgatagctattcgcctcttccactttcttcttagattgttgtagtataagtttaaacctacgactacgagtggataaaatggttttggtttgacttattaggtttaatcgagtacgacaagtggacttgtgacacttgtccaaccgatacttcttatcttgtgtttttgtgttttctcgtcttctagatcacgttttggcatattgaatttattatataagaataagattcgattgttgaatttttaataagtatggctttgttatattacacgtaagaattgaaaacattacttgatcaaagaaataaaagattttatgtgtggtgactgataatgttgttgaggaagatcagagtcattaatgcagactcagtgaccagtggacaatcttgtataaagaaagacattacagagttatattcaaaaacgtggaaaagtatgcattaccttcttgagatggaaatcttaacaaaaacaagcttttaaaattgagtgcatgtccaagtcatttttagatttggtgtttagtgcttcaatatttcacaatatccaaaaaactcataaaaagatttcagagatagaccaagaaaagttatttgagtctctaagaagggattgaccattattcttaattatactatttgatgtttcaactcacttccaatatgaaagtcttaaacataatcatattatagatattaacctgtgaataaaatgccaatcatccaactctcaaaaatataaatgggccgagaatgggctcacacagtaagggagagtaacgagagaggcttgaaggagaataaatgttacttcaccaaccggacctgccgacctctttcattctctgtttgactcactattccttcacacaaaaaagggaacatttaagtttttttacattttcattcaactttaattctgagagcatcaggtaacactgctccacaatctttcaaagattcctcctttttttgttgttctctctttttatttggcttacacgtccgcttgacctcacccacatgcccctgcctcacatcaaaccatctttatttcgtaatagctaaatcttagacaggcaaaatctatcaaattttagaaagtactattcaaaattaatactctctcatgttactaccatacttgctgattataataactgtaaactataacaaagatggtaaacccaaatctatatttatgattgattaattattttaaagtatatattgatgattttttctttataaattatcatgattgccgtatcgtataattaatagatttgagtggtattgtgaagagctactacagctaaggaagtagacaacacctaacgtagtaaattaaaacattaacgtttctcttttagtccctttttttttgttaatcgttttcataatattctgctaattaaatttcgattgggggtaccaatcaaaaagcaaacaccgcctttcaggtcactgggacagacaataaaaaaacctttttcgtttatgttccatgtctgaaattaaaacattttcaagtctcgtgtatttcagattctccatcttagttcttgtaacctctccctcttcttctccaaattccacctgagagaagagaacttattccacccaaaaagcaataatatatagtaccgtactttgattttttcgataatctgttgattgaagttaagccaaaactcagctctgttcttattcttcttcaaacccaagtttcccacttcactgattctttcatcttagctcgttttaaccacaaagttcagttcttttttggtgtgtttctttttcgttattggcttttgccttttttgggtatagggtgtttacgatttatctctcggttccgatgttgttcaaaggtgtttttgctgtctttttcgtaatcactttgttgtacgcaagtttgttaattgaagttgaagggattggtgtgaactggggctcacaggcgaggcatcccctacctccggctacggtggtgaggcttctccgagaaaacggtatccaaaaggtgaaacttttcgaggccgactctgcgattctcaaagctttaagtcggacagggattcaagttatggtcggaatccctaacgacttgcttgctcctttagccggtagcgttgcagccgctgagagatgggtctctcagaatgtatctgctcatgtctcctctaatggcgtcgatatcaggtttgtgcttatatctcattgaaacaacatgttctctttgtttgttttgatcaagagctttggaagaaatgattttagaacccaaagttccagtctttagattttgatctaaagcaaagagattgaagttagttggtttgtgtttgaatttaggtatgtggcagttgggaatgagccttttctaaaagcattcaatggaacatttgagggtataactctacctgctcttcagaatatacaatcagctatcatcaaagctggtttagcgactcaggtgaaagtcacagtgcctcttaacgcagatgtgtaccaaagtgcgtctaatctcccttcggatggagatttcaggcctgaaatccgtgatctcatgttgaacattgttaagtttctgagtgataacggagcaccattcactatcaacatttaccctttcatcagtctctacaacgacccgaatttccctgtggagtttgctttctttgatggaactggtactccgataaacgacaatggaagaatctacgacaatgttcttgatgcaaactacgatacacttgtgtggtcgttgcagaagaatgggtttgggaatttgactattattgttggggaagttgggtggccaacagatggagataagaacgcaaacttgatgtatgccaggcggtataatcaaggttttatgaaccgtcaaaaggctaataaaggaacacctatgagacctggggcaatggatgcttacttgtttggtcttatcgatgaagatgccaaaagcattcagcctggaaactttgaaagacactgggggatattttatattgatggacagcctaagtatcagctcagtcttggcagtggtaacgggctgatccctgcaaaggatgttcattatttggctaagaaatggtgtattcttgcgccaaatgctaatcttcaggatcctcagttgggaccaagcgtgagctacgcttgtgatcatgctgattgcaccagtcttggttatggctcctcttgtggtaacctgaatctagcacagaatgtttcgtatgcgttcaatagctattaccaggtaagtaatcagctcgacagtgcgtgtaagttcccgggtctctctatagtcagtactagggatccttctgttgggagttgcaaattcaagataatgatcaagtcagaagatgctagtgaagcaagtgccatgatgcctataacacgatcaacggcagtgctgctacttctctccatctgtctgtatattgttctgtgaatactgaagaaaatttgatgggtttgattatttctttttttccttttttcttttgcaaaacttttggtgtttatggagaaacagaaactacagtgagatttatgtattacttggtttgatctcttatttctcgagagcagtttggtgttcactgtctctcttatacctctcttgttagtaatcagaaaatgataaaaatctcatctttcactttagctgttaaagcccaacccgaagtttcaaacattacaccttatattagttaagcaggtttgctgcaaaagaggaatccatgaggcttcactgctgtgaatctgtccaccattaacagtctcttaagattgagaaacgattgtgctgtcttagagcatgagaaacgagttacagctgaaccaaaagaaataccaaacccaaagctatagaattgtttgtcgagaaccccaaaatctcccaatatacagtgcccaaacaaccaaattaccagttgcctagcctttctatttacacttgtttaaggtatgtatggaaaggaaattccaatgtatcggatataacatgattaccttggttagcttgcaatcttcaagtcagtgagataaatgaaggagataattggggcggatcttcagtgcctgaatctgtccatttaacaatctttggtaaagactttggagagtttctatgtaatgtggaatagtgttcttggttgcttgagggattaaggttcagtctggtagacaaaaaaggaagcaaagagacatgtgagccagtacgaaaaaatatgacaatggttagaaatggcggagaaaacatcagaagttacctgatccggtggtcgcactgccagttctttaaaagactcagtttgatgcttctggagatatgctcttgatctaatatctgcctgcatatagtaaactgtatacttaacgactcttacttttcacttttcacatatctacaggataactttctgtttgttggtaaatgcatcacttacctgtctaataggttctggaacacggtacttgcaggttatcttgacaacttcaacggcagagtccagtgatatgcgatggccaaccgatacatatatgggctttagagaactcagagttggcctaaatccctgttgaacgtaatatgtaaaacttgatcattaaattcactatcttacacaagattatcaaaaccacaactatggagaagtttcgttgctaaaactgataagtcactactaatataacgcggtattaccaaagagacacaacaactacagtagatgttcagtcaaagtcacttactactccccatgtaattccagagtttcctaccaaagtgatagtttgctcatgctcgtttatttggagctgaagcgactgtttaacctcagattgattcagaccatccacatgatgcagctgaaaatgttacaacatcataaattccacattaacgatcagatggaaaatgcaaggcaaaacaaaaataacatcacaaatttcagagcttgagattctgaagaccgtacattctttccgaccccaatggttggtaggtgagcaagaacacctaaatgacacgccaagccaaatcctatagaagacaattacatctaacaccataattacagagcttgaaatgcaactacaaaacaaaggtaaagttgtgtgtttatacctcgtggatgaagtattccatttccatccaccatcagtacctttgcaagagcaaagcaagagacttttagaagaaaaaaaatcaacgcaaaagcaatggtttaagagtagccaattgcaaactaaagcaacttatagataaaactgaaacctgaggatagaatggatgcttctcatctctcatcttctgcagaatctgcaaaagaaccggagcctgtaacatgaaaaatccaattttgggatctgagatactttagtgaagcaaatgaatttagcagagcattgctcggggacacgaagtagtaggagaaggaaacctcacgaaaggcaagaaatccagggacataaggaacatggaggcggagaagagagaagtcatggtggactacacggagagaaggaagctcaagaacgacgagacaagcgcatgcgacggaagaatcttctttgcaaaagctcatgtctacacctccaacatacttaagtatctccgatccctgagacagttccgttgatgaagataacttccatgtgaagtcatcgtacgcgatcagtttcttcttcagctcatcctgctctctgaaagaagtcaaacaaatcatcaaccgatttgattgtgcggaatgaaactgaaatcaaatgtgaaactactctgtccacttctcgagctgatctccagaagaagaagactcgcttgaagctccttcactatccatttccagaaaaagttcagtcgccggagaggaagttcctaatcggaacaattgaaaacgacgtcgtagttattgacagtaaaactatgggcctttaaaaggcccattattaaaaaaaactatgggttagggtttgtttagtgaaagaaacgggtcgggtcatattttagtatgagtcggttcagctttgtcgtctccatctaccaccctccttgttctgctgcgtttcttactctacaactataagctcttttttcgttttccctttcaataatttctttttctttttccgtgatcccaacgtttgaattgatcgccgtttctgggtttttcttttaaaagagaggtattcatcatggacgggcaagagcatgccgaggtccctaattcgatggttgaggatgaccaatcagttgttgcggcggaggcgattgcagagttggcgaattcaaccggcgaacctaatcctgaagaaggagaagaacagagtgttgaagacgagcttatagcgaaggcgcagaagcttatggaagatattacttccgttgccaataaccctaatcctaatatccttcacgctcttagtcagcttctcgaatctcaggagtctctgtatgttcctttctagctcaacaatcagtctctcttcttgattttcttttgtagttgtctttagttttgacgcttacttgtattcgcaggttcttagaggagaatgggcatttctccaatgctcgtggtagtcataacagtggcaagctgtgtattctcatccgagtaagtttatttaaaaaaagattgttcttttttctcttgtgtgggttctttcttcttattttgttacttgatttttggcaggaaaacgatgagttttttgaattgatatcgtcgacttttctatctgagaattcttactcaaccgcagtaaaggcagcctctgcaaggttgctaatgaactgttcgcttacgtggatggtaaattttttactactttctttctctttacccttaattggatgtcttgtttgttgactcatgacgcaatttttcttttttttcagtatcctcatgttttcgacgatgctgtaacggaaaactttaaaaattgggttatggaagaggcagtcaagtttcctggtgaagactctgccaagaaggaagcctcagattttgaaatgttaaaaacttattctacaggacttcttgctctctctctggcgaggtattgattaaacattctcaacttgttgtctcttcttcccatttttgcaacgcccacagctgaaattgtaacattttctttttgtgtgactcatgtaagtcgtgggcaaatagttgaagacgttttgacatcaggactatctgctaagcttatgcattatcttcgagtacgagttcttaaagagccaagcacaagccgtatacacacaactgagactaagcacgtctccttaaaaaccaaagaagaaggtcgaagtagggtgcgtaagattgtggatacagttgaaggtgaccatgttcttgagacggactccggaagagagatgggacaaactgatgtacagcctgatggcgaattcgaaatcgatggcagagatgtatttaatgtttcaggtgttgttgattgtaaaattaaacctggagatgacaatagtgttagagatgacccttcaagacacagactgaaccgatcaaaatcaagggggagaggaagggttcacgaaggtgcacctgatacagaagttctcttggcatctcctagattaggtcgtctacttgtcagagatagggatctatcaaaaatttcagatggcagaaatgcagaagacgtgaccgtatgtcttgggaaaatgaagtctggtattatggagatagaaagagaggataacgatgagtgctttcaaggttgcataataggaactaaaaacataactgatctagtaaagagagccgttggagctgctgaaaccgaagctagagctgcccatgctcctgatgacgcagctaaagcagctggcgatgctgctgcagagcttgttaaaactgctgctttggaggtatgtttttctttttttgcttagctgttagtgatttcatttccctaatgaaacggtggattagggtgacctgatatttatattgattgtcttttcttttaaattatccaggaattcaagtcttctggcagtgaagaagctgctgtgtctgctgctactcgagcagctattacagtcatagatgccgcagaggtttcaaggttggtcatgctatgatgtcgtggatattatcgttgctgtttatcaattatttatctctgagttgtttagggctttaactctgctatttggttggtggcagaaatcctacttgtgtcacatctgatcagacaacggatgttagtgaagtttcccttccagatatcgaatcattggctcagttacaagaaaaatattgcatccagtgccttgagatactgggagaatatgttgaggttctcgggcctgtactccatgaaaaaggtgttgatgtatgcattgtgctgctggaacgtacatcccagttagatgatcgttcgacagtgtctcctttgttacctgatgtcatgaagttaatttgcgctttggctgcgcaccggaagtttgcagcaatgtttgttgaacggcgtggcatactaaaattacttgctgttccaagggtctctgagactttttatggtctctcatcttgcttatacaccattggctctcttcaggtaataatacagcaaatttgcatgactttaacacaattttggttcaccgtcaatcgttgacttagtacaaatcctgcttcttcttaccttcaattttttttttctcagggtataatggagcgtgtctgtgcacttccattggttgtcatacatcaagttgttaaattagctatcgaacttctcgactgttcccaggatcaagccagaaaaaattcagctttattctttgctgctgcttttgtcttcagagccattttagatgcatttgatgctcaggatagtttgcagaaactccttgcaattcttaaagatgcagcctcagttagaactggtgctaatactgaccgatcagctcctgaagtcatgacgtcctcagagaagcagatggcttttcacacctgttttgctttacgccagtattttagagctcatctccttttgcttgttgattcaatccgtcctagcagaattagccggggtggtgtgccatcttcaatgaagcctaatataagggcagcctataagccccttgacatcagcaatgaagctgttgatgccatcttccttcagttacagaaggataggaggttgggtccgacctttgtgaaagctcagtggcctgctgtcaataattttttggcctcctctggacatgttaccatgttggaactttgtcaggtaatgtagcattttactccacatgtacattgttttgtctaccatcttttaacattatgttcacatgcgcagactccaccagtagatcgttatctgcatgatcttcttcagtatgcttttggggttcttcacatagttacatcaatacctgatggccgcaaagcaattgcacatgccacactcagcaacaatcgtgctggcattgctgtcattctggatgcagcaaatatttccaacagcatagtagaccctgaggtcagtagtccgcttctatccattattcacatgggttttgtctttcttcttctgcttctcattgatacttacctccttcatgttttctttattgaagatcatccagcctgcactaaatgtcctaatcaatctggtgtgcccaccaccatcattaagcaataagccgccccttgcacaaaatcatcaacctgttcctggccaagccactacccgtccctctactgatgttgctgtaggtactcagtccactggtaatgctccgcaaactcctgttgcaccagcatcttcaggtttggttggggatcggagaattttcttaggagcaggaactggttctgctggccttgctgctaagttggagcaggtttatcgtcaagcccgtgaagctgttcgtgggaatgatggtataaaaattcttttaaaacttcttcagcccagaatatatgtaaatcctcctgctaccccagattgtctacgagcgctagcttgcagggtacttcttggtctggctagagatgatacaattgcacaaatactgactaaacttgaggtagaatagcaattttctttccccgtttatatattgtgaagttgagcaggcatcgttggtgatatatattgacttcccaagcattattctaggttggtaagagtttatcagaactaattcgggattcaggtggtcagtcaagtggcacagatcaggggagatggcaggctgaacttgctcaggtggcgcttgagctaataggggtaatcatctgaaattgatttaattttcttgtttaatgtgtttatatggggttctttttgtatgcttcattagtgataagtgtttttttcattctttgtttttctgttgaagttttgcggatatttttaattgtgttttatatgtgtttgtagattgtgacaaattcagggcatgcaactacactaacagccagtgatgctgctactccaacactgaggcgcattgaaagagctgccattgcagcagcaacgcctataacttatgattctaaggagcttttactgcttatccatgagcatctccaggcatcaggtcttggtgatacagcttcagcactgttaaaagaggctcaattaactcctctaccttcatcggcttccccttcttctattgcatattccactacacaggagatgtctacgccgctagctcaggaacaatggccctctggccgtgctaacagtggatttttcaccagcaaacccaaggtctgtgcacatgacgaagatccaaattctagatctaatgcagctctatctgccaagaagaagcatttggcttcctcgacactggagatgcccacaccagtagcacagcaacaatggccatcaggccgtgctaactgtggtttttgtcccagcatacccaaaatcaatgcacgtgatgaagatcctagttcgagaggtaacgcagctccatctgcaaagaagaaacagttgactttctcacccagttttagttcgcagtcaagaaaacaatctttctcccatgacgctctacctcagtctacacagagaataaattgttgttcgaattcagatcctgctttggcagatacatcagaaactgctgcagaattagttttgaagaacgaccttgatgccgatgctcaatttaagaccccgatttcctttccaagaaaacggaagttgtctgagcttagagactcgtcagttccgggtaaaagaatcgatttgggtgagcgaaggaattcaacctttgcggatggctcaggtttgcaaacaccagcttcagctttagatgccaaccaatctgggagttccagactgggccaaatgacacctgcttctcagctacggcttccaagtgatccccagccttcaaatccagaacggttatcactagactcccttgtggttcagtatctaaagcaccaacacaggcagtgtctggctccaatcacaactcttccccctgtgtctctcctacatccacatgtctgtcctgaacctaaacggttacttgaagctccactaaacatgactggccgtcttgggacccgtgagcttcaaagtttctacagtggagtccatgggaatcgcagggatcgtcagtttgttttcagcagattcaaatcttggagatctttccgggatgagactgctctctttacatgcattgcacttcttggcggtactaatcatatagcagtcggtagtcatgctggagaaatcaagatatttgaagctagcagcggtagcatgcttgagagtgtctcaggtcaccaggctccggttacacttgttcagccgtatgtctctcgtgatactcagttgttactttcttcgagctccagtgatgtacagttgtgggacgcgtcttctataactggtgggcctagacactcctttgatggatgcaaggctgcaaaattcagcaactctgggctacaatttgcagcgctttcttgtgaagcatctagaaaagatgttcttctatatgacgtacagacctgcagcccttgccaaaaactcactgacacagtcacatcctctcgaagtaatccctattctcttgtgcacttcagcccttgcgatacactgattttgtggaatggtgttctctgggaccgccgtatccccgagaaggtcagacggtttgatcaatttactgattatggcggaggtgggtttcatccttctaggaacgaggtaatggataaatcatattactttttaatctaaattatgtgataataccaaagctatgaaattgtcattcctattctagttgaccaaaccctagaacaatccactcccttaaacagtcgaagacagctttataaaagtccctcactaactgctccagaaccatttcacaacaacttcagatattctacattaactcctcggctacaatatagataaaaagttactcactgtttcttggcttttcaacatgttacttattacaggtgatcataaactcagagatctgggacatgaggactttcaaacttcttcggagtgtaccatcactggaccagacagctattacgttcaactctaggggagatgttatatacgcaatgctgaggagaaacatcgaggacgttatgtcagcggttcacacacgccgtgtgaaacatcccttgtttgctgctttccgcactcttgatgcgatcaactactcagacattgccactatacctgtagaccggtgtcttcttgactttgccacagaaccaacagattcgttccttgggctgatcacaatggaagaccaagaagatatgttttcctcggccaggatgtatgagattggtagaaggagaccaacagatgatgactcggatcccgatgatgatgatgagacggaagatgaagatgaagatgatgaagaagaagatgacctggaccgaattctgggactagctggagacaatagcgatagtggggatgatgaccttagcagcgaggacaatgaagatagtgtgagcgattttgatgaagaagcagatattctcattgacggtgactttatggaggagcttatagaaggtgaaaatgaagacgatggtaatggtgaggatgaggatgatgatgacgacggtgagatgcaggatttcatgagcagtggggaagaggatgattatagagacaacattcgttcttcctaagtttttttttgttttataaattttatttacttctgggctctctacagatcactaagatggatttttactatccaaaattttgatgataagttcttgtattattttttctttgttcaagttccatgtctctttgattatcagtaatcatgatttctcttgtcccacatcataagagaatccattgatgcacagaatttagaagagaccatggtgatgaagataatgaacgtagagttctgaaaggagaaaagtatgcatcatcaaattcaaggaaaactaaaccaaacacttgagacaatcaccgtacatctaattttttcgttgttctttcttaatacaaaaatctagaaaatcagtagtctaaaatggttgggttacttctcctatcttgagaaaagagatacaatcggatatatatatatagatagatagatacacacacaaacttacatatatctaaagcccttcttgctttctctctctctctctctgtttttttcttttatgttctcttctttgttcattcctcttcttctcctctctctttcttcacaacagattagtcgactgtcattggttgcgtcatgcaacatctgaaacgggcttttctcacattcgtcattatctcagtttccgccgcctccagaagattgacaatctctgcaaaacaaggacggacttcagggtccgcatcccagcaacgtgtcatgatctctccaagcacaggaagacaatctgctgggactgttggacggactcctctgttcaccactgcaaatgcagcctgaaccgccgtcatgttctggaacggtaacagacctgtaatcaactcccacagcacgattccaaaactatacacgtccactttttgagtgtagggtctgtgctggatcatctctctgcatcgatcaaaataagggaatatagtgtctaaatatgacttgcagagatatataaggttattaaggacaagacaaggatggaaaacgagatatttattcaacttacggtgccatccatctgtaagttccagtctctggtgtcatcccttcggtttgaacttcaattcttgcaacaccaaaatcagcaatcttgatggaccgatcagctgatatgaggaggttatctgactttagatcccggtgtataaagttgcgctcatggacgtaagccatacccctggcaacatccaacgcctgcataacagctaacttcaaaggcacagctcggttttgtctcttagtcagaaactgtctgacagaccctccttttgcatattcagtcacgatgcaccacaccatcggtttaatgcacgcaccaataaacctaacgatgttaggatgcttcaaaaatgcaagcatagaaacttcctgctgaaactgctgttcgagggcttgtgccttttcagggttgctatctgacctctcgagtagcttaatggctacatcttctccgttgtaagtccctctgtataactttccaaaagccccttgagcaaaagcaggacccatatgtagtttcctcagatctattgtccactcttcatagttcaccagtccctcggttggatacttactatccatcaacgcttgtgctaaggcatcatcgttaagtgcatgagtaacttttcctggccgaaatacgctttggccatccgagagagagtagggatggcgcataggcttcaaaccaggatggccaataagagcatcactcgaaccaacgctactgttatcgacagacattgacacagaccctccagcattacttgtctgcatactgtcaacagacatgtttgtaccttcttccccgagcttttgataaaagtcttgggtgaaggcatagtaattgttgtcgttgttgtgattgccaacagcgtgcaaatcgaactttggattctcaagcatcctttccaatctcgtgttgagtgtaatgtataatgtctgaccgagctgcaagtcacatgtaaatcgctttcaatcacttcaacatgcacctaaagcaaatatagaccatagtaaaggaaacaaaagaaaggatatgagaaatcactattatcaaaatggtattttctttcattgaagtaactgcaaatacaaagaacttacctttaagagcaaatcaagaagctagaagaaatgaaagtttatgtttcgtgaagctctacaccgtcaacaccctaaaatagaaacatatatatacatgttagtataagaatgaaaattttcgtgaattaagctgaaatcagatgctttaataactcagctcagcttcaactaggtaaaaatagtaacttcatcattgaattccataattttatttcaaagaaaacaaagaaaaatgagaggtcatatgagaaaactcgtggatgaaaaaaataaaatcatcatttcccacaaaacccaaaaaagtagacacagatccgataattccataatgagataagctaaagcaagaactcatagattacctagagcttcacaaaacacaaaaacacttgatatgacatgaaaagaaacacgcaaaccttgccttggtgtactggataagtaaaacgatcgaaaagagaaaaactctgaatccgatcgacaaaatcaatacccacaaagtaataagatcataacccacaagcttacttctgatcaaatttcagtgctaagaacctaaacaagaggtggaggaggaggaggaagaagagtcagtcgtcgcttcccatttactctttttttccagactccgattttctctcttttttttttttattattaatttgttttttttgggatttttatttaattttggtccgtcctttgctggcaaattcgtttttttattaattgggacagcttccgagcaatactctctccgatagaaagtgtctcacacgcgctctaccattccgagcaatacacattttaaccctaatttttttattaattgggacagcttcagagcaatactttcatggccgtcgctgctaaggtcatcatccccactatcgctattgtctccagctagtcccagaattcgatccaggtcatcttcgtcttcatcatcttcatcttcatcttcatcttccgtctcatcatcatcatcgggatccgagtcatcatctgttgctccttctcataggggtaaggtcttcttctttctcctttcttaatcgttttttttgtttaatagtttgttttgttgtttgctcgctaagatctacctctgttgttttatctatgattttgtgctttgcttacggttactctgttgtgtatgtgtattgattttgagcattataggattatggtttaatctaaactttaaaattagagaatatcgattgtttatcttggttttgtactttgtttactgttcttgtgttatgtctgtgtatctattttgagcattatagagttagggtttacttataaactttaaataatcgattatttattttggttttgtaatttgtttaagtatctcttttgttgtgtcttagtgttatgattcttttgctaacataaactgtttgtgactttgtttatgttcctgattgtatgaggcggcgcgttgtagcttctggttcacgctttctatttttcttttcgtttctctaaataacctccaattcttaagtattggggtcaaaacgaattaaataaatattaaaggggcctttttgaatttatctagtttttataacctacttacataaaacctagtgtttcgtttcagtggactgactattcattcattctcatcatgtcgtcggaatctgaaatcccgccgttgtcgtcatcaaccgccgcagcggaggaatctggagagaagaccagcaagaaagcggctaagaaggaagctgccaagctagagaagttaagacgtcgtcaagaacaagaggaagcaacgcgtcgaacagcttcgatctctctggaagagaatgacgagttttccaataactacggcgacgtgactcttaccgagttgcaatcgtcggcggatccgaaagccgggaagtggatagaggctgttgagggaaaggagtggaccgatgtgagcgatttggtggaagagatgttggaatcagaggttctgatcagaggccgagtgcacacgaatcgtccaacgtctaacaaattggggtttgtggtcttgagggagagcggatcaactgttcagtgcgtggttagccaatcagagaagaccaaagtaggtgccaacatggttaaatacctcaagcagctgagtcgcgaatcctttgtcgatgttatcggtgtcgtcactctccccaaggagccgctgacgggaactacgcagcaggtttagtttccttgtcttcttcttctcctccagatttctcgtttgctttaactcatgtttgtgtgtgtatcgataattttaattgtaggttgaaattcaagtgagaaaagtgtactgcatcaacaaatccttggccaaattaccacttagtgtggaggatgctgctcggagtgaagcagatatcgaagcatctcttcaggtatagtttgctgtttcaagatttggagattttgttggacctggtacaattgtgctgtgaattctgataacttgtgttcttctgatactattatggtggtcaatctgttcataggagttgttgttttcatgactgttgcagactccatctccagctgctcgtgtcaatcaggatacacgtttgaactatagggtgctcgacctcagaacaccggctaatcaagccatcttccagcttcagtacgaagtcgaatatgtaaggccttgattgatcttttgtgttactgtttcgatatctgttagtgatagatatgagcctggtttggtaaaatatttgtgtatgcatcatgtcttggataggatagtcactacagaaatgtgttatcggtagtatttttctatctttccatgatttggttgcttttttatatgttgatttactgaattagctgtcacttttgtaggccttcagagaaaaattacgatttaagaattttgttggaatccacacaccaaaactgatggctggtagtagtgaaggaggttctgctgtatttaggttggaatacaaagggcaacctgcttgtctagctcagtctcctcagctccacaagcaaatggcaatatgtggtgacttgcgacgtgtctttgaggtaggtcctgttttcagggccgaagactccttcactcatagacacctgtgtgaattcgttggtcttgatgtggagatggagattcggaaacactattctgaggtacgattgtgatgttaaaattatcaatttatcccaagaatcttctgttctgctagtagttataatatctcttggttgtgcagataatggatcttgtggacgagttatttgtgtttatattcactagtttgaatgagaggtgcaaaaaagaactgcaagctgttggaaagcaatacccatttgaacctttgaaggtaaccatatgcagtgtgaacaaggagtattggaaactgagttttatcttaattggattctgataatcggcacttaattgcagtttctaccaaaaacattgaggttaacgtttgaagaaggggttcaaatgcttaaggtatggcttgtatatttggcgttttagctgaggttttcgaaagtactatcaataataattgtaatcttgatgtgttgacaggaagctggtgtggaggttgatcctcttggcgatctaaacactgaatctgagagaaaactaggccagcttgtattggaaaagtaatccaccacttctttctacctgatcgatattcttttcattttcaaattgatttagttctgcatctcattgttacaaagttgttctaacattattgcgttgttgattttcgatgataaaaacaggtacaacactgagttctatattctgcatcggtatcctaaggcagttaggcctttctacacaatgacttgtgccgataatcctctttacagcaactcttttgatgtcttcatcagaggtacatctttgagtgattcttttttaccttgtgtgttcacaccaattatgctactgcacatttgatactaagtttacgtgttctgtcctaggtgaggagatcatatcaggagctcaacgtgtccatatcccagaagtcttggagcaacgtgcaggagaatgtggcattgatgtcaagacaatatccacatacattgattcattcaggtaaattactaactggactagctcggttccttttacttgcttatctgagttgttctctaagcagagcattgctacatatatgttgacaggtacggtgcgcctctacacggtggatttggagtggggctggagcgagtggtcatgcttttctgtgcactgaacaacattcggaaaacatccctcttccctcgtgaccctcaaaggctttcaccctaatatcttttcaactgaaagctatttagtgaataattgtccaactccacaaatttttctcatgaagcttttagagatttttacttcttgttgtctaactctcctccttttttataagtgaatcttggtttttgttttgtgatgtttatgtttcattcacactaatttgagtcttttaattgcttatgaaacaattcggctagaaattttaaggacaaaatattaatttgaaaacataatgttgatatgttctaaatataacgctaaagcgttaatccaacgtatatagagactatatctatggttgctgtgatcactgatcatatttccatagataatcttggagtgcgaaatttgttacattaacaactatggactagaaggctgactctaaacagactgaactagccattagaagatgagaactggaactgaatctcatctggttgtagctcttgcactcatggatgtgtgataattcgtacttctgtatttcctgtaagacgtataaacattatcgtactgagttggttcgttgggatcagctgtaagacacaccactaaagagtaaggcacaccactaccgatctgcatctttctgactatcccagggatcaaaccaggaggaaagagaggataaggaggcggcttctcaccagcaggtggttgggttggtggtggaacagaagcgttaagcggtatggaaccgggaaaggcaccaggaggcatcacatttgggataaactgttgggttgcgaccggattcagatgctctaaattcattgtgctagagctgtttgttggctgttgtagcattcctgcaagtgcataaagataaaaaaaaaattgttggtgtatggtcaagtctaaaccgaattcttcatatacataggtggagtaatagtttttgtctctctcacggaattaggattcttattttcagttgcaaattaaaacaatcctagaagctttttacatggatt

SEQ ID NO: 1391 - DNA, 52094 bp, Arabidopsis thaliana
gattggaaatacaataacacacaatcaaaagaaagtattgatgtgggtatatacaactgtcaacatattttcgtgtattcgttctcttagattccagtttgatgaattcaaaatctcctataatgtgttattgaacaagttatccaaaccacagatggtgacaccgacatcaccaaccaagctctgaaatcagttagggaaaaaggtaaaagagactgaaaaaccatctcccatattacgaccctaatttatctgttagacatattattaaatcactagtatattttctctatcaatggttgctacactacttaatcttggtcgctagaaaaattggcgtgtataaacatgtaaatggtcaattatttgagacatagcttttcatgtttctgaagattttgttttttcctttggtctcgttcgtgtgaagagacatattcgctttcctctccttcgctctagttcttccatctcatgtcacagctttttcaagtcttactggttttgtattttcttttgtcgactagtcagtcagtaatattatactttttactacgaatagacatacttaaatataataccttataatatggtggcagggtgtaataattgaatcacgtgagcccttggttggtcacggttcggaaacgtgttacgcggttcgtgaatcgtagtcaaaaaggggtccaagctgtcgagaacacgaacagtataggctatactgtatagcttagctagacagctggattattttgttccgtacgacttatttttgttcttcttcaacatttgtcgacttcttcactctctctctttatacttgtactataatagtattttaattcggaattaattgtggcatttattaaaatccattcaatattttgggctgttgatatctgattccagctcataaactattagtgggtgggatcggagaaggaaccaacaaaaaaaaaaagttgacgccgacaaatagaaaatctagagaaaaatttgtgcgagtttggaggtcctagaggaggaagatataaagaattgtgcgtaagggacaaatatatacaagtggttattccgtgttaagacgatttcaattgataagcaatactttctttcttttttttgtcatagaagaatcatatcatatatcaaaacttcgtaacacatccacacacacatcaaaaaagagagattgagtgcatctgttatctgtattggctaagatatttaagaattaagtgaagcccttattatagccaataagccatataacattcgtgcatggtatataagatatcgcgcatattaattgattcatagtacatacaactttgttaagaattttctattgatttgataagctacagtgcgtattcagcctttatccgttcttatgagtttcttactacattctgaaaaagtaaacagttctgcaaatatagaaaagatgaacttcaaatcttttttagaaagctaaaaaaaaaaaaaaactaaacttgaaaagtccgagttatcactatttgagattgtcgacattattgatgatgtagtaatggaacaactttataaatatgaaagctttttgagaaccctaccaccgaaggaaatatagaaaagaaaacgacttcttcataatataattataatttttcaatagatacatttcaatgatagtatatattttgcatgataatctcaccttggatgattaatagttattaatcatcatctgtcctgacggacaaaagtatgtaaaaaaaaaaacatgtcgcgagtatatgcaattatttttataaaattattatatacattaatttcagtttgcatagtcattaaaatgagacaacaaaggaaactaggtacattagaataagtttacatagtactattaaaaaaaaaaataactctactagttgactttagattgttcgtgttatcataaatgtaggttttaggggtaatgttaatgaagtttttaaaatttattaatgaagatttaagaaaattgtacatgtcctctattttagggtttcttggaacgaattgagcggttaaagaaggcgtgatttaatgcatataaagtacgtacttgatacttggtagctagaagttagtacgccctgctcctagggttgccgacttgaccaattcatttatgtttcttgtaaaatacattttggagtaataaccaagatatttaaaacaaattctttctacttatgagttcaataaaaatccaacagaactggtgactatatgtactctaccgtagattccagtccttgcacacgttacaatgtcttacacaaatgaatgcagaaataaatatctatacgagcttgtataagtcgtcacatcaaaaaaataagaagaagcaaaagattagaaaaacatcatctcgtgtttcgcgttagaaaatgaaaaacgaaaagatactttaaaattgtagttaacattatacacaccaacctcgtagataatctatataacctatgggccctctggtctgtttccaccacgtataccgtatacgagagtatgtatataatgtaatgttaaaatcttaaattgatttcataaatcatagagagagagagagagagagagagagagtttggaaacattccaaaaccagaactcgatattatttcaccaaagaatgatagaaacaagaactatctttttataaaactctttacaccccaaaagaaaatgtctcactcgttttgccttataatatttctttcaacaacaacccaaatctacaaaaaatcccaataaaaaaaaacttcagtctgtttgacattttgtcgaacacttggacggcatcacaaaaagctctaaactttctgactaccaatggcggattcgtcttccgacaaggagaagaaggaaaataataagcagcccgtgtatcgtggagtccgtatgaggagctggggaaaatgggtatcggagattcgcgaaccgaggaagaaatcgagaatctggctcgggacttttccgacggcggagatggctatgcgtgctcacgacgtggcggctatgagtatcaaaggaacttcagccattctcaatttccctgagctctctaaacttcttccccgacccgtttcgctcagccctcgtgacgtcagagctgcggcgaccaaagctgctctcatggacttcgatacgacggcgtttcgttcggatactgagactagcgaaacgacgacgtcgaataaaatgtcagagagtagtgagagtaacgaaacggtgtcgttctcatcgtcgtcttggtcctctgttacgagcattgaggaaagtacagtctccgacgatcttgacgagatcgtaaagttaccgagtctaggaacgagcctaaacgagtcgaacgagttcgtgatatttgactcgttggaggatttggtgtacatgcctcggtggttaagcggtacggaagaagaagtttttacgtataataacaatgattcttcgttgaattactcatcagttttcgaatcttggaaacattttccctgagaaaagaaagaagccatattttctctctctttttcgccatttttggttttaagttttttgatgggattctctctgtttttgctatgcgtgagatatctctctttgtggaatagataacttttctgttgaaaatctcctaagtctgtgaaatgaacgacgatggaaatgtaagtgtgtatattagcccgaaataatgactgtatacattcttttttgcaagatcattagaaaaaaataaataggaaatgtggtttgtattagagtatagaattgattaagatcggtttagatcatcaatatcggtttaatgtctgtgaaccagaaccctctcattgtataagaggcttcaatgtaatatttcctaagcaagataatgagaatgatcgtttgttttttttgccccctaacaaacttttttttattccgttaattgtctaacagtttgtgttgacgcaatgccccaaaatatgtagcatagtttgtactaatgttattgctaagtcactcactatccaggttcagattcagttaagtatgcatgtgtgaattgttggaaaactaatatataggaccggaatgtggtctcccagcttattttgatttttgacaaatacccatttcacaacaattcaaactttcacatttaacaaatttcaaacaagtacttgattattgatgcatcatttaaattttaaagcttctacagagataatatactatgctcatagttaaatacaactagaaaatatctaatgtgtactacaacaaggaattaaataatttttgaatgctaatcttaatcaaatactagtagaagacatatatttctcgattaatcaaatatcttgctactccaaagaaatcagagcacttgacagagtaattcattaactctgtccagtaagcctcttttactcgagggattgtgattctatggcaacacttattaacaaccttgtttattacaacactttatttaccttgttttgcaatccatttgcaacaatttatatggaaagtttttgtccgttcatcttatctataacaaaggtagctaatcagtatgtaataattgccaatctgtctagttattctttaatccatgcctttgatctctaaactattttattaagagagagagatttgataaataaattggtgtcgtatggtttagagaaataactgtatcatgtaagctgatcacgctgacagtgaatttataaaggaaagagacgttttacgttttgttttaatcgttccatgaaattgcgaagggcaaggtccacgtatatatttatttgctttgtggaaggcataattctgcttttaagttgtctccatggaaagaaaaaaaaatattcactttgaaaaaacaaaaagaaaaagaagatatggacagaagtgaagacatattttgattggttcaattatcgctctctagtctcattgttctattcccaactacacatatcaatactatttgtttcatttcctgtcctctaaaaagaaagcaaggacgaatcattggccgatgatagtactgatcaagatatgagtaggaccttaaatccaccgtttaagtagactaaacattttaagtgtgcgtctaagattttaacggatccacatatataaatctgttggatccaattacatttgttattttgatcattcacagtgatttatcttactattagtcggatcgtagctactgtatgctaacaattggcatacataaaaaaaaaaaaaaaaaaggcattgatgcaaatgaagagggaatctcttagaaacccggtggtaaacagtagtttgttctttaatttcaaaattagtactcaaatacatgtgtttagcagatcatttaacatgtcaaatttgaaactagaaaatctttaatttgtaatggaccattctcttgtagtatattaaatcttaaatgcaccgtccaaaaaaaacacaacacaaacccttaaatgcatgcaagtcatgtctattgacaaatgggagagtatatgtgaaagtttaaaaagaagaagaagcttacttacaagtctacatcaaaattcacaagtggtgaaatcaagagctgggatacacgcatcatatttaagtttagaatccatataattcacaagtgggttttcttattgggttatgatcagattagtcgcataaaatctcttcgcatgaattattgcgtttaactttccagcaacactttttagtgaaatcctattcactttatgtttctataattctattcactgacagcgaaatcctaacaagactggctccatgtgtatttagtgagtttttccatatttcaactgttgtgtgtcggtgttatttttgttttgttttatgctatcatagcttggtgaattcttattttcaagacgttgttatgtcgcattacgattagtgtcttcaagtatcagaagagtttgaaataatccagttttttctcaaagttgaaatgatacctatatattcatggtatataatatattgtgaaaaaaagaaaatattttgaagcaaatgaatgcgatgttccttcgactagaatccctcctagcagccagaagacaatgtgttctctgcttcggttggctcagtttgtaataaaagacccaccgatgggcttgggcttgggcttattggatcacggcataagtataatttatgtttgcaatactaagtactaaccacttcattgattttagttcataacatgctccatcacgcatctaccttttgatgatatggcttctgcacagcaacttgaaaattattatattactatacctaacgggctttaccgccccatatccacatgcgttctttagatcggagcacaaacccaaattatattatagtaacatgatcatactgcttatggatatcaatctatggcgtatatatgcccacatggaccatggtgaaaaaagaaatatcgaaagcaaagatcagcagattgagccgtagtccaaaatccttcacctaatttgtagaaattattatatcgaagataaaaagtttcgcatcctttttgagaaagaatttaatctaatagtattacacataggaaacagtttcttggtatcagattaaaaagttggaaagatttcttagcgtgaaataattcgtatattgtataccacatctcataaaatgctgttaataagtttcatcttaattgcaaaaataaataatactattagattaaattggtggtcggaaatccctttgttgtcttgtagtcggtgaacagattgatggactctgttttcttctagttttggagatttctatttttgtttccgtaaaaccgttaggatttgggatcgatggttttgcttctgggatggtcttactctttcctataatacatgatcattcgaaatacgagagttgaccaacggaaacaaatagtacaaaatgaatcagttcatataatatcttcaataatatccctaaggcgcaccagttgaactattaattgaattttgcagtcttaggaatgataattaaagaacttccagcaaagatgcaacttcctacgacattcacctaacaccaaatttaaaaatatgtagaattttaacctgtctgtttccattcatgagtatcatagtagtagtactataaattataaaataaagaaagagaaaccctagctgataaagttagtgctgtagaaataactttttactgttttagtttcatataccgacaaatttgttaaaactaataaaaacaattatgcccactaatattgttggacaatactaatatgtggaaatgagtgtgtttaactctgtacaacaaactagttacgttatttcatgattttcataaaaacacgaaatttttatttcagagttttcgtcctcgaccttatgaatacatcataaattcaaactgtactgtataagtttgttaaagagctgtatcttctgtttcctctaatgaatctctcttaatatatagataggtctttgagtatcgatcatgtaacacaaaatgcatatatattcgtttggtcaaactataaattatacctaacagatggtattgttttcttatgaaaacgtgttaaccatagagtaatcaagaataaaacaaacacattcaatatatcttttccttgtcaaaacacacttaaattttgaaactcggcgtttgtagttagtgttttttggggttaatctagattaatctcttaaatgtgagattgatatgctgatttttggagaaaatgcgatataattactttaaatattaaatatggagcttgctttgtggggaaaccctgattttgtccgccacaagtgaccaaaaaaaataaaataatgttttttgaattttaatacattgtaggaatcaattggggcatgaagggacattaagcaatttaaaaagggcgttgaatacacagaacgagttctctaaattgcatctcatctcatccagacatccaccatgacgctttagtgatggcattttagggtttagtggttcatcgataatttttgtatttcagatgttttctagttttccaatcattaaaggtagcattggaccaaaagatataaaaaacgataattaagagttgaaatttgaaaatcctgaaattccattaaactaagaaaagatgctttccctttctttattatcttcgtacattgactaaacatattcgatatagtgactgtgactcatgtgttctatcacattgcatcagcaatataattatataaacatttaaacttgacaacgaatatctgtcaatctatgtgctggattagttcgattaattgacattgtttcaaaaaagcgcacaaagtgtaataagtacacgataaatttaatacatattttttgtgccaaattagtaagtcgaatacctattggtacttgtatatatctttcgctgacatctgcgaactgaaattgaaaatctgaatatatatattttttgtgcacaaaaaatctgtttattcatttttaaaaaaaatgctagacactagttgactatatcactacaaataatgaaaaataaacagtaaaaccgcttaaggtgctgagttgacatatcatatatgaacatgttttcacttagaaataaaaaaaaaagaaatggaattcaccggcattttaatgaagaagggaaataaccaataatgattgaaggaagtgattattcttaagactagagacacatatcagatgagacaaacaaatgtggcaaacatatggacccaaatcgcagttttatattacaaggaatctcttgttaattagctagttgtccacggagttttgtactatataattcataattcgaatatggaaaactaatatgatatgaagatttagatacttttcattttcccttttgaacttctttccattttcccaattgggtatatggactaggaagaagaataatagaaggccatgtactcaaaccaataacatatatgtatatacaaaagggtagaattacatagcgaccaagataaataaacgttattctcttcttttctttttgaggtaaaaaaaaaatgtatatacattaataatagagaaatattccgacatacttatgaacaatcatgaaaataccttggataatatatataaaccatttcttgttgtaatattcatattaaaaatctaaatagtactattagagatattccacattttttgcaaggatatgcgtacttgataagtatatgaattttaattagaaaagtacaatttcattaaataaacaatatggtaaaattttagttttgaaaaggttaatagtattttagatatttagtaaataattgaaatgtattagtcaaaacatttgagttttctaaatggacgatgatttgaataattgtctaatactaatgtaaagatagagaaagtatcttatgcaaaaatttataaacattaaaaaaatatttgtatgagaaacttcttgtcgaggaccattatgaaaaaaaaatgtagtaactagttattatataaaagaataataggcttaatcgcatattatttaaaataaaatttcagttgacgcaaaaaaataatagaaaaatatattaaaattaataaaaaaagttctctctatattctttaaaacatatagaataatttaaaagaaaattagttgtaaataaattctctaaaaaaactaattgagaaaataaatatatgtcagtatttctatatattgacggttatcaaaatgtaagacattttactgtcatacaaatagacagacatatatgcatgacatgtttcatacaaacattctatgattgtatttatgtttttatatgtaaacgttacgtgtagaacaacgtttaagataatggtcatatcaatcaacctttaaatagatgaatcaaaggtgcttcctttgtttgaacttctaaatccacacaaaaatacaagaaaagtcaaataatgtggtctttatcatatttgtttgctccgaaaatatagtgtcacttgaacaaaactcttgacaaactggcctatactggttttttttcttaaccaatttatccgttaattttcaatgccgtattgggttcacttcgaagcatttcctgtcagtcattataatccaccaataatgtcagtttctctctctcgcccaaaaacgaacgatcgaggtgaatataaatgaaacatgtacattaattaatatatttatatcaaagttttttccggctttgaagcttgaaaatactccatatattatatacttctttgtgctaatttgtcgacgctttggccattttcatctatcatcgaggattcacaatttttggtgcgtatcgtttacatgatcgaagaaatagatatctgtaggatattatgacaatgtaaattaaatatagtttttctttagtctgttgattatctttatgcttagtttaagaaatagtgtaaacgcttaatatactcactttgcatgacccatataaacagtgtaaacgctaaaatataactcttcatcacccatattgatttaccttaaaatcacattcaccattgcgtctgatggaagtaatatttaagtatagaatacacccatatatatgtatatttattcataatattatatcaatatatattcatatatacgcgttgacaaaacagaaattcattctaacacgtacgtttatttaactttgataatgctagagtattattgacaggtataccgtgtacatggaattaatgtttttactcgctgctaataaaatgtatcttaccaccaatttaagcgaacgtatatcgtattattttaacaatagtttcagcagctgcaggtttccaacgactaatcttttaaattttggaatagcgatcatattcatcatatatcgttaataatcatgaaccaaatatgatttggtcgccaaaatctataatatcatcgttagaacttgtcgctatttttaaacctatcattaacttaacataagacaaacaagacttggttcttggttacaaccactagtgattgtaaaacgaattatcttaactatgaaagaggtatcctacaaattaaaaccgcatcaaaacttaccgtcaaacttcttttaaataattatcgtcatttacgcgtatctaaaaaatgaatatattatatcaacttgaataagaatccatcatttgtaacaagatcccttaagcgagaccctataaatacatcacatgcgtagcaccaaacattcactaaaacttcatttactttcttgaacttgtcttgtgccctctttccaatacactgaaatccacttcaaaatatttatttaataaaaagaaaagaaaagaaaaaaactctgccaggatggcttctttgatcacaaccaaagcaatgatgagtcatcatcatgttttgtcgtcaactagaatcactactctttattccgacaattccatcggcgatcaacaaataaaaacaaaacctcaagtccctcaccggttatttgctcggaggatcttcggtgtaaccagagctgtaattaattcagcggcaccgtctccgttgccggagaaagagaaggtggaaggtgagagacggtgtcatgttgcgtggacaagtgtacaacaagagaattgggagggtgaacttactgtccaaggaaagatacccacttggctggtttgtctttttatcatttttctatattgctccaaatatataacttatagctatattcgtggaaattttatacaaatatgtatcgtgcacactaaacacactcacactggcacatgcatatgtatataatacaagacaaaccccattcatcatgcattatttatagttattctatatattacgtatacatttttctttccttatacatgatttcattactaagaaagagtaagagctatttgtccaaaaaaaaaaaaaaaaaagaaagaaagagtaagagcttaggttagtacaccatgttcgtatttatatatcaatatatgcagtgagaatcagaagaaatagagaacaaaggttcagattttaataaagaagatatgctagtttccaaaaagatatatatgcacatatatattattagtctaggttatatatgttctattatttctacaagttttgttttctctattatttttacaagactacaagttctaaactggtcataggcatggttggtacttctacaagttgtactcttgaccattgcaatctaaaatcagcatacaatcatgtttcataaaatacaccaacaatcatgtaccaaaaaatctattttttttagtttttgataaattaataatatttttactaaaacaaaactccataaacaaaatcatcaaaatttttaaaaaaagaagtaaaaatgagacaagaaaactaatgatttaaaatgacatgcagaatggtacgtacctaagaaacggtcctggtctatggaacattggagaccacgatttccggcatctcttcgacggctactccacactcgtcaagcttcaattcgatggcggtcgtatattcgccgcccaccgtctccttgaatccgacgcttacaaagccgccaagaaacacaataggctttgttaccgtgaattctccgagactccaaaatcggtgatcataaacaaaaaccctttctccgggatcggagaaatcgtcaggcttttctccggagagtctttaacggacaacgccaacaccggagtgatcaaactcggtgacgggcgggtcatgtgtctgacggagactcaaaaaggatcgattttagtcgaccatgagacgctagagacgatcgggaaatttgagtacgacgacgtattgtccgatcatatgatccaatcagcgcatccgatagtgacggagacggagatgtggacgttgataccggatttggttaaaccgggttatcgggtcgtgaggatggaagccgggtcgaataaaagagaggttgtggggcgggtgaggtgtcgaagtgggtcgtggggacccggttgggtccattcgtttgcggtgacggagaattatgttgtaataccggaaatgcccctgagatattcggtgaagaatcttcttagagctgagccgacgccactttacaagttcgagtggtgtccccaagacggagcttttattcatgtcatgtccaaactcaccggagaagtcgtaagtgatacttactttatacagtcaatggtctttcaaatttttaggtttttattggttatagagttatatatatagtactatatatagtagatcatagtttatggatggtttttctttagttaactataacaacaaaataataggattcttgataatgtatatcattggaaattaaccatgtaacagaatattgtttgatggtttttttggtcatttgatttgaatatacataaaaccataacgttatatatggttaaaggtggctagcgtggaggttccagcatacgtaacgtttcacttcataaacgcgtatgaagaagataaaaatggcgatggaaaagcgacggtcatcattgcagattgttgtgaacacaacgccgatactcggatactcgatatgctccgtctcgataccctacgttcttcccatggtcacgacgttttacccgatgctaggtaatgtatataagggttactactcaatactcatcacctacatttttcagttttgattatagctggattaatgtaatcttatgttaggatcgggagattcaggataccattggacgggagcaaatacgggaaactagagacagccgtggaggcagagaagcatgggagagcgatggatatgtgcagcatcaatcctttgtatttgggtcaaaaataccgttacgtttatgcatgcggtgctcaacgaccttgtaacttccccaatgctctctccaaggtaacttacataccccaaactatcggtttccaatattcaatcgttttgaatgaaccttttgataattgtatgagacaggttgatattgtggagaagaaagtgaagaactggcacgagcatggtatgataccatctgaaccattcttcgtgcctcgacccggtgcaacccatgaggatgatggttagttaaaaattctttagatcttattggtctttcttcgacgtgagtttaatagttttggttttgtgaaggagtggtgatatcgatagtaagtgaagaaaatggaggaagctttgcaatcttgcttgatgggagctcctttgaagaaatagcaagagccaagtttccctatggccttccttatggcttgcatggttgctggatccccaaagattaactacaaagtctcaacaaagataccttcattatacaaaacacaacatatgtataattaataccctctgtgcaggttttgtaaattgttgtcccttatatatgctttttgtctatatatgtgatgtacaaaaccaaaataaaaggaacggattgtggtggatacagttattaaaaattgcactagaccgaccatttcttgcaattcaattaaattacatcatcctacgatacatcaatatacacccaactgagaaacgctatattacaatttactctattttcttgtttatttccctaggtgaaaacaaattacaacaaaatgaaaagaaaaagtcagaaaattcagacacttctcctctctgcagaaaattcaccttaggttataatggtgctgcaggtgtggagccacaactatccccacccagtgaatcgggtataatcacctgcacaaccttaggagcaggttcgggttcactggttccacctatcaattcgcaaatatgattttcagtttcatggggtttgttttagaactttagagtaagagaaaaaatgaaaacactctctcttaagattttttttcacaaggtttttcaaaacaagtccacaaggattgactatgtatccacttacgaacattcattctctgccatcaataggaaaatccacactgagtagcgtcgacatttttgctatataagatgttccgaatctttccataggattcccccaaaagtaatatcttaacaaacctttgcagaacgaccacaagcacataaacaaggagataaaagttccagatagattagagtaactaacctgattgaaccgaaggaaccactgatgaagttgaggctcctctcttcatttttggctgcgattgtcacaaacaatttctaaacgaatgagttttagcaaccttcactatctagcaacagccctaagaaaacaagtttgtaaatgaatgactgttgtagtctagcaatcgtaacctaggtgagtaagttttacaagtaggtaggtataaacgattctttgcaggtaaaagactaagactaaaataatgagcagactggtattccgtaccttggtattttcttccatatatttcacgacctgagagatgcttccacaatgtccatgaaacaacgtgtaagcccacaaaagaagcttccttgggatgcttacatcaatgacttcaactccttcattgcctggaagaagttctccagctggtgcgagtcggggcagtgcgaaatagaggttgatatcagaagggagtgtcaccgaagcagtttctcggaagaaattgtaacagcttttaagtagggaattagcgatctccaaattcccctccacaactttattaaaaatcagtacgttcttaatcttggacagaacagggcgccattttgcctcaagcatttgggattctaagggatcctcgaacgaagaactccagaattcagactggagatcaacacaaagcacccgtctgttttccagtaaaccaaatgatggagttattgcttgactttcctccgaggatactggctgcaagggagttatcagtgccaagcttataatcagagctcggcaccaagcaagagaagcatgtctgccaacttttgccgaaaaactattagacaactttggattcttgaaacgctttcgaatcttttcatttatggtttccagggtctcaaccttgttgtctagctcaagagatacgatgtattgatgtagatatctgcaaaaggaaaaatcaatatccgatagcaagaatcgaatggtcaggctgaaacaaattcatgcttcatgcaaaattgatcacctgtataagctgctctctgaggtttctggacctcttgtttcaggaaaattgcatatgtctggccatatgcttccttgttctataaagagggaaaatattttctctagctggctatcagggttgattattgctcctgcagactcaacccgactcatcgaggaaaccagtgcttttacgtatcttcctattgcaactggtacaaggtcttcaacgcatagagagaactgggttcaaaatttgtagagtgcaacattaccatttagcaaactatattcagcttatgacaatttgatgatgacatagcacgtaaagagcatcaaaacttaattcctctaatgctactgtaatttaggagatgttagacaccaatgaaataactaaaatctaccaaattaagccttcataatacaacaatccattgcacaggctttgaccacccccttggatcatcagtcatcaccacagtatcatgcagtagaaatctagaggtttctatatggtattaccatcaccaagtcaaagcctgacttagggacgtttatttccatagaaacaggatcaaatttcatgtcatgtatgaaaaagtgagtactaagggtactagcaaagtatttgatagaaatgatcaagtccttaccctcttatctgatcgaagagaattaaaggctcgttctagtgtgttgacatcttcagtttcctccaatagtctcaaatagaacagtaagtatttgcgaatgcaagttatgaatttccgtgaactttctggcaggttaacttcaagagccttcttgttcccagccaaacctggagtttttcgcctaaatagaaagagagaaaaatgtacttgaaatcgtcagtgattcatgattggttcagttagtggagctaactttacatgattggtaccatttagtcatccaattttatcataatgtttctcagaaggttattccaatcatcaggggatgatatcgtcagtgttacagcccctcatagttcaaagaataactcaaaagttttcaggcgtaagaatgtgtctgtaccttccctttttaaccatgccatcaatctcccacatattgatcgtaaaacttgaccgtgatgatttgaaacaaaaggaaagttcttcctttgctctttgcagatcactgctcccaccccttctgtacagaccttgagcaagcatgtatctcgccttatgaaagtgtttaagatctccttctacacaaattccaagtgcagagaggctgtcgttgtagagcatatgccataccccttccatctgaattgacccctctccagatttagcataacatgcttccaagtttccatcttgagcttcttccagtgtacgagaggatccaaaagtcgttgtgccaatgattgtcatagccgtatcctttatagattcatcaaagcaataagaagcgaggacctgaaaggttgagacagcggaaattattaaggaccacaatagtgaacatctttagctgaaactgaattttacacatgattttatttttgaaaccatgatgcggtagttacaagttatataaaagacgcctgtttttctgcaaatgagaaagagattaacagtagagcgtcaactacgaacctttaaggcttctaagttttgtttcccgcatgcatttagcagcttcaaacgagaagcatgcattctatacacaggatctacggctgacggattcaatgtcatggcttgcttataataggataaagaaatttcatacgagtgcccaagcttctcactgagttttcccatgtagaatgcatgtgaccaatcttgtctgtacaggatggtttaagaaaaacaattctcagcctcattagtaattgaccaaagtaaaacacactttgaatgaaaaataaactataccgatgtgaaaaggctttgttgaaatgcttcattgagttctcacaaaatcttgtccatgttgcatccttggagggaagcacagaccgctgatcataaaacggcacaacactctgaaggctgtcatagtagaccagcgccaaaagctcatgtatctcagactacaatggaagatcaatacataaacatcatcaacaacagcaacatgtagttttaatatactacaggaataaagctgacaattctctaacaacccattcctctatcaaaatacaagctgtactaagttattcctgcaagttaagctcattgtaataacttaaatgatataatcaagcttataatctgttctctctatagtaagaaagattatcgataaccttaatcttaacatctatggtcgaccaaatctaaacataactgacaaatggatgatattacatcacatatcattctcacatattagcaatatcatcaaactaatcgtctattaagtgctttccctttcagtttatttttaaatgtgattttcatgtccctattgtattcccttaagtggcaccactcataagcatggtaactggggacatactaaacagcaacatccagtttctgtcatccagtgagtaattaaacctgttgatctggtgaatttgccaatgccaaactcattagcaggcaacgtctgcttcttcttctacttgtctcaactctttgcgaaagagcggaattcttcctccatcctacaacatttatgtgcttactcccatcatttagtaacaaatctacttcctgatttaagtgaaaaataaaaacaaaagggaatgcaattaataattaaaaatgattaaagacccattaatgatttactccttactgctatttgaaggtacattttcaaaataacagtaacaacaagaacgaatgaaagaacctgcctcgtcgtatatattgccaagcttttcccaactctcaaagcggagaggattatagagcagatcatatttgaacagatttgtattctgctgttcaaactcttctccttcctttgtcagaacaaaaccgggccatttatcactagcactaacttcttcggattgagctaacaaaaaatacaagttgcggtagacatccagataggggtcggaactgcaagaagtttatataacatccttatgtattacaacttcacatatattctaaaaataatatattccgtttttggtagtgaccgaagattctctttagtggttcatcatttttaacgagaacaagaacaatattctaggaaacttattcatcatacttctgcttgtcacaaaaatcaaacatgtgaaatttatagacacatttagatctagagatatacataaacattcatatcatcctgcatggttatctctgctaaacaatatattcttgattatgcaaaagaatcagctaaacgatatcagactatggaaggtatttttggcaagaggaatccataacaagaatgctttgacatacctgtgaagcagtgatatcttgtactcacttagagttctgctgggaattagacatttagttatagtttcaaggaaaccttcagaaccagcctcatatgagagtttgtcttcacataattcagggtcatctaagaatttatctatcacattgccaattaggagatcatctggtggttgtgaaaaatgcttttttattgctctcaagactctccggagtttaactagtccagttctctgagacaagaaggatatgcataagattaccagagactatcttgaaaacacgacacatgtattgaatactgctacgcaacacattctgtattgagtgcccacgtggtttaaagagtgcattcttataacttactcattaaaccaaatatttctgcaattttaagttacatgagttacaataggtgtttcggaaaccaatgtcggatatgtactgaacacaactggcaacacattataatttgtgtgtgccatgtaggtaggccatgcatgcttaaatctatatgcattgattgataaacaccagtagacatgtgagcctagttacagaagtgaatagctgttttggtaacttgcaatacattttttttactcgaatagaaaaaccttgaaagctacaaacttgtgctaatagttgttaccttctcagtgctaccactacaatttaactttgattctatatagataaatgcaccaagtacaagaaactaaactttggcacgcacatatcacacacatgaaaatgagcctaccaagttaaggaaagatcactcacagatgaagctttggcatagggtagtatgtactggaagacatcaacacattgttccttggtctgataatctccgcggctagtgtttttgtgcacagcaagctcatcttcgtaggaaccatcgactctcagatttagaccatacaggcaaaaaaagcattgatctaaagcgttgttgattaacaactcaagttcatctttttcttcttcagcaacttcttctgtgtgttctggaatctgtttgctttgttgttctgactgttctttctccctataaccaacttgttcttcagaaccatccttcttagactcagttttgttgttttcgtttttctcaacatgcacctcttcgagaaatgattttacttcatttctgcataatttgtcaggcagtcccatatcatgtccaagaccatctggggagttaatactggatttgactttcatgtccactgccaataaatgcttaatcgcaaatctaagaaaagctccttcctcccccgcacaatttttaccagcacagcagagcccatattcagcaagcaaatcatggagtcttatgatcaactcaacctaaaaaattaaagaaattccaatatcactaatcagcagaccaaaatagctctaaatatcatggctgataatcgtaggcgataacattcttaatttgtctcaccaaacagactcgcttaactatgtcaaactgagagtcccaaattccaatatcaccaaaaaaaagggaaaaacgagccccagtaagccatgtcttacttggtatttagtagatatagtagcatcaaggtgctgaagtttacagaatccaatagctgcatcgagaaagcaagacttcttctcttcttcaatcccatcagcattttgagaatctgaatatctcttagaaaaaaaatgcctcacgatatttgacataactctcaaaagcagagcttgtataccagctacacaatctcttggggcaaccatgtcatcctgcacatcaaacatacacattgataaacacggccacaataataattttttctaggaccaccataaaatgttctaatattcatccttctacattttactgcctagtaattaaaccatgcaaatcatatctaaaacattatactctttgagctgtctatagtacaagagcctgaagattgtcaaattttgaattagcatatcaagcaaggaataagcagataatgaatttaaatgattcaaacaagctcaataaccttctgtataatttatcttatacgcttgtgctagcatgatcagaatcacatatccaaagcaaacaaaggttattagcttttcaaatattacttgagaaccataacatatatgtcagaagaagtttcagacttacagagtttcctgactggtcaagggagttcttcacttgagagatacagagaagaattgccttgacttcctccgccaccaagtgatcccaactctcacttgaatttttggacgaggttttaggtgtcacaacagattctcccgtaccagttgaatctaagagaacttgcaactttcttctatgacagttcatataaacctctacatctataggcttactcttctggcatgcttttattaaaacctcaagtgccgataactcaacagaggagatcccttcttccgtttttacagcgtatgcaggcaagatgtctttatctggaaacaaaagaggtgccagtaaatttacacactccgaataaaattctttctccatcatctcaggtatgttattttccaacaggaaatcaatcttaagcagattaatttcatgaatgattctattgatggtcagctctcgaactcttctgcaatgaggtcgctgaattaagacaggagcttctccgataccttccctgcccaacaatgacaaacacctgagatattcttcaagtgctttagctttattatcctccaaaattgataaccgtgcactcagccagaaatatcgagcccagaaagatcttgtatcataatctaacacctccttagcagcctcatcaccttgaaaactcttaaatgaggagtcagaaaacattttccctcgagaactaggtgtagagtcgatagcataatcaagggaaacagattcaattatcttagagagatggtatgttacttctaccatgcatgatggggcatcagggatatctgatcgtttagagtcaaagtcatggtacagctcggcgagaaaaagactgcattcaggtttccgatctcggccccaatgtcttgtaagcttttctaactccaaaattttcaaggcagtctcacgactcaatacatgttcacatttattagcaatatattctagaagcaagtgacccatatgatacgcaccataattttctaaattttccttcacaaaattagaaacgacggcgtgttcagaaattggatcagattcttcattgcagaaagaaccagcagactctctgtcaaaaccccttttaaggacaaatttctcaagatattgaaggatgtcactgctaggatccttactgttatcaaattctaacccttccttctcaggtttctggttccgaagccgttcaagacgagtactccgcctctcttgggggtgttcttcagaaaacacaggctctttttcttttacagaaccaccactttctctctcgatgttgcaatccttaacagacacattacttgaatctgaatccacacaatgatccttctttttcataccttgcataacagcctctgtactaagggataattcaatggttatcggtatatcagctgatatgcccacagtttcacgcgaaggatgcactatcccaattagaatatttagcagtgccacccatgaagcttcaggaagtttaaattgcactctttttcttaacttcttggaggtagcatccatgtcctgattcatgtcagacacctttcttttgccaagaaatttgagccgaacgtgctgaggttcaagtttatctatacccttgggagcaaaaggagctgaatctgtgtcttcaatacaatgtttaacatgcaaagcacgagaatgtgatggccaatgccttaaaatcagatttgcaactgaaagacaggaaacttcatcacctacggcaatgagaacttctagaagtttctccatgcagttccctgcacattagccaattcaattttcaagagggagggaagggtaaatgcaatagtccataccacatatgagtaatgtgaacccaaaaacagagagagaaagaggagaacagtgcgtacagttattggggctgcagagaagtccctgttcaaatgcccatcgtgaaatactcagtaatcccatagaacatgatagggttccaagatggttccagagcacagaatcttttgcatctaagtctatagcttgaagataacagtttagagcattctcgtagtgacttgaaccaagctcaagaaagacagtggcaagattcttcagagccaaaaatctgcaaacagaaattatttataggcgagaccacagcactaatgaactaaaaatatatgaactagacaaaatcaattagtagacatgtaaccaataactagatgaattaaaacgatggagcttgacctgagatgatggagatgattgtcgtttgcaatagtctccacctggacataatgtcaataagaaggtcattcatcatccaaagaaatcatcagagtaagtgaagaagatgattttactttggagttggttataataggatctttaaggatagattctagcagctcccgagccttgtcatagtctttagcttgcagcttgagaagaccatcatgatatgtttgtgacagatgaaactcctgaagagggcaatttaaaaaaaaaaacagttcaatatatttttcaacaatgagctaatctaacttctttataccaaattgagaagaaagaagccctgaatcagaagaaaacctgagcttctttgctaggagctaaaggttcccacttctctgtggactccgtatcattgatcgctgcaatcgaaaactgaaaaaaaaaaaagcgaaacaaatgcaaaaaaaatcaaaaactaaccgattaaaagggggatcaaaattaaatctttgcccgaaattatcattaccatcttgatactcgaagctggtaatggttggggttttcgagttcttggcgcgaaattggtcaatcttcttcttcttctaactagggttgatgatgcacgttaaacacattactagagttttagatttcacagaattcttttctttgtttggtctgttcgtcctctactgtgtttttcttttgttttggctattttgccgtctgttaaaaaattggggttttccgataatgtattgtatatgcctgaattatggaaatatcactaaaaacacttttttgcacttttgtatatattgcaattaagatttaatttttctattttgaagactttttgttaaaagagagatttgctaactcaaaattaccggagttaataagttcgttctcatcagattagcaaaacattcatctttaaagaaatctgtttatctcacgtaaaattctactaattggcagcagcacactactttaatgggcctattactatttcaatatgcactgaaaacttcattggactgtccaataacattataacattattaaaactaaactacatttgtatttgggttacaattttataaagagtaagactcaagatactaattgggctgcagacaactttaaaagccttactacaaaaatcaaaaccattcttaattaactaacaaccaggtaaaaatctcagtacaatatttacactaaaaataggtgccacccactatgcaaaagtttagggccacgaacaaaaaaacctgtaaattgttatgtcttcacaatatgtgttttaatacacatgaattttagctacggttaatgtaaattttgtagttaaattaaggctaaacaatctcaaatataaattggtcaggtccacagacaacagcctggcaagtggcaagcactaaaaattcgaccgttattttttgcccctttttttaatatttcgaaattgtatcttttagttttattttaaagctttttagcccgctcctcctccgctccacctttaattttttcaccaattggatttggatctgtcaaaaatattggcctctttctctctttctctcttgctctctttctttgttgggttgatctcttcttccatggcgatccctacggagacacaacaccaggagaaggtactctttcaccattccatgattccttcgtgtcgtttttagccaaatcttttttccgtttctttcgatttttctttgttcttccttttcttttgcacgattttagggtttgaaacttttgtgaatttgaacaatcgatttatgtttggaatagaaagagaatcaattagggcagatgttcaaaaattgctcaatttcaaagcagattcgtttctagcgatgatctgaaaattggtttttatcaggaggcttcagatgcttctgcagcagctgcacaaaagagatggactttaagcgatttcgacatcggtaagcctcttggcagaggcaaattcggtcacgtctatctcgccagagaaaaacgggtcagtatataacaatctatcatcttccaccatctttcaaatttttgttgttaaaatccaaacttaagaagcatttgttttagatccttgattgtttttccttccaccaatctcacacatacatgcaaaatgtgaaacagagcaatcacgttgtcgctctaaaggttcttttcaagagccagcttcaacaatcccaagttgaacatcagctcagaagagaagttgagattcagtctcatcttcgtcaccccaacatactccggctttatggctatttctatgatcaagtaacttttcatttttctccttttttattcacagataattgttatccaatctactcttgagcatgattaagttcttcatttgttgcagaaaagagtttatttgatacttgagtatgctgctagaggcgaactttacaaggatcttcagaaatgcaaatacttcagcgaaagacgagctgctactgttagtcattccttccacattttgacctctcaaactgatttcttgtatgaaaactgatatcctttctatgttcattgtgccagtatgttgcctcattggcgagggctctcatctattgccatggcaagcatgtgatacacagagatattaaaccagagaatctgctaattggtgctcaggtgatgatataagctttaccttttcctttacatctatccatttgattatgaaactagctaatattattattcatggatccttaactattcagggtgagctcaagattgcagactttggttggtcggtacacacatttaaccgaagaaggaccatgtgtggcacactagattaccttcctcctgagatgggtaaagttgaaggcttgctaaaaagttagttctggtgggatctaaattctttttaacagtgaccttttggattgttttacagtcgaaagcgtagaacatgatgctagtgtagatatctggagccttgggattctctgttacgagtttctttatggtgtacctccttttgaagccatggagcactcagacacatacagaaggtaaacagcatttgaaatctacaattatagtctgtttcttgtggggtttgtttgatgatatttgttaccaccaatgatctatatcaggattgtgcaagtggatctcaagttccctcccaaaccaataatctctgcatctgcaaaggatcttattagccaggttatattctataccttcaatctaacagatacactttgatgcaagtgctagttattgaatctgaagtctcacatattttctcaattgtatgtatagatgcttgtcaaggagtcttcgcaacgtctgccattgcacaagcttctggagcatccgtggatcgtgcaaaacgctgatccttctggaatctacagagtttaaaaacaaaacgcttactgttctcgccaatctcgaccaaaactgttatctagaaacccaaaactgtattctttcttactattatttttcgctaattcatgttccaaataatgtgtattatgtagtatgtactaatactatatggcattaacggaagaaggaaactctataaagagttgttagctgaaaaatgtttctaatttcacctatgacgatgagaacttctagaagtttctccatgcagttccctgcacattagccaattcaagtttcaagagggagggaaggataaatgcaacagtccataccacatatgagtaatgtgaacccaaagacggtgagtttgatgaaatggtttgcctatttgaagggttatttacaacccgcgtgtttatccgtttccagaggcaagataatgacgattttttacaaaacaatgtcaatggcattactctgtaactttttacaaaacaatgtcagattttgttataaacttctaaattaatagtagggattagtgcagaatagtagagatgaacttctcaggcttggataagaggttaccagagacgaagaagataacaagacagaatatcattaatggtgatgcaaaaaaaatcaaatgacggaatgtaattttgccaaaaaatttttgctattagtcggtaaactccgtggttcctttaggagggttcatgaagctgggctggtttgtagatgacaacattcgcgcccacattctatctgtaatcacaactttgttctgtctttcggttattcgctgcgcagagaaaaggaaagaaacaaaaaaaggattaaagctcgatgatccaatggcaaggacatatacttaggcgaagagaaacttacgttaaagggaatgtaggtgtgccttccattaacaagaccagagacaaagccggtatagccagccattgcaccatggactgcgctttgggcaaggagagttgagtagacgttgtcagatgcattggctggaatagctcggatcatgtatgtcggatctgaaacatggtttgagtcatatttctaattcatgaatctatgtagctcgacttgaatttggggaggacaaacgtaccaatgtatttaagagtaatgtccattacattgtgcttcgcaaagtattcctgtaacaagagccagagaaggaaacaactgtaataaacccacataaatatcttgtcttttaggtgaaaatatgggactgaatctcgttggcaataatttaccttgattttaagactcatccatagtcctacatctttaaggagcttgtttcctgaagcatcttgttgttcaatgctctctgcaacaagatcctgtcctgctccttcagcaatcactataaccatgtggccattttctctgagacgttttgcaatgaactcatagagccctcctttgccttcaaggtaaaagggtgactcgggaatcagacagcagtcaacatctcggctagccagagtagcatacattgcaatgaaccctgcagtgtagaagctgtaagattagataaaagcgtagggagtaacatcataaagaagatacttctgtggtctaatatttgtatgcattactgctctcctagattcttctgtgaacttaccactgtaccgacccattagcttgacaattccaatgccgttttccacactggtcgcttcaacatgcgctgcattaatagcacgttgagcctcctcaaccgcagtatcaaatccaaaggacttgtcaatgacctagatcagagatactatcatcaaattgagcttcttgcgaactaaccagaataggagaggaggttaaggttgagagtgcagactacaataatgataatctaggacttactgggatgtcgttgtcaatggtttttggtattcctgcaactgcaactttaagtccacggcgcctaatttcctgcagcatcagtcaaaaaaaatttgcttcacaagattaaagtgcttgtgacgtttgcacacacagaaatatcacggttttacccagtccataaattaagaaaactattttatgtcttcaagcaaataaacgttcattttcataagagcagaatgtcttcacaggaatttaattagacagttctcttcaaaatatgttttagataggtatatccaacaataatacacaacatttcactaaccttatatattgcatttgctcccttttgggttccatcacctccaataatgtaaacctatatcacagatgcagcagacaaagcaactgactcttattggtataactattctccatagaacacaaacaaactgaaacaacaaaacaaaatttttcttgaatacctgatttatttcacgatcttgtatgttgtcgacaatctttgatgtatcatgtccccctcgggaggttcctagtatggttcccccgcgcttgtggatgtcactcacagtcttcggcgttagtgcaacagtgtttttagaatagaacccgcgaaacccgcactgcgatatcagaaaccagatgagtcaaaacaaatcctactcaatcaataatggctaacatagtatttgctttccattgtaatttgctattaaaactgacattgctctattatgctctactacaatatgcaatagcagctatagaacaaagcattcagtctacaagttgggatacaatgagatcatcatccctagaaaatacagtctaaaagcataaatcgtaggtacaaaaattgaactcacatccacaccaatcacttctgtaacaccatacataaaatgaagaccacacacgatctccctgataactgtattaagcccggggcataggccaccacaagtgacaatacaggcacgcacatcagatggcttgaagtacacctaaacacaatatataatcatatatcagcagtttttacatcatcaaatacagaagctgcagagcaaaggaaactcatggagtagatgaagtaccttttggcgcgggcctgcacgtctaaaatgtgtccctctaggagaatccttgtgaacaacaatctatacatcacacgaaagggaaaatgagcaatgtgctaaacatatcacatgatcacttacgaagagaacaaatgtaagaaaggaaagcgtcagtgagtttcaccttttcctggactgtatcatcctcatcaacaaaatactgcctgaaaatcacacagaatatgaaccctattaactaaccgtcatctttcaatcaatcaagttcataagtacaacatcaacttaccttactactgaataagcagcatttgattgcaacgggtttggataagtctgttagagaaggtatcagcaaaagtgaataaagtataaaatgaaacgaagctatagcatgatttgaaatatgaaccaaaaagcttttttttttctccatggcaagactaatttacaatccaattcttccattactctacatgtataagaacctcattacattagcatcaaatttagaaaatagtaagtgattaatagatctaatcaaacattcggtgacgagtaagcatatgtgcaccaatcaatttccacgttgacattgatttaacatttcacatttgtatgcactaatacgaatataaatatttatgtaattctctccctgatagagaccaggatctcatcaacagtccgaatcaacatataggctaaaaataggcgaaaccaattatacaaacacaacttttgcatttgctatacacgaaccaccaaatcggcaacaatatcaaattcgtaaatcgtataaccaccgatccatgaaaatgtcgatttcaaagaataatcgatggaatcgtatagagatagagagaggaagtagtacggggagatcgagaatgtaatcgctcaaatgaggaacatcttcgagtacataaccagcaggtccttccaccaacttaatctgctcgtccacgccattagaagccatcgaagaaaaccttattcttctgagtgtttttctctccggtgacgtaaagcgactgtgaatttgaagcgtatgtatgtatgtgagttttaattctcagagctcagagtggtatagaagtaaggaacgagaaagcgacgtcgttttggctcaccgttactttatgatatacggacattaccgaaataccagcgtaaacggcggctggtttttccttttgtcaatttccggttttcagataattgattcgtggataaatgcagaagtatggataaaatctcattaattatctttattatacctttaaagaaaatgacaaaaattaaacgataagaatatcttaatatttacgaaatatattcttagtaatttctctatttggtgtcaaaaatatataggcaatttttctattctttaatttcttaagattttttttttttaaaatcattttttcttagtatatggtattgttcatgacaaagagagaaatatcatatcctgttgagaaatagcatttataaaaactgatttgttttgtaaaaataataatgtcaagctaatgtatagatcgaatagttattttagcttaaaaatcaaatttctgagaggagaaaatttatcttacaaatctttataacgcttaagtataaaaaaaagatcttaatacacaattgtccgaaaaaatcatttttaaactatcaaattatcggtttaaactttttatttgattaacaaatcaatctaaactttacaaatcttcatgaatcaatttaggatttaaatatcaaacaagtggattctaaaataataaagtttcctctccaattaggagtataatgaattacatatttggaaagaaaagattcgagtattaataaattttagatgaatttgataagttttagacagttaggaaagttgttactatttgttattaaaaatatttgcaatctccctcactaaaaaaaaataatatttgcaatctcacaaaaccatgagaattgggtctttgtaatttttaatcaaggaaatccattattacatcactaattgaaattcatgtttgtatatacagcctaaacttttgtatatacagcctaaacttttgtatcttttatttaaaaacactttaatatgttaaaatccaatatagtatcaaaattatatcaaaatctaataaacaacacaccagttttcaactttatcaattaaaattaacagatggtgattttaaatcagttggtttccatcgacacatgatttctagttaccaataatcccactaaccccattaaaatctttaaattaaaaatctgaacaaaattatctaatttagatttgttttcaaaatgattacaatgttttcttgttttgaacggagacttatcggctccctccgtaaaataatcatacacattaatccactaatcaaaatttaattataaaatcgaatcgccgtgtacctaatatcttccccaacctttgctctctctctctctccatctccctcatacctccttcttcttcttgatccatcatctctctctctttctctcttctctctgttcctagtccatcgatttaacctctttcagattctccttcttctttgactttttttgacaccgtagtctctttccccttccatcgatttagggtttccgattttcaaaatctcctttttatttgtttcctctccttgtgcaattcccgtctcgaatccatcttgacctgggggtctgatccgatctccctctaatcatatcgtgaagcgagattatgtttttgtgctgcgcttctgctttgatcgcttaggattatcaatcgtgttatgatggtgggtactcaaaatttaggtggttcgttgccgccgctgaattctcctaaaagctatggaattacgaagccgctctctcttgctgggccttcttcggcggatattaagcgtaatgtggagctggagaaggtaaagctttgtttttttgtttatacaaaaattgttccactgtttaaaggattcgttgatttggcttatctgatgtgtattttcttatatgctcaagtacttggttgatgagggactctacgagagcaaggatgataccatgcggcgagaggaagttctaggacgcatcgatcaggtgactcagcgtgtctcgttgattgtttgttctgtatatttacaagtgttatcttttgatggttgtgctaattgggtgtctgaatcgacaagaataaaattattgtgtttataatggtcttttaggtttcattgtattggttcttactcgtgtatggttgttgattttgggctaagcatagatcatagttcaatatgaaatagactggtcaggcatatgttcttatgtccattgatttactttgctgtttttaagtttcttcacatgctgttcattgtgctatttgtctgaaactatcaatcttatctcccaccttttttttttagattgtaaagcactgggtgaaacagttaacgcagcaaagaggatatactgatcagatggtggaagatgcaaatgctgtcattttcacctttggatcctaccgacttggcgtaagtgctacttgtttaccgcttccttgcttttatcttgaagctaaaatgcgtataatatgttttttgctatatgtttgtggattactcgagagatcgctctgtttttgtctatgcaaatgcaatcttagtctctgaggctgaaccgacttcaattttgttcactttgcaggtgcatggtcctggggctgacattgatactttgtgtgttgggccatcttatgttaaccgggaggtgactcttgctaccacttattgatgcagaagtttgattctttagttcttaacacttactctttacaggaggatttcttcatcatcttgcatgatatattggctgagatggaagaagtgactgagctccatcctgttcccgatgcccatgttccggtcatgaaatttaagtttcaaggaataccgattgatctgctctatgctagcatatcacttttagttgtgccacaggtaattttctgtgaatttattgtatctttctttgtttttgctgaagctgtagggtctgataaatttatattagcttgtatatattatgctatatgttgtgcttgtttgcatgttgatggagacagatagtgtattactcatcctcaatggcttatatagtaaacaaatttattttagtagtttctggcttgagagagagatctgaaaagtttgctggctattttggtgcatcggttttgatttttatatgaaaactgagcccgtgagctgtcatggtagattacaatctcttgctgaatcaaatttcttgttttcatggatttggtttatcgacaggatctggatatctccagctcttctgtgctgtgtgaagttgatgagccaaccgttcgaagtcttaatggttgtagagttgctgatcagattcttaaactcgttccaaattttgaggtaaactcacagaatgccagtcattatgttaacatatgaatgaactatggttaccttctcttatcttatgtgcaattgtagcacttccggacaaccttaagatgcctgaagtactgggctaagaagcgtggggtgtattcaaatgtaagatcatagctttctgaaattcgtatttattgaaaactttcatgtctaagctcttgtcatatttctcatattgggcaggtgactggatttcttggcggtgtaaactgggcacttttggttgctcgtgtctgccagctttatccaaatgcaattcctagtatgctggtttctcgtttttttagagtatatactcaatggcggtggccgaacccagtcatgctttgtgcaatagaagaggatgagcttggatttcctgtctgggaccgtcgtaagaatcatcgcgaccgctatcaccttatgccaataataactccagcttacccatgcatgaattctagttacaatgtctctcaaagcactcttcgcgttatgacagagcagttccagtttggtaacaatatcttgcaggtaagtgagcaaaacttttgacttgttatctcaactatttattcaggatcctatacttatgcatgatttttaatgcaggagattgaattaaataaacagcactggagctctttatttgaacaatatatgtttttcgaggcatacaaaaactaccttcaggttgatatagtggcagcagatgcagaagatttattggcttggaagggttgggtggagtcgcggttcagacagctgaccttaaaggttgatagcctcctcttttcatttgatttacagtaataaacctgctgtatatcagtgtttaatcatatttgttgtggtagaaaatataaaattattaaatgtttctcgattttgtttcttttcattcaataatgcagatagaaagagacactaatgggatgttaatgtgccatccccaaccaaatgagtatgtagacacggctaggcagtttctgcattgtgcctttttcatgggcttgcagagggcagagggagttgggggtcaagaatgtcaacagtttgatatacgtggtactgtcgatgagttcagacaagaagtaaacatgtatatgttttggaaacctgggatggatgttttcgtttctcatgttcgtagacgacagcttccaccttttgttttccctaatggatatcgaaggcctcggcagtccaggcaccaaaatctaccgggtggaaaatctggtgaagatggcagtgtttctcattccggctctgtggtggagaggcatgccaagcgaaagaacgatagtgaaatgatggatgtgaggccagagaaacctgagaagcgtgcatctcttagtccacagagtctagatatagtttctcctgaaaatagtgctatcacaactggttggactcctcctgtttgcaaccttagaaggccaccaagcgaggaaatagaagctgataatttgaacactgagtgtactgaactcacagacttagctcgaaatgagtgtaactctggcagcgagcaagttcttgaagtagatagtatggctgtagttcaagaatgctctgatcctgctgagcctttgggaaagtgtgtaacacctgactctgttgatgtggtagcatgtgtaagtgggcaggaagaaaacttagatcgtaatttgaggtctgtatccatcagtggtactgactccccacttcttccgagcagatcctgtgggcagaaccgtgattatgaggttagttttttttttctttttgtatatgtttgggggttctggtgtgttatcagaaattggcaataattgtttgaacataccgggcatagtaatgatgagtttttacagggtttcgggtttcctgctgcaaattcagatcctatgggaaagaaaaacttgtactctcaaagcggcatgtcggaagaccttcaggttattaagctacctcacagtagttatcataagattagttctgttgaaaatatttaatagctggtttaaaaatgaatgtccaatgatatgcgagcatcaattctccacactacatggaatctcatactggtttcatagtgtcaagaaacataggatggagctaagtttgaaatttgatggttgtccataaacagtactacttaagaggtcaatgtttctgctgtgttataacttgccttgtgtgatttctgctgcataccgcctaactagtgcatatatatgattggcaggtcctgcactgcaaagcaactccgcttgaaacttattgaattagacttttctctctttgattaagttttgtaaggaataaaactaacttatgttgttgctcgtaatcttgtcttgtcttagtcaaactctttggtgagcgggatggagaagtcggaagacagagctaggtcagaatctttccagaagtcacagataaggcatgtgtgttatgcaaagtcatgatttctttatgttattcttgttgtgtatttggtttcattggtgcttttatagcacaagcaggttaagcttaaagtccactgtgtgaacgtcctctaggctattgacgtgaagaaaacgggggatttcaactcaaattgttgcgttggacagacgacagagtccagaagcttttggtaagtgaatttttaatatggaaaaaagaaaaaagaaaaaaaaaagttaaaaaatgacatttgaaaaattcaaaaaaaaaaaaaagaattaagttaaaaaaaaaaaggtaaccaaaagagaaaagaaggtataggcagagaaagcattggtggtggtattttgagtgagcttggatgatgaccaaagctcaatatgcgtcatcaggatcataacttgaagattgaaatgatttatataatgtctggatgatgaatgcttttttttttttattattcggctgtttcagactctggtcctcttagggctttgacttgaatcgtttgtgtttttttaattttattttgcggtttatgtatataagatctatgcctccttgtctctcgtttttggagttatgctgtcaaaactaagtgagagtagttgcaatgaaaggctttaaaataaaggtttctgatctatatcaaagtcaaaacactgtttctttttttcttatgatgtaatatgatggaaaatctatagaggaattggaataattggtggttgaaccgggaaagacagattctcaaatttaaatgtgtcggatctgctagttccaaatacaagttcaaagcgtcacttaaaatatagaggaccatgaataagtacaagagctctgtatttgaaaacatgaatggttggaattcctaccgagaccaaacactttttgtggagatatgtcttgtttggttgaattatctttaatacagcatgccaaaggtttgaagagtaagatgaaacagtagccctttcaatgttttcaatatatattgactgagtcgaaaatatgggattttaacttctcggggccaacagataagaaatttctcggtagtgaccgatagcactactaatatctacctttttaagcatggaaaccttttcaactatcaagaaaaaaacaactttaaaattttgatagcctagtggtttgtatgtatgaaatagtgatatttgatagcctgatggtttgtattaatatcgtcattctgtcacctccggcgttgaaactagtataatgcatgtccacaaaagaaaaatagaactgagctgaggcaaaaaagaaagaaaaaaaaaaatagaattttaggaaagcgtcattctgagcaaaacaactaaatgaaaatctaattttttcgttggattttcccaacatttaggactgcaaatactctttacacagacgtaaggtaagtaactaagaaacaaaaaaaattctaaactcattcttaaataatcgcattagcgtctctattttgtttgatctagattatttttctctttctgtcttctcttttatatacaagggatactgataagacaaaatctagactttttaagttccaggcctctagatttttagtgggatttggtggagaaatgctataattcgtcgtatttgcctacaaatttggagaaagttttacggaaacttttgacttgttcgactaccaacctataagttacaattggtcttagcagatatatagtattccatcttttctgtattttcaatgcatcgaagtataatttttatgataagtagtttttaacgatgggatatatgtttcaaacatcgttaggtaacaacatatataggctttcacaacattttgtcgttttatgtctatgcataaacagccggagaatattatacgacaaacaaatatcataacatacatacatatttacatatatatatatatataatgcatatggatattttccccaatctcaccaattaagaaaaaaaataactaattatttatagatgcataataatatatgaatacaacaaacgtacgtatcatacgttaatagattaccaatagagggtcaggtcaatcaattagatccatgtgtttcgagcctgtaattccaacgttaatatgatcattagatggtaatattttattttttttggcatacctttttacagtttttatgattaacatagaaatataaaagtttatatacgccctcatatacacacaaaaaaaaactatttcgaagatcgaatttcctacaatttcatccaagcagatcccaaacacgatcatggattgcacaaaaaaaaaaaaaaaaaaaaaaagagaaaagggaaacagaaaactaaggagatatatactactacaaaggagaaattagaaagtcaaaacaagactaccaaagttacctagaatacttaatattttatttttcgataagatttttcgtaaagtaagttactgttttaaacctcctgagccatcatccacttctgcaacctcagctgtctatagaaactctgtataaactcctccgcagctctgtccacgtggcagctttccatcgtaccggtgctgctagctacgtcgggaaatactgccgccgctacgtgtcggtcccagatggagtcacgaaccttgggaagtgtgttgtaacggatatacgcttggcgttggcgcttgttgatgagcggtctgttatgagatccgttactacgtcgtcctttgcttacggtggtggcgtaggaacgtctcggtggggtgctgctgcagctgaactcgtactctagctggagcgggacaggggagatgaaggatgatcgcacatcttggtggtcggaaggacggcacgtgatgcgtgagtgggaggttgaaacggcttcgtttaaggatttgcgtaggatcttgccacgtttcgcgagtagatgtggatcgagggttgtgaggagtttgtgacgtgaggcgtctgaaaccttctgtatggtgaagagaattagcttggccaggcttgagagcttcttcgttgtgactgttgagcaaacctccatgtcgtcgtgtatttgcatatgtgcgtgtgtgagggagagagagggtttggcaattaggattgtagagagatgggatttaaagaaaataaagtgggattaatgaagaaactgatgatagtctttatataacggaaacattatatttattccgccatatgagtaatggtgatataattaatttatcataaatttatacaaagtaggagaaaagaagtcgatgggtccaatagtttttatctcaaccgttaaaaacattctctggattttattaaagtggctcttgtttgagtctccccactatggtatactggtattgtaaaaactaaaaaaccaagtcaatgctaatactcaatagtctagggataaaattccatggtatactggtattgtactttcaaactatctagagacaaattcatgttttgttgccgtggttataaattcttaagtaactatagtttggatttgataatttaaattatcaattcaaatttattgttatcaaaggatggtatattacccaagatttcaaaaactttatattaaaaaagttagaatatgaaacccaaaagattttcatgtgtaaacgcaaatacaaactataatccaaaattatattttgaatcccactcatgaaatctagaaatgagatcaacaatttcatacatcaaaattgaaagacatctcaaatatgctttgatatattcttattgtagtaagtcctctaaaaatataattgattaaattcataaactctaaattttatatagtataaatgtataattaatccctcgtaaatcacgtgttggaccattggaggagcagatatctggtaaatacagatactgaagattgatctaacctttttattattattttaaaaaaaaaagattgatctaaccatcaacaaaagcgactcgattacttggaaaacaaatttacatttaaatttaaccaatatttaaattatgtaatgataacatctgcattatacaagttttatttgaaccgtgtctgtctttatggattttaatatttggtaccttttctttttctatgtctttactttaattacatttctttgtcaggtcgaaaaataaagaaaggagagatatattaaactaactttcttttttggttatgtaattgtattactctctataagttgttcgcatatgcaaaaagtgtaatacgggtagggatccattggtcatatattgttctattctaatcaaaaagttgattttgattgctttatcgaaagagttaaaatcttatcgagaaataatttaattaacattctttgtggaagagaaaatcatgaactgttttctttcaatcttggatgtctcgggctaccaagtttcgtatagatacttcgaggtcgacactgacttatattaatagaaactttgggatatacctatttttattcggaaactctgaaaaaattaattaatgaagaatataagtgacctacaaatatactaatatatatataagaacgattcatcgtgggttatgtaaaatgatgaataaaaaaatgatattcaaattcttggtattgtactgtaattgcagaattcagtaaaaaaagagttttgaaatttttaaaaaataatcaaaaaaacaaatctttaaaacaaataaaaataaaaaaatcttaatttaatttaaaagtttattttataaaaatagggaaacggtgttaacctccttctttgggttcatcatccaaaaaaaaaaattgtgtagaaatttaacagatggataatagaataatgacatttttttacctgactggatttgttaactatgttgactttttgtttctaactaataaaacctcatcacgtaaagttaaaaagtaactttttcttcttttcactttcccatgaagttacttgttcggagtactatttatcatcatttttgatataatgacgagataatcattacacctagaagaagtgtcaatgagctggagttataaaatttcgcattattcgacctaaaattaggcctcgatattgtaaatattatggcggtgttgagcaatgagtgcttaataatttgcacacaaaaatgccatgattagttattacaatttctcctttttttcttaataaaataatgtaatttaaggttttgggaattgatgggtttgaggactgtgatggatatgttcaaaggaaagaaaatgggtccctacggtaattgaaataaacaaagtaaggcaaagctttttacattttccaatttgacaacttcttaagcaaggctctaaagaatatctattaattaatataaaagatggatggtatttgcaaatattagaagaggatacaatgatttaattaagtttgtataagagagaagaagtgtacatatcatttgtttgatccatcttggccgattttaaaaactgttagtctctatcatgattgatttcaaacatcatttcttccgtacaccgtcaaaacgtttgtgcaacatggacgaattgttatcagatgatgtaaattttgtgctcacctttctcgaagccataaagcatcaagacatttaggacttaagcacaaagatacaatcttgttttcaagagtttggtatatgtctagatatttcaatgctataatgtactaatatctctattacactgctttcaccaatatatatggattaaataagggaatgtttggtgatgtttgggaaaagttcatataaatatctcataagttagagagtacaattcaaagtgaaaacctaacgcgtacgtaactttgaatttgtttgtcagaatatttaaatagcagtgtattgaattcatttgtagcaagcctgtaaattaggattcgatatctacggaccgtgtacacgcattctttagtattttataatgtcacagccactttttgatgggcttcatttctatcagtttatttatttccgtgaaactcatggttctctcatcggtcgatttcttactgggatagtacaaaacggtttcgaattactctgcaatactatcaaaacaaccaatccatgttttgttcatactttcatgatattttaaatcaatacttacaatcactttgtgttagcattaaatcaatactaacaatcactttgtgctgcaatccatgtttcttaataaaataaaaatctcttgaaaactatttatgtttgacccaaaaaaaaagttttgctatactaattatggtacaaatgaaaattaaaatgtatacgaagataaaaagattccaataactcgcagattgacaaaggaaaactcatattcacaagtaaagacgactgattgtggttgatatgtatagaaagaacttcgatttttgataggttggttcacaatcacggaaatccaaaataagtttaaccgttgttggatagtcctagtatactataatttttttgtacttaggcaagctagttcatatagaatattttaggtgaaataaacgagaacaacaaaacaatatgaaataatctaaataaacacataatcagcggttggtgagttcctatgaacaccggataatacgcaaatttattgaattgaatgatcgagaagcactttccgtggccaacattatccttttatattttaattaacaaaagattggttataatttcactttgtgattatatatttgtaaggttgctgtagactttggttaagctaatgatgactaaacgatataggatccgtagctactttgctactagtataattttagtggctcgttaatttctatattagtggagtatctttgcagtgtcggatagtgggtttgaaaagttttggtttggaaagaaatagattatacaatatactatacagtttacttttaatttattggtcatccaaataaaatattttgtttttttgtcacccatcgcatggaaaaagaaatagacttgaattttgtgctgttaccttcattagttatgaaaaaatagttctttcataatcataagttatatgtactaataatcagatgacgaaatccaaaaactcaaaattgttggagattttgagttttcactagggtaaaaatatgcgggatctgatatatgatccgatccattccaattttgttttttgatatcaataatttctgcgcacgatacttgggggacaaaagtcatctgaaaatgcatttctaggcccatcatcacaaatcgtcgattagcaaccataaaaaaaatagagaaacaaattatattgcctttcattttgggttgcgttgtggatttcacaaagaagtttgggccatgcattgtatttgggcttgtatggtttattggatagtagtactttgttgatttctaaaatattggttatctttgttaagtattagaatattgctagattgaggtacttgtaaataccaaatatatgttacctaccatttcataacaagtgtgatttcctgattagtaaaaaagttaaactattaacatgtaagcagatctaatttaatacagtatgattcttttatgcaatatttagaagtgtatccaaaagaagttgaatttcaacattttaaaagaagtataaatttctttgacaaaaaaaaaaaaaaaaaaagaagtatcaatttaggtaatcatagatataaagagacagtcctatatccagagagttagacaaatggaatagatttggttttgacattttgtccaataaagcgataaagatcagttgaacttacacgtcgacaaatgtcaagacgtgagaacaagaacgagggtaaaattgtaattatatcaaaccacacgctcgcttgctttgagcatataaataggttcttcttcctagcaaacattgcatcgaagcaaaatcgtaggccaaatgggaacggaaacggtgtcgtttaagtgggagggtaagaaagtcgctcaagtcaacggtgtcacggctgagaaagtttggtcggttttttctgacttctgcaacgtccaagagtggttcccatcagtcgatacgtgttaccgagtccaaggaaccgatggtgtaccgggtctgatccgatactgctccaccaccaaaaccaaggaagagggaagcaggtgggctaaagagaagctggtcaagatcgatcccattggacggtgtttgagctatgagatcctcgagaataacgtagggtttagatcttacgtggcgacagtccaagtaacgccagtggacggtgaagatcaagtgtctcgaatcgagtggtcgtttgttgccgatcctgttgatggttggaagaaggaagacctcgaatcatacgttgacttttgccttcaacatatggccaacaaaatggaactcaatctgtaatatctttttctttcttcgtttgtgtgtttttaccgtacgtgtaagactagttggtgggtttcatgttagttgaaattaaataaaattggattcgtacgttatattattctgccattacattttagcttcgatttttttcgtccgttgcagctgatttgcaaacaataaaagtaaagtatttgacaaatttaaaatatattctaaaagaatatcaaccataaaaatattctaaaaggatgtgaaccacgaagaattgttctctaaaaatgtattggaaacgacagcattaattacaagcgttatacgaatcaaatagctttaagaatttattatgtgagtctcgggaatggattcttcggtcacgtggcagatattgccatacgtcagtcttcttccttgtcgggcttatttggcctttgtttgggccgtcatctttaacaacttttttttcctttttttgacatcaatatattaacaacttttcaaaccatgaacatgaacaatgtgtttagaggattatgtaaaagtttcaaagaagaattcacttgaactgtcttgggcttttcacttgttactcttaggacgatacacaaaaaaccattgtcgtcacgaaccaaattgtcttgggcttttcacttgttatttctaacagcctttaggcttggcaagactagtggatttgaagtaaatgttccaattttagaaaaaatattgaatttccataccagaaaaaatgaatttccaaacgtaacttgccttatcaacaacaggctaacacaaactagagactagagtgttgcaaagaccataaaagtaagtaaattctttcaaaattagagatgatataactaaatacaaattaactaagagtaagagtatatataaatatatctccggaaaaaaaggtctgtgttttgataattaaggaaaaacatggaaaaaaggtcatataaaagaccagttgaggaacatgaagcagatacaatgaggatcttcgtcgtcgttcaacactttccacccaacagccttctcgtacgttactgctcttcccatgctcgacatgcatattcctccatccatacacataaaccccttcacatttattattgctaattagtatttatgatttcatcaataccgttacacaatttcttttctttttttctaacttaagctaactaaatgcatgactcggtttaacgtacctgttgcatgatctgagggaattcggaggataaagtcttcttcccgttgttgttgtcgaagatcttgtcgagagtgatatcttgaagtgccaccaacgtcgtctccagcatgtctaaaccagcttggttcgcaaatgtgaataccggagataaggcctgaaatgatcaaaaccagttcactttccttgttatagattatgtatgagcataatcgatgttcttgagtgagtagaagtaagaaaattaccttgagtgagcaacacatgacagcgtcaggatggtgccaaagagacttgagaagatcagttccatgaggtttgagaagatcaacgccaaggtaacatctataagagtgagagatccagcgagcgagagtgtgagcttcgggtgacgcgggtggaggacgcaagccacttagctgatgagaagaaggagagagagcaagtgcgacccgttgaaccgacgcgatcacacttcttacatactgtctagccattgaggctacattctcttgcatatgcatctcaaaagctagctgaaacgctatagtcataacggactttgagtttcctctgcttccacatgaatctccggctgttctgctccctacgtctagagccgacgctaggtctagcgttcggttaggactcaacccctcctatacataattcgatttataaattagtatttgattcaactaaagttaatgattttgattgttatatgaattgaacgtactgatttggaatctagaggaatgatgcggaaaccggaaggaatgattggtgcatcatcagagaaagatgcgtcgattggtgcaaatataagctctgcgcatgattcaactgcgttctcatccaccccactgcacatctatatcatcaaacagtacaaaattatatatattagaatcataaaattgagtagttgcaacaagactaataacgtctcgctatagagtctatcaatgagcaaaaattatcaaaatagatataatcttgaattggtgtttgcctttagaaatgtgtgtgtgtttttcaaatgagaccacacaatctttgcgattttaaacacatttcaaaacagatgtcaaaaaattgttctatttatttttcacatgttggcacaaatgaaaattaggtcttacttgcagaaggaagatatcagcaggcatcatcatgtcttcttggtagtgccccaagctctcaagcttaatgacttccataaactggaaaacagaggacataaaagggcattagtttacttagtttattcaaaaacgtagttacattgatttgactttgagaatctcttagtagagtacttgcctcttcattctctatagtgtgagctagaggaagaatgacttgaccaccaaagctccctgggcgagggattggtaagctacaagggcctgctttgatggctgcggccgaatatgcatcgatgctattgtctgcccattcttgtctatgttccctcaagaaccgcagcagaatcgaaggtggaacattctacacaaacaaaaataatattagtgatggatgaaagggagtaaattgagaatctcactttgagatttgatgagcttaattacttgtaataacatggaagctttggcacataagaccgcgctaggcatagaagtgtagccattggcaaatgggagacttgaagtcatcatcatctttgtgggagaggagttcacaagaagagtgacatcatcgataccatcactctctaggatggaccatccttcatcgctgaacccattcactgcttcgttgaatcctctgacattaacaaaaacaattttaggttttagaagacgtaatgtttttttaaaagtgtttttgaagtgtgagaagctctaattacttgctaagcctttggctaagtgctctaagagccgctggtcttcttccccaacctgttacgttaggttgtgaaatctcttgagatatttgcctcaaatagcgcagagcctgcaaacaccataagttatttacacacagtttttttcttttcaaatacatgaaaaacaatgtgtctttaattaggaatcttacggccattgtagttctttgggcgagtaaagtggaggactcatagagagaacgaagaacttctggcacactccatggctacaaacgatttcaaccaggttatttgaatatatatcattggcaccaaaaagtatataataatgactagagataaagaacgaattgtgaaaacagaggaaacacttcagttttagaccaagaattaggtttcttgtgtaagaagaaaaaaatgataaaacttgtgaggctacctcaagatcgaaatgatcgacaatgtgaagaatggatccacctccttcgcaaggtctaatgaggtaaccacttggtaaaatctctgccctaacgaaatgaggagacggaggcatacttggcccgttttgtgtattgttcagtgatcgttcgcatatctgcaataacatcttaaattagtatcatcgaatgatcaaaagagaaacaaagcatcgatgttaagaggataattaccacaaggctcccgtcttccattacagatgtgtaacgtagcatccagaagtcacgagctggtgccagtgttgtcggcgcataaagctttcatgagaaagaaagagaggaaaatttagttttgtgtgattcgattatttggtttgtgctgaagataaaatcatctttagggttcttgatcatcaatacctgcatgtagattagttcaagggttccaccatttgcagtggatagtacgttaactatatccagagatctgcaatcacgcaaccaacaaggcttatcctttaggatctccgcgacctgcgaaaaaaacaaaacagaaatgtgatttatgttcttggttgatctatgaggatgtacctattagaaagaagtgagaatagtacttacccttgtgggatcaagacccacaaggccgcaagcacgagcagcgattcccgtgcatccatgagaaatagcaacgattcctatggaatccggaccaggctgcagatgaaattagtcagtaaggaagtgaaaatgattgaatcatagataaaagaagacgagatagacttatgagaattaccttcatcccaggcatttggacccactcgacagcggttccagtcgccttggaaatgaactctgttaaagtttcatccgcaatggacaataatctggagatacactcaaagagattcattgatttaacaaagatatatagaagctttaaatggtggcagagaacaaaaactgactcaaaagtgtgtcatgttatttaaagccaagaattgttggttctaacttacccagcaggactagcatcacgaggctgatgttgaggggtcaagtggtgttgaccactcgtcaccactgactcacagctagtatctgtggtagccaaattcccctgctgagagcgacagactatttcaattccttaacttatgtgtcaactaattaatgtgaatgaatcaaataaattaatctatctacgttttgaggatgttggcgaaaatagctgttctcataaaccaagtgagacacttgcttttgcaagcggtcattctcttccatcaaaagcttgttcattgccgttagcttcctattcacagcttgaagtcgtgacgcctcttttcgctgtttttctctacacctgtataaactcacagcgccaagagttataaacctagaaagtttcttgggtgtcaagaaatgatgagaattaagaagaaattgaacctgcggttctggaaccagacttttatctgtttaggctcgatgttggagaggataggacattcgcggattagctgttggcggcgcatagagctcggtttaggacagtcattgtagagtctctccagagcttccacttgttcaggagtgtacctcacgtacttcccgttgtccatattgtgactattattgcttcctcctcccatctttgatcctctccgatctctctatttaattttgttcctttattacaaaagcaaatattatttaacacaacctaaaaagttatgtattcttgaaagtactgatttcttttggtatatttcaaagaactttcttgatattctcaaaaagatccgtgttttaactttcttagtgaaatttgaaatgtaatcaatgaatgaacgtgacacttgatgaaatcttgaaaaatctcaaagataaaatatagatcttgtttaagattaataacctatatatgtgtaaatagaaagtgatttatgagcttagtatgatcttgtctcttaattaggtctttaaaaggttcaacgacggtacaaaaattttaactttcttctgcatatttattggaacctaagaaagatgcaaaaaaattctctttaaggaaaaagaaaaagaggggaggattcttatagataccgtaaaaatatttgtttttgatcacgctggtctctggaagcaaaggaagatataggagtttcttgctcttgctgtgaattctcacaaacccatctgagaaatttctttctctatctccaaatccctctttctctctcagtggatgagtaacttccttcggaaaaaacggtgaagcatgcttcaatgggaactacaagattcaaacctcagactctgctacagttcaaccactttcttccttactcttcctctctcttacttatctctctagatagatccacaacgtgaagagtcaagatttgcgaaacttgtatataagatttgtagtgggatgagagagaaaagctttagtttatgggtgggtgtgctttttgttttataatttttattttaggaaactaataaatagaaatgtgtgtatgaaaaaaaaaaaaagagacatgtgtgtcgggctgtgttgaaaaggagagaagtgagtacccttaataccagacaaccaccacttctcactttttctcattcttttttttcttcattttaattcaattttgaagtgtttcttctgttacttttactgcaaattcgtttagccttcctttcaaagtcactatgagaaacgcacaaatacgtcacatcaacatcatatataacaaaacaagtattgaattcaaaaccttaattcctttgttttcagtatggtaaattcataattttcatggctattagtttgctccttattagaacttcttttgcccttctaatccaatgtg

SEQ ID NO: 1392 - DNA, 80499 bp, Arabidopsis thaliana
cttgcatcgaacggcaaaagaagcaatcgtctgaagaatcgcgagcggaggacatctctcaccagccggagatagatggtggattcgaatctcatcgttcgggaatcgaaattcatgacttgaagatacatggttcacatcaagttcccccaaacgtaaatctccgtgataaaccacggatttatgacccaaacgattcatcgtgaattcgttcaattcacacttctgaaggacgaatcaggtagtgaagataaacagtttctgggaaaatgcgtgagagaatctgcagattcaatttctctcaaacttcgctacttttctctgtgatttttctccgcaaatgagggtttttctgggtctccttaaacatgagaaccaaagtaggctcagatatatatttataggcgagagaagcgttttattgttacgacatcgattttaatgtaaattacgagaaaacctgagacttctttacacgtggcgtcagatgcattatcctgttttcaccaacatcgcttgtcagccgtcaattaccgttcctaacaaaataaaatattcgagaattattttttgtgtgtatgacgaaatcggattaggtcgataattttggttgacttcgaacaaatggatagttaatgtttacaactatatattgtaaaatgtggaaacgtattcaataacttactttagaagtaaataaaaattgtgaaaaaaaaacggaagaggatatatatatggtaaaatcacaaaaatcaaataagaacataaagttggttggcaaaaaaagagaagacatcaagttgcgagtcttgtgacgtttgagtaagaaagggacaaatcaattttatacaatctgtatcatcatattattatgggtgtgttggcaaattagtcacttttgaaaacataattatggagttgggcaagttactatttataattggcaaaacaggtaactcactttgggcgtgtaatagacgagcgtgaaatagaggtttggggtggggtaagtgatgtgttttgaaattaccgaactatccttttgacaaagaagaaagataaaagtgaaatattcttttttttttttatttctttttaataacccctccaatttaataattgaaatacttatcaatataaatttattttctaaactaattcatatacataaaaatctatgtatttttctctataatttgatatgcattttgttaatattttttaatatattacagacattttatcagtagtcggtacacttaattatgtgtacagactttattttgtatgttgcattagctgtacagagtatataattgtatggagtatacaattatcagaagtcacttttcactgttgattcgtacacttagacctgtacaatatttttagtgtatatatatatatataaatatacacaacatacacttacatctgtacactaaaaagtgttgtacagatctaagtgtacgaatcaaacagttaaaagtgactactttgcaaattgtgaatagtaaaatgactattttcccaattatggctggacgatttcaatttgtacttattaaataagttgtataaataaaaatctgtacacataattaactgtactgactactaataaaaatgtttatataatatatttaaaattattaacaaaatgcatatcaaattatagagaaaaaaatatagatttttatgtatctgaattaatttagaaaataaatttacattgataagcatttcaattattagattgaagaggttattaaaaaataaataaatatatatatatataaagaaatacaaagaatgagagtatgaggagagagaaatgttgaatctaaaagcacaaatcccaattgctttcaacgacattagagaagaagaagattagtggcatatttgtaaataatagagttggtatggggtatatttgattttgtctgtaatagggtcaaaggtcagtgactaaaaatccaattataaatagtaacttgcccaattccataattaagtttaaataagtgactactttgcaacttaaccctattattatcaagattctaagagacagatgtttattgcaagtcggaaaacaattgcctcttcggtccaaaattaacatgtaaatcaaaattcatggccattctaatagttgagaaccttcatgagagtatttaaatatgtatctcaacttatgtcgcttaaagttatagttacttgttgtaagttgtaactcttaagagcaactcatgtcgctgagattatcgtcgctaccgtctaagcacaaaatgttgacacttgattccgagcttcggctgctgctcaccggccggtttcgacatgatctcacactgtacaccgaagtcgccggtgctttcgtcactgaatgtcggaaattccccgccatgcttccttttctaacatcctattaacacataaacaaaagtactccaaagttgaaagtcgttgaaattcatggttgatgacctttaatatcatttcatttgttaccgtaccatgtgtctcaaggccatgtcgatggagcttttagataggtttctaccaaacccaaaaccaccagatccagagctcgacttcccagcggaggagtctccgccacctccaccaagtcgtcgactgccgctttctgtcagtcgcggtgtagcaagttttctcatattcacaactttctcgaccttttgattccccttagccgcatgacttatcaatctaccatcatcgttgttagtctttgctcgttgtccacgtaacgaaggaacagcaccatttacgtttccattaggagctcggcttctagaaggcgaacacgattgcctctttgcaacatcgcgttctgtggacgctgatcttgaactacttgacgcatcaaaggctctggttctgctacttgaagcggtttgtggcctatctggtaacgtagttctgagattcgatggcgcttctactgagaatccaggcatctcgtaaggttcccatggccttgatctcacgatcggagaagcttctaaagacagagccggtttactcaaaggcttagttggtttacttctcagtacagtcgatgaaccgttcggagttgatggacggcgagttggagtacttgacctcgatcccggttttgaattaggagccgacatcggcctgttattggatcgagtagaggtggctgaaccggtagtttgttggtctgttgaggtggtgggcctggttgcacgtgcagcggttaaggtaacacgtgaggttccagttccggagctagaggaaggtctgctccatgatcttgttgagctagtagtagaggacgaggttaatgtcgcacgtgtagttgttgaggtggcacgtgaggtcggcgttgatggccttttggctggagttttagactttctggttggcgtgggaggtctactcgttgatcttgagctactagaggacgatggtcttctgattccagaaacagaggaggaactgtgtaacgacgtcgtttggtgctcggactcttctttgctatagttctctaactgcacataaaaaaaaaaaaaaaaaaacagagatgagcaagagtgtgacgtatatgcagacacttaaaaacaaagagattgacgagattagaccacgagatatactgagtccgtacccgagatataagagtcatcaggttatcatcgggtgcgttgaggtggttcgttacgtttctactcggtgagcctggtggcgtgaccagcctgaacaataagaacaatcaataaagatcgatggcaacaaatatataaatcgattatgttgaaacattggcaaaaggtccaattttgaaaaatatatatttgagatatgtaacatcaataaaagtgattgaaaagtacaaccataactagttaacaaaaacaaataaaaatccatagctagtgaattgttttttagaatgctttaccaactcaaattctgatgaacaagatcagacatcaaactactgtctagcaagaagaataaccgagaaaattgatcaaatttactctctttttgttcggtggaatgtgtgctacgttctatacgaacacaaatatttttaatgcaaaaatgtaacaaaacataataaaaaggggggaaatgtttcaaggcaagatttttaaatcatgatcagacttttagagagcatgatcaaattaattaaaagggggaaatgattaccattcgtaatcggacttctcgccatcggagtacaataagttctccccggcagttctccggacagggtattgttgagacgacatcgccgtcgtactactagtattatcagattctgccaaaaagataaatcagaacaaaaaagaagataatttttcgacaacatatattaacacatatacgaacacggacccattaaaagcgtaggtcggtgacgtttctcgcaacgacgcatctccaggaacaaaagaagctcttcatctttgttttgggtcaacattttaagacattttttaaattaaattgctgatgctggaagaaagtggtgaagatgttcttttacgtgttttttcttcttcttattatttgaaaatgtcagattatcattcacacccctactaatgatatatgtataagcaagtaatatttattattaaaaagtaaggaaagtaattattgttgttttttacttatatcatattaatgtattttggctactactaagagaatttttattattttctccagcaaaaatttaagagattttttttctcaatgatattattagtttatatctttactttaaaaaagaaatacaagattatttctcaatctccactaaatttctggaaatggtattattaaatttcattagattttcttaaagcattcaattttattatatctttagaaaaaaaaaatgccatgctggaaataaaactaaaaatttacaatacattaatccaaggtgccgaaaaaattctcacgagtaaaatcaatgcatctgtgtgaaatatatgtgaatctcgcgtatagatgagtttgtcttacattgaatccttccaatgttgtgatatatttttaagtttagcatgttaatgcaaaaatgacttatcgatctcccccatgtcacaactacaagcctcaactctgctaataagaaataaacgaaggattccatggaggatcaatatgtcgttatgtgtccaattcccgattctacttaaatgaagttggtttgagagacattattcttatttaagtggatttaaagctcaaggcccaatacccattttcaaaggcccaaacattaactaggttctaggtatccccccccttatgtttttattcagcaacagtttcgaatatgtttcgtctagacgagcgagactctctctgctaggtttcgatttcaatttcgatatcagggaccattttcctgattcttcgaattctgcatagagaagcgaaattgggatagatctcgtttactttgatttgtcaatttcctgcattctattatacgggttttgtgtttcctcgcaaattgatacagactgttgctttgccattgaattatttgctgcgatggacctaaatgcttcaccacaacccgaagaagacgatgaaccctttaagagacgtcatgaagatcgaatggaatctgctgttgagatcgctagacgggtacaataacccatatatatgaattgattcatgtgttactcgtacttgtttgaatatgtttggagcaagtttgatacttttggatgatgatatcgcaaattcgttatctttttggcgttataggagcgtgaagaacgaaagaaacgaatgagatttgataggccaacacgagtctctcagccggcttttcgtgatcagtatagagatactagagtttatgatcaaagcaagcttcctcagggtaaattatatgctttgccacttcctcaaaagatcattttaggttcattggtatgtggtttttttcttaacaggttggctagattgtcctggttttggtctggagataggatgtattattccttctaaggttccacttagtgaatcttacaacgaacatgttcctcctggtaaaagatactctttcaaacaggtggttcgtaaccagagaattaatggaagaaaagtaagtgaaaaaaatacatgaatcaatctttttctttgctatgttaactctctaaaggtaatgggtcttttgcagcttggtctagtcattgatcttactaatacaactcgttactaccctacattagacttaaagaaggatggcatcaagcatgttaaggtgactagaatacatttttttcttagtgtttgtatcgtctgcaccagtgttagccgagtgctttatcctctttttcctgtttgtagattgcatgcaggggtcgtgatgctgtgcctgataatgtctctgtaaacacctttgtcaacgaggtacttgtttcataagttcagttctcttcttgactgacgaataagttcaattcacgtgaagtttattttctcctcttgcgttttaattgaagctcataattatagctcatttgaggacactgtcttcaggttctgcagttcgtccttaatcaaaaacacgcaaagaagtatgtcctcgtccactgtacacatgggcataatcggacagggttcatgatagttcattatctcatgcgctctatgccaacgatgaacgttacacaggttcaattctttctttcacatttgtacttgttcactcgttttattaatcctctttagaatggagattcttacctctgtgtggcctttggcaggcattgaagttgttttctgatgcccgcccacctgggatttataaaccagattatattgatgctttatacactttttatcacgaaataaagcctgaaagtgttacttgcccaccaactcctgaatggaagaggtctgccgagcttgatcttaatggtgaagctgttcaagatgatgatgatgatgattctccgcctgaccctgttcaagtaagcgtggtgcaagcaagtgcttattctttaataagctcttatgtttaaccctcatattacagaattatccgttccaatgaatatcatgcatgcattgttaagctcttacccttgtgaatacagagctcataattttacgaacggctaattttttttaaattctagcttcataactattgtttcgaggtcatatattcactacacagtgatcttggaaaataacggtatcatctaaacaaatgaactgttctaaagattatctatttgtgcatgttgatgggtgcagttgagtctttcaaagctaacaaatttcataaagtgtcaatctcattttgcttgagttttctaatgggtctcttgctgatactgcctttctttactgttttgttgtttcaggaaatcaatcaggagaatgtgaagatgtcaaatgatgacactttgggtgatgaaataccccattatcaggaggaagcttaccggcaattctgttataaaatgcttatgatgaatgttggggtatgatatcaacactgcttatatgttttcctagttttgttcttctctatctatgttctcctatggaatattatgttgagcccaaatgttgtttccggcatgtatgtttcattaaaagcatgctaaatgtttttttagactaatgcaataatactaatcttcattgattggaaataatgtgagatattagtcatttgatggactaaaatttctctgatccagggaagaggatttatgcaattcccaggttcgcaccctgtatcattagacaggtcagaatctctgctttacttttggtattgcgtacaaagaggatttagcaagtgtatgttctgaattccagaggttcattagtcctagtttctcaatgtagttaaatctttacgatttttgcatacacagggagagtttgcaacttttgaggcagcgatactattatgcgacatggaaggcagatggaacacgttatatgatgctcttaactatagatgggtgctatttgatagataggagctttaagtttcggagggtacagatgcgttttccctgtaagcactcacgtgaggtcagtaattttctgtcattgcttttgtgttgatatctaaaacttgtgaattccctgacttatttggttttgggtggtagggaatttctgataaagtgcatcactacactttgcttgatggagagatggtcatagataccccgacaggtgagcaaggggaggcaaggaggaggtatctcgtatatgatatggtagcaatcaatggtgaatcagttgtagaggttggaactgtcgatccattatattatcaatttctttggaatgagttcagtagcacgagatcttagcattcattgttttccatcatgtcactgtcatttctactcggtatcaaccagtattatagatgctaaagataacttacagttgatttaaatatctaccagcggactttctgtgaaagatggaacatgttcgtgcgtgaggtgatcggacctcgagcagctgagaagctcagaagtcattgctacagatatgaccttgagccttttgcggtgagtttgcattttctgttccatgccatattttccttctcctttatataaatttgttggtaaaatttcattgttgcccaggtacggatgaagggtttctggttactttctactgttgagaagctgttgaagaataccattccatcgctttcgcatgaagcagatggcttaatatttcaggtaaccaagagatgtttatatttcaggtcttagtcaatattttttcctgaacgcagacagacacaaatttaagagattagtattatttgtttccctggataaagtaggaagattgcattacttgagcatgacttacatttggtttattagggttgggatgatccgtatgttccacgaacccataaaggtctactgaagtggaagtatgcagaaatgaactcagtagactttctgtatgagatgggtgaggaagaggggcgtggtttcctcttcttgcatgaaagagggaagaaaaagcttatggaaggatattcagttgagtttagagatgattcggacccgtcaagttacaatgggaagattgtagaatgtgcttgggataaggataagaaagtttggtttagcatgaggatcagagttgacaaaactacaccaaatgatatcaacactgctcgtaaggtcagttgaaggattttctatatatttaggtattgcttttgtcaaatggttatattctctacatgatttctaatgtgatgttgtaacacaataggtgataaagagcataaatgataacatcactgaggaggttttgcttcaggaaataagagagatcattcgtctcccaatgtacgctgaccgcattcgaaatgatagtcaagctgcccgccgccggtagagattacatttttcaattttgtttagtagtaatacactagaacgaactaataattgttttgggcggtttctcttctctcacacttgtacagctaaataatctacatggttatacacattacatctagtttgtttcccaacggaatttgaaactagaattatttcattgataatcctcaatacgtgatatggaattattaactatgatacatatccaacggtgttatgactataacgacgaacgacatattttaggccaaacacgtcaagatggcttctcctagcacgtgcccttcaattgcgatcagcaatctctctttcgtcacctagctcatattcagaacaactatttataaaaaaaagtactacataaagtactacatatcattcaaatcagataggaaaataataaaacgatgtagtaccgtgtgaccaatcttgggtttatcatcgagagcaaaaagcttgaactgaaaacggtgaccgtgactaggtaagagaggtccacgccatcccggaatcttgtgatcgttgttcccttcccgaataccggtagtctgatcctcattgccggaatatccttccggtaggcctttcatctctggtggtatgtcgacgacaacccacaccgtccatggcaccagcgggccactaggatcaggcgcatcgatgtcttccaccaccaaagctagcgtttttgtaccttctggaacgttgtacctacaccatatcaacattcttactaattcaatgcaatcctttgggtcggtcaataaaccacaaaataattaaaaaatggaaacatgttacttcaaacagaaaaaaacaaacaactaggaagccttgtgaattgtgataattaacaaatcgacaaaattaataatctctgtttcagcatcatgaatcaaagtcataaataaagagcgatcgatcggtaccattcaagaggaggagagatgtctttcttaacaccttgacctgccatcgtatactttctcggcaacttcccatcgttgtctatcgtcggcgaaaccagcctcaactcctcactcgacattcccttttacttttatgctatttcttacttagttttatcacaaagagtctcttcttttctactttcgtacatatgaatgctcttttcgtgtttgttactgatttgtatggatcgcctatgtgtagaaacaacgccacgtgacggtcttgaatgacacttggcgtcatgattgacacacggcgtcataggaaatctggcgaagacctgtgtttgagcacaactctatattgggctttattgggcctaaattgtattttttcctctctactatattagcctgtctcgttcttttttaaatcacgttatcttattattaaaggaccacttaacagtatactaattattgttttaacaattcccaccaaaaaaataattattgccttaacaataaaacaaagataattttaatataaattaaatttgtttaattttaaaattacaataaaagatatttcttattttataaacaaaaactcttctcatctttttttcttctattttttaatttattaaataagaatatctaaattaactaccttctaactaaaattaaagtgatttccatgtaatatttatcaattttgaagtcatagtaggatgctctaacgtgagccgttttaaccaatcgttaacaaagaattcgtctattaagacataaccatgatcaagtccgatgaatctaatagacatgttatccggtttgcgttccatgacagaatatagccaattgtctatatcattgtttctatttaagtatacgttcatgacatctggtgtgttgcataggtcaaacacgcgcgatagttcaaggaaagtgcgttagtgatgaccacgacacaatactgcactttgttttcatatcgggatgctccaagctgagtcactatagccatttactgtcaaagaattcgtccataaaacaatatttgtgatcaagacggatcaacataacatgcatcaacttactattaaaatttaagagtaagttaaagaaaatgttaaaaatttcttaggttggcccattaaattatattcaaattaattctttatttttcacattatatattaaatctaatagaaatttattctagattcgccattgccgtgtaatacatgaacaaatcttttaaagatggacatcgcatatgatctaccgagatcatatcatgatagtctagctgcacaataatcccttatacgaaatcattttcagctggatgctttataacacaacattatattaggttagtgagcctatagctaacttgttttcttttttcattaatcattgtttagatactcatagtaatgattttgagataagtatctatttttcaaatgatatatcaattttaaaaactcattacatcatgtcacaacgttaaaagtataattatacatatatacaaaaaattgtatgtatgttacaaagaaaacattgctaattttactatgtctgagtcactatatgcggctggaaagtaccaaaataaatgaagacagtaacatgagtccatcaccatcaccaatatccaaaacttggctttcacatttattttacttatgtaactactatacctttatttatttattcatttttaatccttagctttgttgatctagtttggcaaggtaagtctataacgtccatcggcccgaatccttctttttcatttatttcaaaattaacattttcttcttcggaaactatgacaaagctttttatgtaacccaaaaataacttaattacactgtatatccttctacaaatttacctatatcaaattatgttattatatattgtaatggcttttaagagacaatggagacattttctagaacatagcatttagttagatttgtacaagccatttcaaaacttttcaaaaacaaaatcagcaaataaccagttttgtctttaaagaatcgttctttcgtaggaactagcaactgggaaggtgtaaataggcgatttaaggaaaatatataattgaagaaaaataaatcaaatggtcgggactttttatctcacgtgaaagtaacgtcgcatttactcaacagtcgagacgacagttacatatttcacagttttaaacttgtaagttaaatttaacaaaaaaagaaatacaacttcaaacataatcgttgttaagaaatttcatatatatcattcgtttctatattaatacaaaaagaatggtatgggaaataaaatagaaagaatagaatgactaaatcatggaacatgacatgaatacggtcactgtttcaagctcatgcgtcttttccagcatagtagtagtagtagttgttgttgttgttgttatccggtcttttcaaagcaacgtacttcctatttttcttacttgtataaatccacaattgttttactcaaaaggaaaaaaaaactatcaattttgcaatttggctagttaattcaatttatatctatttgttttaaaactatatttgatctgtatgtgcaatttatttactgatttgaggcttttgagcatatatatttagtgaatcgattatagaatttgtattgaacaatgagagaagaacgaagacatggattgggacaagtactatacataaacgtgggtaatgtgctatgaaggtagttgtttgagaagacagtacgtagagtttgagctgtaagaaatgattagggtttgtttttcgtctgcacttcagtccaatgttttcaccgaaccccactactacgtgaaacccggagcctcacgtgctcttgagatctttttaccactaaattaaccagttcgtatgtaactatgtctatatatatgtataaccatatcatgtaacagttataaaccacgacaatcacaatggatgatttcaatcttcgtagcgaaaaccctaattcatcatccaccacttcctcatcctcttcctctttccaccgtcacaagagcgaaaccggaaacacaaaacggtcaaggtcaacgtccacgttatcgacggaccctcagagcgtggcggctcgcgacagacggcaccgaattagcgaccgtttcaagattttacaaagcatggtccctggtggtgcgaagatggacactgtatctatgcttgacgaagccattagctacgtcaagttcttgaaggctcagatctggtatcaccaaaacatgcttctcttcataaacgaccacgaaactacatcatcttgtacttactctcccggcgctggagaatttggaccgaaactctttggttatgatgacgattatgcccctataatggacacatattcacaaggcgtgccacttacggttgcggactcgaagtatacgccgtggtttggttcggttgatgatgagcaagaacgtgactcgtcctagtcgttgccatatatgcaacattatgtgatttacatatccagaatctaccgtcttccttattctcgcaatacttagtaactatagtttaaggattatattatatgcgtctactatatatatctgagtgtatctaatttagagattgtaatatacatgagtatgagactaattaacctatagtatttgtattgacgtatggataatcacttggaaacacgaaaaagagagtatacaatactgtatattaattatggactttaaaaaaaaatcagcattttctagacaactttttcattatcttcacacaaaaaatagataaacatggattaccaaaaaaaagaaaaaagataaacaggcgttttaatgtaaatttgggaaacagcacgtcgttttcatgatgcgaagacgtcacgtatttcaaatacaggcgtgccacacgacacgcattacgagggcactgcaattgtataatcggagaaacagaggaattcgccgatcaacgagagaagatggaagtgcaaattgaagaatctggtaaaaatcaaacctctccggaatcaattgaagcagacaaagcgaagcagatagtggtgcttctgattggtccaccaggaagcggcaaatcgacgttttgtgacaccgcaatgcgttcctctcaccgcccttggtctcgtatctgccaggtctctcttttttatcgattgttttatattgcacataagctgactgatgaaattcttcaacgagactaagtatttacaaaacttatgtaagaaatatctgtcttggttgctatcaatgtaagaattttgtgttggcttagatttcatttgtttaacttatttcaggacattgttaacaatggcaaagctggaacaaaggctcagtgtttaaagatggctacagattctcttagggaaggcaagagcgtctttatagacagatgcaatcttgacagggagcaacgttcagagtttattaagcttggtggtcctgagttcgaagttcatgcagtggttctggagcttcctgctcaggtttgtatatctagatcagttaaaagaactggtcatgaaggaaatctacaaggtggaagagctgcagctgttgtgaataagatgcttcagagtaaggaacttcccaaagtgaatgaagggttttctcggattatgttttgttacagtgacgctgatgttgataatgctgttaacatgtataacaagcttggtccaatggatacccttccttctggctgttttggcgaaaaaaaattagatactaaaagccaacccggtataatgaagttctttaagaaagtcagtgctctgcctgcttcatcttctaatgaagctactaacacaactcggaaagctgatgaaatgacagcaaatgtccgagtttcgccagtcaagcttggttctgctgatattgtacctacactggcattcccatcaatttcgactgcggattttcagtttgatcttgaaaaggcttctgatatcattgtggagaaagcagaggagttcttgtctaaacttgggactgcgcgtctcgtcttggtggacttgagccgcgggtcaaagattctatctctggtcaaggctaaggcttctcagaagaacattgattcagcgaaattcttcacatttgttggggacataactaagcttcgttctgaaggtggtctacactgtaatgtcatagctaatgctactaactggtaagcttccattattttcttgatcttcagtatatacatcttcactggatagctaattttgaaagctaaatgtgtaggcggcttaaacctggaggtggaggtgtgaatgcagcaatattcaaagctgctggtccagatcttgagactgcgacaagagtacgagcaaacactcttcttcctggaaaagccgtggtagttcctcttccttctacttgtccattacacaatgcagaaggaattacacatgtcatacatgttctaggaccaaacatgaacccaaaccgaccagacaaccttaacaacgactacaccaaggggtgcaaaactctccgggaagcttacacatctctatttgaaggttttctatcagtagtacaggatcaatcgaagttgcccaaacgaagcagtcaaacagctgtgtcagattctggtgaggatattaaggaagactctgagagaaacaaaaagtacaaaggatcacaagataaggccgtaactaataatttggaatcagagtctctggaggacacaagaggcagtggaaagaagatgagtaaaggatggaacacatgggcattggctctccacagcatcgcgatgcacccagagagacacgagaatgtcgtgcttgaatatttagacaacatcgttgtcataaacgaccagtacccaaaggtaaaaaagtcttgatgctgatttataaatatagtatctttcttcatgtgacaaatgacaaataggatttttcaactgagtttaggcgcggaaacacgtgctagtactggcgagacaggagagtctagatgggctagaagatgttcgcaaagagaatcttcaacttctgcaggaaatgcacaatgttggtctgaaatgggttgatagattccagaacgaggatgcatctcttatcttccgccttggatatcactcggtacttaagtcatcctttacattcaaagcactgctgaattttctgtttcccctgagtgtagacttcagatttgcactttctgttcggtcgttttagaggttaaacctaagagttcattagcaaaatcattgaaattgatatgtttaacatacattgagtttttctctttcaggttccctcgatgcgacaactacacttacacgttataagccaagactttaattcagatagtttgaagaacaagaaacactggaactctttcacgacctcgttcttccgtgactcagttgatgtacttgaagaggtcaacagccaaggcaaggccaatgtggcgagcgaagatctgttgaaaggtgagctgcgttgcaatcggtgtagaagcgcacacccaaatattccaaaacttaaatcacatgtcagaagctgccattctcaatttccagaccatttactccaaaacaatcgccttgtggctagagcagagacgtagtagttataacgaccggttctatttcggttaggatttttttttctttgttatctaattgttacgggtaatatatattgtgattttggttcagattcagtctctgtaaaaattcatctctgttcttaggttttcatcttcttctggttattaagtttttgattttgttcttgagttataaacttaaatggcaagaaaacaagacagataaaaagaaaaaaaagtcaaataaattttaacccaattgagatgtaagatggtttaaaaatgtttgatttaggttgaatcaattgatttttttcggactttacatataagaaaaagcacaaatattgaagaatattagggaaaaagggaattgtattacaccatcaatggtaatggtacagtacaactaactggaaagtatcaaaagcaattaaaaccaacggtcgaaaattcgaaaattcgaacagaaaacaatctaattcaattgcaaagaaacgagagatgcttgagtcacactcaagattcttttctcttgcttctactgaggattgggaggacgaccattagcagctgagacgcgagatccccactcaagcaactctttgcttgtatcatctttgtgaacaatcacttcaatgaaacaaagactatctttcttctccgttgtcgcagtcttaatcgcttccactaactcctcctcgtatctcacctgccaaacacaatgttacttcaacaccaaattcatacgttagttactagttgtaatcattaattacctttgtggtccagcattttccttcaccgttatgaatagcatcgacaagaccagtgtagttccagttcttgataacattgtaaggaccatcatgaatctcaacttcaatggtgtagccaccgttgttgatcaagaagatgatcgccttctgtccgttacgaatcatcgtggatatgtcctgagcagtcacttggaaactcccatctccaatgaaagacaacactctcttctccggggttgcttgggcgtatcctagagtcgcaccaacagaccaaccaatggatccatactgcatctgaaactcgtacctacaatatagagaacaacttttctcaaaacttgtgtttgtttcgctattgtcacaatgttagaaatgtcaaagattcagtttctttgttagacacgtacccacatcctttaggcagctttagcttctgacaattgaaccaagaatcaccagtttcagcaatcacagcggtttcactagagagcatcttctgaatgtgttggaacattgcgttgaccctcaatggctctcctggtttgcatttcaatggcttaccttcaggtacaaagatcctctcatagttctcataagctgtctcgttacgcttaaccctcttagccaactccctgaagaaatcgctcatcagaacgcaaccaaacgttggaccattagccacaacgactcgatcaggatgcacaattattgctttttctttcttgaggagaagagagtaacctacggagctgtagtcgttgaagattggacctgcgaagatgtaagcatccgcagattcgacaatctcagagcagaaaggtgtgcttactgctccccagtaagtgccaatgaaatgaggatggttctctggtacaaggccttttgtagaaggcatcactgcgagagggtagcctgaagcatcagctagctccaaaaaggcctcacttgctttagccacacgcaactttgggccaccaaccataactggcttcactgccttgttcagaaactccaatgttgcttccaccgcagcttctaaacccatcgtgttgctcatcctaagaaacaatacatacaatagtgagaaatctaaaacaaacgttgattcgatgagtctgtttagagtaatgattacctaggagttaggtcaaaagggacaggatcacgagcaaacgtaggatgaggagttgcagctaagttgcaactgatgctaatgtacacaggcttgctctctttcaaagctgttgctatcgccttgtcgatctgttcatgagcatcctccaaattgttcaccacagcctgaaaacaaacacatagttaaaatctaagcaaaggagatatatatgtgatgatcaagactagttgatattgaaatgtgttaatacctggtagcaagtaacagtttggaaacacctaagctcttggctaaagtcaggtaaaccgatggtgtgatgaagaatccggttagtgccaaaatcgttggagttaggacctccaacgatacatataactggtaggttctcactgtacgcaccagcgatagcgttcaaaacgctgagtccaccaacggtgaaagtcacgacgcaagcaccgactccacgagatcgagcgtatccatcggcggcgtaaccggcgttaagctcgttacagcatccgatgttgttgagctctggctcggcgatgaggtggtcgagaagagttaggttgaaatcaccgggaacagagaaaacatcggtgactccggcttggacaagacggcgggataagtgacgtcctagagtcgattcggaggttgtggtgatgggagcggagtcttggattgttgcgacggcgttgcttggtggacttccgatgtcaccagttgttggcttacacgtgtcgatggctccaattttggtgtccattggaaagcttattatgaagaaaatgaaaccttttagtatttattttagtggtgatgatgagtaataaattggaattattagatgggttatatagttgtacatgttgattagtgcaaattacattcggtttctgacttccttgtgccaaaagcataaagatttactgaaatatttttgcaattttcttgctgtcatcttacatttagttacttttttacagatagaaatttacttatataaattgatacttatatacacgaaacacggacgttttattttgcactaaaaaatttataattttttgtgatacgaaaagacattttacgttagaagatgatgaaaataaatttattttcaaactatattagagtataacatggattttttattttatttttgttattaactatatatgtatctttgaacttgtttgccaagatgaaccattaatgcagcattaagtctctgattttcgtcttaactatgatataacttacattaagtagctgccaaagaaacgaaaaagaacctaaagaaatactagattcgtattgttcaagaattttattaccttatattgagaagttagtataattattggaactcaataatttacatgcacgtaaaggcattaataagattagaatattccatcctgattccatcaacaattttcatttcacgtttaagaaaaagcagaaatattgaagtttataatgaaaactttgtcaacaaggggttccctaatatgaaggatattaaaagcaaaatcaattaaaaccagcggtcaaaaaatcgaaaccagtacttaattagacataagagaaagaacaaaagtagcgatgtgattagattgccaataaacgatagatgcttgagcgacactcaagattcgtttcttttctcttgcttctactgaggattgggaggacgaccattagcagctgagacgcgagagccccactcaagcaactctttgctcgtatcatccttgtgaacaatcacttcaatgaaacaaagactatctttcttctccaatgtcgccgtgttaatcgcttccactaactcctcctcgtatctcacctaccaaaaacacaacattcataatgttactcttcaaccctggactcatatgtttaatttccaactgtaaacatcaattacctttgtggtccagcatttgccttcaccattatgaatagcatcgacaagaccagtgtagttccaattcttgatcacattgtaaggaccatcatgaatctcaacttcaatggtgtagccaccgttgttgatcaggaagatgatggtcttctgtccgttacgaatcattgtggaaacgtcctgagccgtcacttggaaacttccgtctccaatgaaagacaacactctcttctccggtgttgcttgagcgtatcctagagtcgcaccaacagaccaaccaattgatccatactgcatttgaaactcgtacctacaatatagagaacaacgactttttaaaactcttgtgtgttttttcttttccagagaattactaaaaagttctggggatatctatataggcccataaatcatctcaggctaaataccaaggcattttatatcgtttccaaccaagtacatatataccaccactctttaaccagcaatttctagatgttgactttactagatgagcttatattgactgcttcaacaatgttaaaaggtaaaagatttagtttcctttttctagatacgtacccacatcctttaggcagcttaagtttctgacaattgaaccaagaatcaccagtttcagcaatcacagcggtttcattagagagcatcttctgaatgtgttggaacattgcgttgattctcaaaggctctcttggtttgcatttcaaaggcttaccttcagggacaaagattctatggtagttctcataagccgtcttgttaggtttcaccctcttagccaactccctgaagaattcgctcatccgaacgcaaccaaaggtaggaccattagccacaacgacactatcaggatgcacaatgatggctttttctttcttgaggagaagtgagtaaccaacggagctgtagtcgttgaagattggacctgcgaagatgtaagcatccgcggactcgacaatctcagagcagaaaagagtgctcactgctccccagtaagtgccaatgaaatgaggatggttctctgggacaaagcctttggcagatggcatcactgccacggggtagcctgaagcatcagctagctccacaaaggcatccctagctttagccacacgcaacttgggaccaccgaccataacgggcttcacggccttgtttagaaactccaatgttgcttccacggcagcttctaaacaatccttgttgctcaacctaatttaagaaacaatccacacatctttgagcttgattcttgaagagaacaggattgatcagttatatttaccttggagttaggtcaaaagggacaggataactagcaaatgtaggatgaggaatggcagctaagttacagctgatgctaatgtacacaggcttgctctctctcagagctgttgctatcgccttgtcgatctgttcatgagcatcctctaaatggttcaccacagcctgaaaacaaacacactgtcaaaatctaagaatgtgatgatcaagattcgataatgtggttatacctgatagcaagtaacagtttggaaacacctaagctcttggctaaaatcaggtaaaccaatggtgtgatgaagaatccggttagtgccaaaatcgttggagttaggacctccaacgatacatataactggtaggttctcactgtacgcaccagcgatagcgttcaaaacgctgagtccaccaacggtgaaagtcacgacgcaagcaccgactccacgagatcgagcgtatccatcggcggcgtaaccggcgtttagctcgttacagcacccgatgttgttgagctccgggttggcgatgagctggtcaagcagagataggttgaaatcaccgggaacagtgaaaatgtcggtgactccggcttggacaagacggcgggataagtgacgtccaagagtcgctgcagaggagccgagtatggttgcggcggtgggagcggagtcttggattgttgcgacgccgttgcttggtagacttcggacgtccattggaaaatgagcttaataattaggatatgatgatgaagctctctttgtttttcttgtgagcagtataatgctgttggattatatagttgtttgtgcgttgtagtagattcaaaacactaccagtttatttcgtaataaaattgtttagtaattatatagttttttatacgaataatgcatacgattatattataaaatgttcaattagacatacagaattaatcatctgattttcctctctggacttacatttaattcaacgtgcaaagaaacgaaaataatatattttaattgtttataaagatatactgatcagttgtattattgttcaagacgacttgtattaacttgaaataaattattagaattcaataatttacatgtgatgcgcgcaagggtagagttacatcgtgatcccataccataatacttcacatgtgtatgtggccatatttaacaacattgcgagtctttttgttccttgcttcttatatagttaaacgattcatactaattctgttacttgggatttgggaacaaattgttcttgttctcataaattacactcttatctatgttagtaaacttacgacgctcattataaagtatcacatgaacaacaaaaagtctccatggtgatggaacattgctatttcattaatatttaaatggattattaatgtgttaacgtgggagcacatgttaacgcgtgagaacaagttgttatgttttcataacattaaaaccaaaaaaaagggttaataacatgttgttaaacaacaatgtatatttcaacgtgtaaattttttttttgccagacattctaacgtgtttagtgattaccttgaaaactatctcttcgaatcattgttaatatctcaaaccaacagagtcgccggtaatatattcccaacattcattttgagtacataaacaatgtgaccaacttttaggcgattagggtttttccgtttctgccgccgcgttgctggtcgccggcttctcgccggttgagatcttgtcatgtctaagaagaaaaagaagatccctctccttcctgtcagttcaaagttcgctcgggttttggcttgcgctcagtccggctctgtccccctgtcgtcgtctgctccttccggatctgcttcgcctccttcctctggtcttccctgcgctggctctttggctctggttctccctgttcctctggttttcgacttggaagagaattccttgtctcccgaggttatttcggagactgtttctctcatcccgaagtcgtctactcttactcctctggtagctattgaagcgaatgggtcatccattcagcctctgcctactgtaatttcctcctcggttggcttgggatcagtgtccgagatctcctccgctggttcccccattttgactccttcagttggctcagctcctctcttagctccgagctcagggcctgttggctcctcagatatggttgctaccaagtctctctctttgggatctgctattcctcagtcttcgactcctatttcgggctcttcctctcaggcccccagctccgattcaaaaattgatcttccttgggtagctaagtttaaggcttcactgcataaccttaagcaaatgagtcagccaacttacttggaagatggtactccggttgtgatcgctccttcctcggtcttgttgaagtctgctgctttgtggaagggccatgtcgtagctcaatttcatggctcttgtcctcctgcaacccggatcttctctgatttgaatccaatttggggaaattacggtgatattaccgttcgcatcgtctccgagactgtggctctgatttttattccggctcttaatactcgccaatgggtggtggatgtgggattctggcaagctggtaactgttcttgtacagtctacccttggtcttcagaaggtctccttaatattgatgagttgaagactgctccaacctgggctgtattgaagaatgttcctcctcagctctattcgcttgaagggattagtgttattgctagtgccataggggttcctcttcacacagaaaaatcaagattagaccccatcaatataggttcaactaaagttaaggtggtgatcaagctggacttgcctcttccttcttctgttgttgtaaaggatgttcagggtaattctgctagggttgatgtggagtatcctcgacctccgccgaagtgtttaaattgtggtaaatacggacatttattgagtcgttgcctcatccctcttcagaaaaaattgccatttaagaaggactctccttcaggagccaaagaggtggctcttcctccaatattcttccggcagctggaagtagtgactcagttagaggtgtcgacctttctcctcctattgcagctgagatacctttgtcgaaatcaaaaaggaggcgctctagatcaaaaaagcgatcccttagctctcctccacggattactgaccctctattacctttctctccccagtcttctctttcatcgcagactttggctagtaaaaggtgggttgcaaaaccaggaacgatctcatctgatctcaaggttggagtaattcagggttctggttctattcaacaagctgctcaacctaagaggtctatgcgtgactccatcaaagatccagatcccagttttcccttgcctatgggttggacagtcatgtctactaaggctaagaagaaagaactcaaaaagtggcataatcgtctccgttcttctgaggcaggttctattgatttagctgctagtaaggaccttgaaggtccttcttctcattgaaagctgtgctttcaccttcaccttttgttgtgtatatgaaggtccttcttctaataatcttcttgtcggatgttttttggagactcacgtggcagaggagaatgcaaactcggttttggcctcaacccttcctggttggaggatggatagcaactactgttgctctgatcttgggaggatatggattgtttgggatccttccatctcagttttggtttttaagaaaacagatcaatttatgttatgcaggataaagctgcccaatttatctcaatcctttgcggttgcttttgtgtatggaaggaataatgatattgaaaggagatctctttgggaggatatttctgttttgtctaggtcctcccctctctctcataccgcttggttgctgttgggggacttcaatcagatagcagcttcttctgagcattactctatcacacagtcagccttcaatattcgtggtatggaagattttcagggttgtttgagggacaatcagctctctgatctgcctactaggggtgtgttcttcacttggtcaaatcatcaacaggataatccgatcataaggaagctggacagggctttggctaatgatgagtggttttcttccttcccttctgcattagcggtttttgatcctccgggtgtctccgaccatgcatcttgtattgttatgattgataaccagcctgagccttcaaaaaaatgcttcaagtatttctccttcctatcctctcatcctacttatttggcagctttggctgttgcttgggaggaaaacacaatgatcgggtctcacatgttcaccttaaggcagcaattgaaacaggctaagttgtgctgtaggaagctgaacaggttgcggttcagtaacatccaacagaggacggcccaagcgctgtctcgtcttgaagagatccaagtagatcttcttactgtcccctcagactctctttttcgacaagagcacgttgcgcgtaaacaatgggatttcttcgctgctgctcttgagtctttctttaggcaaaaatcaaggataagatggcttcatgaaggggatgctaatacgagattcttccataaagctgtgatttctcatcaagcaaataatctcatcaagttccttagaggagaggatgactctagagttgagaacgttgatcaaattaaagggatgctggtcgcctattactctcatttgctaggttctccgtcggagaatgtcactccctttcctgttggcaggatcaaggatctgctatccttccactgcgactcttctcttgcgactcagttgactctggttcctactgacgaagaaattacgcaggtccttttctctatgtctcggaacaaagctcagggccctgatggttttccggttgagtttttcattgaagcgtggcctattgtgaaggttagtgttgtggctgctatcagggaattctttttgacttggatcctctctaaaggctttaacgctacaacccttactctcattcccaaggtaaccggagcggaccgccttactcaattccgtccggtggcttgttgcactactatttacaaggttatcactcgccttatttcgaggaggctgaagctctttatggatcaggcggtccaggctaatcaagttgggtttataaaagggcggttgctgtgtgagaatgtcctccttgcttctgagttggtggataactttcaggcagagggtgagaccactaggggttgtcttcaggtggatatttctaaggcatatgataatgtaaactgggagttcctcatcaatattctcaaagccttggatcttccttcggtgttcattaattggatttgggtttgcatttcttctccttcttacagcattgctctgaatggagagttggttgggtttttttccaggtaagaagggcattcgtcaaggagacccaatgtcttcacatcttttcgttcttgtgatggatgtgttggctaagtctctggacttaggagcaatcaattgtcttttcaacctccatcctaaatgtttggctcccatgattactcacttgagtttcgcggacgatgttttggttttctcagatggcttagagtcttctattgctggaattctttctatattggatgactttaagcttggttcaggtctaggtatcaacagagagaaaacagctttgcttttggatagaggaaattttgaaagaaagagacagttggctgctaaccttggaatcactcatggttctcttcctgttagatatttgggagtgcctcttatggctcaaaaaatgaagagacaggactaccagcctttggttgaccgtataagcatgaggttctcctcttggacagcgagacacctttcattcgatgggcgtcttcagctccttcagtctttcatctactccaccattacattctgggcgtcgatttttattctccccaaccagtgtcttcggaagcttgaacaattgtgtaatgcttttctgtggacaggtgcgcctaactcagctagaggagcaaagatatcgtggaacattgtctgtactgcgaaggaagcgggcggtttaggtctgaaaagactctcctcttggaataaagttctagctctgaaacttatctggctcatctttacggcggctggttctctttgggtgtcttggatcagattgcatctcataggacatcggaacttctgggatcttaatccagttttgtcaggaagctggatttggaggaggctgtgtaaactacgccctattgctcgtcagttcttattctgtgaggttggttcaggtgtgaccgcgagtttctggcaggataactggactgtcatgggcctttcattcatttgactggtccagttggacctcttcttgcttgtcttcctttgaactcggtggttagggatgctcttcggaatgacaactggtggatctctactagtaggagtcggaatcctgtcattgccttactcaaaagttctctgccgtctgcctctagcctaattgattgtccgcatgatgactcttacctctggaaaataggtcatcatgcaccatcaaataggttctccacatcggatacttggagatttctcgagactccgtacagtccggttccttggcacaaggcagtctggttaaaagatcatgtcccgaagcaggcttttatttgttgggttgtagctcacaacaggttgcatactcgtgataggctcaggagttggggcctttcgattccttcgacttgtgttttatgcaataatcaggatgagtcaagggatcaccttttctttcaatgtcgttacagctcagagatttggggtttcttcacggctgcctccggtctctcttctcctcctactccgtttatgcattgtctgctgtggttgatgagtgcatctcaggataggaatgtgtctcttattatcaagctcttgttccaagcatcggtctatttcatttggagagagcgtaacttacgcgttcattctaataatattaggccagctcatctcatcatcaaagaaattcagctcattgtcagggcccgtttggacccgctttcgcggccttctcgcgtgtcccagtctcagtctcagtctcaatctcgttcctcgccgcttgcgacttggtttggattgttctgagttcctctcatgtctcgtgacttcctctgttgcaggtctctctctaagctgggtcgtcgcttttcagtcttgggtagtccttcccttctgtaagcctttctctgtgttcttttgttggacctctttctttcttttgggctttgtctctgttgggcctgcgtgccagttttgggcctgcgtgcctgctgttagccttcgggccttgtaatgtttaaagttttaaatggaaaaaaaaaaaaaaaaaaaacattcatctacttgatagtcttgattgatcagtttcatacaactacttttcccaaaaagtatatcatttaatttaagtcatatgactactactagaacgttttgtcgttaaacgagggctagtttccaaatcctaagaccattctctgacagaaggaaattttgttctcaaatccaatttttccacaaaaattcataaccctaacgtttcatgattattggacagcctatgtccaaatgaattcggactattaacagacgggcctaaatgattttagcccatattaattagttcagttttaggcttaactggaaacagacgatttatattaggacaggtctagcccaaggacattaagcccgtttgacatctctaactgaaggttaggtgccacaagcccaacaaatttcaaaaatgaaacaaatccttgagcgaaaatgaatcagctgtcaaggtttctagttagaaataaacagattcagtgacgaacatttacaaattacaacataataaaaacagggttattgattttagtttgtgtgcttcagtaatcagacagaattgacgaacttctacgaaaccaggttatgcaattcaatgggtagccatataagttctaagtgacgaaaattgcgttgatatcatcaccctgatgaagaataagaaacttcaaattgtttaagatggtgagggcataaaaggatcattaatatcgtattaatctatatcttcaccaagctactaatatcgatacggacttaatgtcacgcctcctacgaattccaaccattaatcataaatttcaataagattatgtagcagcaaagaggaaaagataggttatataaaagattgaataaccaatcaaaaaatcctcacgcagccattacatgatttgggcaactgggaaaaagagagagatcgatgttcgattcactcggcaaaaagttgccttcttttttaaaacaagaagctatcaaaatttgattttttttataaaaaaaataataataatttcccatcagagtaactatgacaatatagcatcatatggaactgataaacagatccatagctttcgataaatatcctcattaggaacaaattgcacaaaactttttaaccgagcaaacaaaaaaatattttcaaagaattaactagaggaagatagatgacaacagccaaaagaagcgtctatataaaggagaggttgcgatgatgatgatggtaaagatggcggcggctaactagggttttgatgaaagccctaaagttgcgttggcgttaatagtatatataagggaattggcgaaggcggttgaaaactgtgggcctatatgttccaaatgtggcccataacaaaatgaccccagcccaaactaatatggatgtgacagttttaagagtgacaaactgaatttgcctgacactgttgccaattttgggccttatagtatataaatgataaatcagtggtattcactttttacgtttttaagcgtaattttgctatgctttgtagtaaaacttatttagtcagagtcttacagacaacaacaaaatggaactcccaaaatttgattatagagtaacatcgttataaaatgtgcgattaggtttatttttcttgatcaaatcaaaatcctaacaagaattttcagaaatacaccaactagaaacactgaatttcaaaaagtgtctctgcctataaaggagcattccgaagatatctcatctcataaagaccagtgacttgatcagcaacagcccacataatggcttgtcctggaggaatcctcattagcctcggcaataaccctctccataaggccactaatccttcctctgcataaatcgttctaatggcatgaaccatccctttatatctaatcccaccttcactgtctctgctctgagccatcaacctcgttttcaccacatcaaacggtcctgtgcagaacggacctgcggttccagctaaaaaccctgagatcattgactgccatggctgcaagattttaccgtcaccttcgtgtttgttccacaagagtatgtcaaacgcgtttttcgctgtgaacattacagcttggttggttccgtttcgcataaccgtcggtgctgcacctgaccataaaccaagtatgctttcttctctcacgatggttctagcacaatgtattggtcctttgtacttgaaaagctcaggactcaatcctttctgctgctgaagtctaattttcaccacctggagataaaacagagaactcaacagtgttttacttgagtaaatgtaagcaaaatctgtgtcagactcaaaatgcttatgattatgatgaacacgattctccgaatcaagagttgccatgaacaatagggaccaaagagattcgttggccaaaagcatcaaaacagatctcaacaaatcattttttatctctttgactaaaatatactaaataattgatgaacagagatgattttctggtgcaagaataatctaacaatttcaattacaccaaatctttgactcaactaacactctgatgattaaactatagttttaaatcgattcataatctaataaaatattagagaagccatgtgatttcattgtctcgaaaaggcaacaagacttacctcaaagggtgtaacaatggcgagagcttcaagaacaccggcaccgaatccggaaagaaaacggccacgattgctgacctttccggtctcggaatccttaaaggcggtttgaaacatggcgttggatcccatccgaagcgtgtacttaagcgtgagatgagtagcgaacggtgttaagcctttccagagagcacgaactccttcggtgcgaaccaccttcgaaccacagtgagcgattcctttgtaagcgccgacgcgatctagctggagacgcgttttgattacgtcgattggttggagacaacaagcctcgaccactccgcctagtgagcctgagactgctttcatgtacggcggaatctgcttcttcgattccgttctcgtcgccatatctgattcctcggccggtgagcgaatcagaaatcgagaaggaagcagagagaaagagagagagagatattcgtccttcttctcgttacagactctctgctatttattcttttgttattttccaaaaatgtttgctttagaaagaaagaaaaagataacaaaaagaaattgagattgtttgttgtatccttaaagtgtgagaaagaaagtgacctttttttttttcttttagagatgtcattggcacaatattctcataatagtgggttttatttaaaataaatatgcatattcaatcaaaaaatgaaaatacttttacatcttcaaaccacgatagtagtgatcaaacacctttcaagtttcaacaaccaaggtaagtttggcgtaaatcgatttcatcaccataaaaatggtagatgtgatttgggcctcttattaaaagggaccatctttgatttgatgtcttattcaacggtcgtaaatgcctaaccaaatgactatgcttggtcattgtttttagtttcgcaaggccaatagccattgattattacccttttcattgcctttttcgctttgtcctcttctttggtttagaatgttgttgttacgcgtttcttttttctttttctagggacaattttgacgacactcgggttccagattttattattcaatttttgtttttctagagctgatatgaatatatgcttatgttcaaatgagacactattgtgttagctctgggagacagtagtatataacaatggaagcatgagtggagagtttaggaaagagtgattaagctttgggaaaaagaaatgcattgtcctaaataaataagagctgtgaaaaacatatttgactttaatcgaatcctattatatcctatattagtatattgggccgattggacagtagatgattggactattgggccgatacagaaacgattatagacattaattctatacacaagagacatccacagcaccacaagtctgtttcaaaacgggcccgtaatttacatatttaaaatcaaagccacagcccaaaacgaaaagaatcaataaatgtgctctacaaataagtaggaagcaaaagacgatagaaattccttcatacagtggttagtcactccggaagagttgggtttaagagaagagaaacagcaccaaaagatcactggttgtttaatccacaagcttattactttttaacattctttatacaaagataaacagacctccctacttgagctgacccatgtgatttactgaggttttaagattccacactagaatgatcagggtttcttcgtggactgcaaaaaaaaagcaaagttgtttagtcttaaatgtcaatatatgttttgtagaatcaatgaaagattgtatgcataaaaactcacgtcaatgttcttggcaaattcttccatttgctgagcgactttctccctgttctctgcagctggaaaacaaacatccactttttaataagattgtgggttacaacaagcagaccaatcattattgagctaaagtatgaagatgctaacccattttagagaggttttctattctctttgaagtcctcacagcaaatctctggaaagcatggctgccataacagaatataaacaattagacatccattagcgaatgtccagggagtcactaagactactaaagaatcttatcaatcagacaaataaaaaggaatcaaacaaaaacaaaacaataaacagcctcagtctcttagcttcacgtttaacgtcatgtctttaatcaggacaagcctacgaaaatcatcaccggcagtaatccacaccccaaaaaacaacataatgaaaaaccgacaatcctaaacaaagtaaaacctgagttatctaaaaacaaatttgaataaaactcaggacaaaatgttcacttaaaaatcagcgaatagctttgcgcaaagccaaaaagaaatgtacaaattgcaaacaccaaaaaatgtagaacctaaactataacaattccaaaactaaagccaaactttttttttatcacaaagaaaaaaaaaaagtgtctcaaacttcctacgctgcagcgtatggtaaattacgtagcaaaccagctgaagttgagattaatcttgcttcaatattgaacgagccgataaggaacatatttccaatccaatcagccagagaaagaagcttactttttgatatctacccaattcatcattaaaaagtacaaaccctaaatcgttataaggaatgaaagtacctgtttgccaaaccattaactatgaactcgttcgcaacgtatgagatcactctcgcaataaagtttcctcctcccgccattctcgctctttcctatcaaaaacgaaaccctaatgtcaataattatccaccaaatcgcaacaatttctagagaaaactaaatccaacaggaaaataagagacagaaactcgaaaaatcacagctttacaaacaaaatcaaacaacaattgataaaacctcagatgaatcaagagatcgtataagcaagagaatcggccttacctgatgcaaacgaagaggaaggttcgagacccaacaagatctgcgtcaagtccctattttacattataccagatttgtccattatatagacctcgcatcttcctcgtgacggcgaatgagtttttgcgtaatttgtcttaggtctctcatcggacggtcacgatgttctgtaacaaaatcgaacggttcatattacccactagtcaacattaacctaaaaactcttagttctggaattcctattttacccttgtttctccctctatttacaaataggccagagacgggccaggcccatctaggccttgtaatattattacttttgttttagtcacttcaaggtcatataataaacgggccgagtctgtttgatcttatgaaaattgacgacaatcacaatacactgaaacaaacaaatctccgacaacacaagaggagaaaaacagaggatttgggtttttcccgtttaaccctcagcttcctcctagcttgatttacaaatgagccaataggatccgattccatgtatcgggtagtccaggtaaacaccaatgtatacaatcagcgtgatgcattggatcagccctctgctcagcggttaggatcttgccacctgtctcggtgtaaactgatgtgtgagcgtcgatgcgatactcagagagctgcgtgatgttgatgactgtcacatgcgtagtcatgtgctttatcacgcttgacactactttcatcatctgcttgttagagcctgttccccaaaacttcttatcttttatcggtttcgtctcgttgaaacacttcgtgccgtttggctttccccaatccgcacttctgaacgttttacataacactttacgttaatcacaaaccaaacacatcaaaacatataataaaactaaatgtttacctagtatgagtaggagacatggtggtgaagaagactctggtcttattagggtcaacggtggagtctacccaattagcccatgtcttgagtcctagcctgtaagccacttgtgtgtctagtgcctctgcaccactctctccatttccgaaagaaccccacagagctttcatgcggagaccactcatccaccaaacataagtgttgaaaaccaaaatatcagctccttcccaaaacttagctcgatctttcactgagtccactttcactatccgtttctttggatccgaaatcacaggtatatctgtgtttgattcgacgatatacggtgcccaatagaactctatagtcgcattgtattcctatgaatcaagaaaaacagagaaacataaaataaaaatctaagctttgcttgtaatacaaggtactgtgatatctgacctaacaaggtttgcgttgtaacgcaagctaccatcacttaacgtacctttgctttaaatacaaagtatttttggctacgcttcattgatttttctccttcgggtattattgattccaccaaacacacgaacgattcccattggcttcgttgcaacgaatctcccacaaaaagtagtctttttcctctgagtttgttcattgctaacttcggactaaatctgtttggaattgaaatgaagctcataaaggttctgtctcaaaccttgaaccaaactagtgttagtttgtgttactaagttgtattttaccgtggaattgtacagtcatcaggctgccattcccaccgaagataatcagtttctggctgtccgtttttcatacaagagaattgacgatcgatgtatggacatgatctatcggtgtagagtggttcaattgagctattgtaaacccatttccctgctgcaacgttacactcttcgggatcgaattcgaacctgtcgtcaagcacttccaatatctctgatctttcctttcgaattttctcctctggcaacaaggaaaagcaggggaatttcatgagactacttgcacaacaagaaaggaacactgaaattggacaaaacagagttttcagattcgagtatcgcgtatgtgcttactaggtttcgagctaacatctttcctcggacaagactttagcttgaagaaagatgaagacgaagaggaagaagaagacaacaagctgattctttcagtgtataagagaatgaagaacatgaaaccacaaagaacgagaacgatgatggagagaggaatcttggttcctcctactcctctattaggaatcaagaagctcatagtggcaaatctggtaatttatgtaaagaacgtgtcgaaattaggaattatagggaaagatgtcaagtgagtgttatggtttttatttgggaaattaggaattgagtaggagtgaagctaaaggcatgtttggatgtgttgcttccatctttttgcccaatttaataaagatgtggttagggaggttatgacttatgattgggttttgtctattgattagaacctctaaacgtgaaatgcacattgttattcattaggtcattgtttttagaaggcttccttgtagttgtattatttcaatcaataatttagaatttcatgttgaatattggaccaaaaataactggtgttgttgatcacaccatatatacaatctacttacttagtatatttatttattcaactaatgagttgtttacacacatgaatctcttcaactgaaaagatcttatttattcaactaaatgtataacatatcaaatttaagtatttaactgttgaataaatttacttgattaaattctagttattatattcgtatatacctagaagactagaccatatatagagcaacttacaaagttgcaatgacatggaagttcaaaagaaactgttaatttgatgaggagggttaatcaactgattcaaatcgctaatcaatcatcattcctcaaaagtcgtttagtgtgaggaacatatggttaaggaatcgttgttatcttcgccatcgacatcagattaaacaacagaaaacaaaaatatcgaatttatcaatgggcacatgaaaacgaaataaacaggcaccaactaaatacaatagttggtgttgcttgtaaaatcaacaatagttcatgttagttatttttagtagataaattggtaaagcaattattaaaggcaaacacaaatcattaagtgattaataatgcaactaattaataatgcatatatagtggggagtgttgcaacatactttccgtcattaaatcagatattatgttttagtatgaagaaaaaggggttaactgaggaaaaaaatggagatgcggggtatcgatccccgtacctctcgcatgctaagcgagcgctctaccatctgagctacatccccatcgttgttcaaccgttcaaatacttaaaatatcggcttacaatcaaaagttattcctgtttgtgtctgggctagtaatgggctttcgaatacgtttcgagattgatgtattagcatctccgtacaaaccaataagttaatgccaacaacatagaaacttgcctatattcttgaggttttggacaaaacaattcgatctatattattacgtaaattataatgagttttggttttaaaaacaaattttaaagggtttatatttcttatttttatatacaaaaaatagaagtgaaataatttggagagatatgcttagatagaagaaagaaacagaaatgcataataattggtcgagagttgatagggaataaggcaagtctctttgtggcaatattattcacgcgcgtcagacattatttagatttgtctctctgctttcgttgcctctttttccggtgtgaactaagcgacccaagtactttctccttcacctttgaaaatgacgccacgcatatcagattttctcgtgtttcttattttgaaaaaaagttgaaaaagttgaaaaaggaaaagtaaaaaagaatctgtaaatattttatactaccattctcttctttttctttgtacacttcgaattttgaatttggaatctttgatcttgacgatcatgccttgcaaatatttagctagtgaagccatcaactttttatagaaagatattatttaacataacaatagcatcatatcttaatgaactaaaagaagtactagctacattgtgttacccgttgcgcatgtattgtatcaacgaatgaaattataaaaactaacgctaactaaatggccaaatataatcaaacagaaaaaacaagaagttctatattatgaaacagactaatcgtgagtaaatgtaatgatcagattaatcatacattattaatctcttaaactcgacgacaagaaaatcaatgaatacctttaagttagttgctctaaagactctctatatatgtttataatagtaaagcgaagtagataggtttcgaagaggccttttgcaactttataatattcatcttgtaaagattctaatcactattcaaaagattgatcccgccaacttatttagtatctgataaagatttagtcctctatatcttaaaatgaattgttttaccgtgcagtgcacattgagaaataagctagaagtttcttttgttgaactgtcattctggctaaaattatagttctttcaaaaaattatagtaacggaaaattttcacatttcaagtttgtttaacattactaatctgactttagctaaattctcattttattttagaattgcatgtgacatattggtttgctaactatatacatctacttcaaaattcaagtttcaacctgaagttatattcagtatgtttgaaaagtaaatcacatatagtaacattttgttcaaagctttaaagcaatcagaacaaagtttgaccattttaaatataaaacttacgtgaaggaaaaaaagttgttacatgacctttattttgaaataattgatgagcatatcaatagtatcaaagtttctttcaaaagtatcaaagtttcttttcgtccgttgagtttcaaaaaacagaatcatcagagcatatcactttggatatagcttttaaattgatcctgggtactttttcctttctatgttaccaataattaatctattatatattatgtcataagatacataccgataagaaataagtgaaatataatggttacatcattaactgaaaacatattttattcactgcaaacaaataaaataacataacatagtaattttggtaagatcttaaaatatctgaagtgacttaatatgattaattagattgagttaccaattaatataaactgaataataaacgtttattaaactacaatttcacttaacatatcaaaatttcacgatacttttgtttacccatatagttttgctttaatttaattagttggtgggtcctcgcaaataatgagaaattgtgtgttcttcttgtccttataaataccaagaacttgtttgcacattttcacacacactccaacttaaagcactatcattatcaccatcatcattatcagccatcaccatgacccaacgagccaaccctaagaccggctgcctcacggcggtagtccgccgtcttctatgctctggtagccaacagactcacccttccgacaacatcctcgactctgacgaaacactccaactactaatctcttacgaagaaaacgaagagccaaagaaagagatcaaaaccgaaaccgaaacccaaaacgatgacgtctctcttcaccctccaccacctcctcctcctcccaacgttgtagccaaactcatggggctagatcatcccgcacccggatcaaaacggttccggtactttgatgattccggttcggctgtcacaaggagcaaatcggttaacttcatggactacatcctaaaaggtcacgaggaagaagaagaaaacgaagacgagaaagacggtcaacgtcagtgccggagagtcaaagcttccgtttctttccgtgagatagtcccaacctcggcgagatggagctctaataaccaacaaaagaaacatgatttcctgctgttgtatcttgacaagcttgacgagaagagagaacttgtcggatcatcgtctttttcgaggtctaaaaggttcgagaaggttgtggaagattccaagaagccgccattgccaccttcggcgccgaagaagaaggagaacgagaaagttgctaagaagtttaaagatgagccgaggaaagttgcgaagaagaagaagagtgagaatcgaaatgacgttaacggagccaagaaagttcgttggtttctttctccatctaagagtaagtcgtcgtcggagaagactgcgcttctaggagaatcaaagaatattcgggctgatgagtttatcggaaaagagagtgagtcgccggagaataagtctaacgcgagtccggtttcggttcttgatcgagatctttatgattatctaatccttgacgatgattactacttctcaggtgagtctacgaaataatattcaaacatttttatctctcgaacaaatatttgaacttaattaattgctttttgaaccttctttgaaattttgcgaaaagaatcatctcatgtgagtagtttcctactttaactgcaaatgaggtaaaaatttggtcatttggtcaacattttaaccgattcagtacactttatttgaaatactaaataataagattattcaaaatttgaccaatataagaattttccttaaacgttggatttatttgaaaaatgattaaatttaaccaatataagaacattttcgcttttaacatttttcttgattttactgtaaaaaaagctgcgaaaatgagactttctcaacattttcgagaaattttatttttatttgcccaatcatattttaaacgtcactttaatttgaaaaataaaacaggaggagattcagaaagtgcatcggagttgtcaacaaagcaagtagagacagcaacaaaatcttcatgttcttcatcaccagcaaaaacaaaaacaagtaccaagaaagaaaacaacaatagcaccaacaatgattcagaagagacagagtttatcacaaaactaatgaatatgctctcagatctgtctgaagaagacatgaagtcttccacttgggtttctacttcgtcaactaaacccgttgactttactcaggtcgaagatttttgtgtcgaatttggtcaagagattcttgaccttgttatggaccagctagttgatgaactctgtatctagtttaaattcccaattatcagaaatatgtcgttttaaaatcttgtaatccaaatgttaaccagagactcacaacaatcgaaattttcatcactccatattttctaaaagtgttatgcggccaatataagttattgaccagaaaaattatggttaacatttatgattagtactaaagactataatgtactcgtcttaaatagtcctatagacaaatatacctatccaaaacacaagtatgtatatggcgaatatcaccaaataagcacaaggataatcttagtgactcgaatactcgatcataagaatgaaattaaattcaaattcgatatgacgaattatcaaatgcattataaatacatgtagtgggtccaaaaacggtcaaatcggttttcttctgaattttggagagctccgtaacttcgaaatacgtactgtctcctttatgtctatttcacatgcaaatcatggtctccttctaacgttacttctttgacgtttttttgtacttttctgtgttttttttggggggttcacatgtaaaattcaagaacattttcccactctaaattatttaagtttcgaattataattatttcatttagtcataaactatttttttgccaacgaaaaagtggtaaatattgaaggtccttgtattcgaactggtgacctcacagagttggtcacacggctctatacaattgagctgacgcggcgtattagtaatacgtgttttttaaaatgaacggatatattagtgtgaacgcgttataacacggtttcatgttttcggtatttttatctgttggtagctgtcttgcaagagaagaaaagaataaaaataacaaattctttctttacaatttacttatgaacaaaataagttttatatatcacacaaataacgcggtgaagtaatgtgggacaaatgtgaattgaaagttttggaataaagacttttgtttaattcttgtttatcgcctgattaatcgttatgaaatattcttattaacagaataaagtagctaaaagtattcaaccaatttggttttggacacctataactatgaacaatataattcaaactagcatatctaattaatatctatacaattgttttatgcatgtacgtaaactattaaatgatttattaattcttattcttatcgtttagttaattcacatgttaccttatattatatttagtaattgcctgctcgttttactccctctctatttatttttcttcctctaatattgaaggtttatttttctccaccaggattttttttgtttttagaaggataaattcattttcataccacgataacatatatcaaaatttgaacatttatctttctttttggaaatttcaatagttcatataaatattataaaacaaacattaatttagatatattatctaaattgatttgcctaacaaattaactagctaattaacttatgcttaacacaaataatgagaacttagaaaccttgattatgatgatcatcattatgatctctattaagcctattaagcaaagcatcgatgagagaatctctcttctgagccctagcttcttctctcaaccgtctctcttcctctctctccatccacctcctttctgtggcggctctttcctcctctagctccgccattctcctccgccactctttctctctcttctccctctctatctccttcatctcccatgcatctctccattccttttccatcttcaccgtttgcctcataaactcctccaatatatcttttagtgtattacccgcagtttcagctttcgtaccactcgcaacgccttttcctttttttgcacgttttcttggattggtcgaagtactagtagtaatcacttctgtctctcttttctgtgtctctactaaagacaataattcctcgttgatatcttgatttggttcgtcaacttcttcttcttcatcatcagatgaaaattgatgatgttttctcttcgaggaagtgcttggttctgtggcttctgaccacagcattctttgcattcttgcttcaaaaatcgactgaatctcattgtagaatgggaactgctgcctaatagcatctggctcagtggtctcacacgcctgtcccatgaatattcattatgttatataaacaattatatgtaaacacgtaatagtaccgacgcaaaatattttagctaaccaagtatcttaactcgaaatcatatatcataggaaaacaaaaacacatgttcatcatctatatcacgtttcttttaccttaaataaatgtgtgtatagactttttcaactatcttcatgtgttcatcagtaacggttcttattaaatcttatgcacccgttatataacggtaattatatttttatggcatattgtgttacttacttaccatgtgatcaacgaacaaaaagagagatattatggtataacggatcaaaatgtgaacatagacaatatcatgatgaaagctcaccaataaacgcgtaaaattctattctatagctcgttaccattaatgacaggacaatatctaaaaaacctaggcgattaggttaagctcattaattgatgtatatataatgtagttcacctatacatacaccataaactaggtttccatttcaatatgcataatatcagtctaaccacacaaactagtgatgaaatacatgatacacataattatagtttgtatatacttgtaatcatgatcatactaaacatttataggtgtatatatcgggactatatatagagagaatcatcaataggattctaaagagttgaagggtaaccttgtatctagtgacgaggttcttccacttgctcttacattgttctgcgcttcggacaaaacccttgtcggccatcttagcagccacgacttcccaaagaagcttattacgtttggtctccatgaaagtttgatcaagttcttctcttatagccaaaagctcctttgtctcctctatgctccactgtgggattctctccccacctcctcctcctccgccgggatccatcgtcgccgtggtgctcagcggcggcggaggaagctgttgctgttggatcaagtgatgatgaagctgatggtggtggtggtgatgttggaaagggttacgtcggtccattatttggaatcgaattgtctttgtgacgtgaagagaagaaataagagggagataattttatttttttgttgggttacttataaatgaagagaggtttcattgaaaaaaagaagagaagacagagaggaaggagagaaaagagaagaatctaattaatttataaggatgtgtgaaaagaaggtgtgaaatcgtagagggacgatagaagtgtagttttttgttcttttctctaattaaaattattaagatgagattttttaataattattgaatatactagaacttatagaattatttagttgaataaaatacgaacacgaatgactcttttggtgaaaaggacacaattcgtgattacattaaaaataataaagcttagatatccctttttcggatgataaactctagatttaaagcagctaactaaataattcatactttttttttcttcgtattctagagtttaaaaatagcaatctcaaacaattacaggggtaacttgcatcagttaagaatatcttaagtaaaaacaatcgccttaatcttagagtaaaatcaaacaatatgtttttttttgacagattgattatttgtgtgcatcattctaaacacgctttcaaatttgtaaagttgtagaactatatttttactgtatggttattgtttttccttgatgatgattttgtgaccaagctcaagtactcaactgtctcgtattttttgcatttggtagttattcgttaataatttgtcccaatacatataaatgttgcgttaatatttcgtcacgcttacgagttacgagtcacaatccgatttttattcttcaatccgatttagcctttatggtcaattgacccactagattttcctcatcccataattcttgtatttttcttttgaaaaattcatcgtaacaaaagtaacctaatggttgacagacaaaatatattaaataagctattggatcaatatgcttttagaagtttagattagccccgtgtcatggaggaagagatcagatataaacaaagaattagagaattgttgttagcaagttttacataatagatacctaacgttcctatcaaaataaaaaagaagaagaattaagttacagaaaacaagactaccgttatgattagctaagaaattaatttgattggaattgtaaattcccccaagaaaaaaagaagactattcatttatggattgtatgatatttagtatatgaataaatggaaatcgttatattcgcagtcggcacaaaacaaataatgcgtacgaacagagaaaatgtactcttgttctgaaatggtttggatccagtgcaatatacaactgtcagattcccaaacacacatatggtagtacatatttagaagccgcgtcattgcaatgatataacaagtaaaacgtacggtgaatgaaacttgtaggagtaaatattttttatttgtatctaaagaaagattcgtcggggttgtatttttggctctgatatgtgtaagaaatactagtactactcagtagtaaaaaaaaaaacaaaaaaaagtcagcgaagtggtccaaatagcgatgaagcgtgttgaaagtaaatcaaaatcttacatgacatgcactagacttcgctcccacctgtcatcccacgtggattcacaccttatttatttatactaaattaataataatgtcgactactctagtgaatgatctttaatttttctaattcttatgttcaaaatttgtggtctttaattatttaaaagagaaattgtgaatgaaggaattttctgtgaacaaaagaaagaataatcagtattttttaattttatttaaatggaatcaaataatcagcaacgcggagtgttgttatattccacgtgtaaacgcccaccatgtttgtccacgtggccatctctctctctgtctttcactttttattttaacaaagatttttgttggctgatgtttatccgctcaatacaagtaggccacctcatcatcctttttatttcccatccaaatttttgcttaaaagaattgaagtcttaaagcaaagaacaaaaaaaaaacgtcagccaaaagcatatatacaaaaatcagcctattcgtgttatttagaacttttgaggtgaatgttgtttagggtatcgctccggattattcggaaatagtaataagtttagtcttttacttttgccgtaacttggtgaatgcacatgacttccatttttgaatttggagtcactgcaacaatacattgttgttacaaataccaaaaacctttctcactgtttgtaatactgctggttttgaaccaagaccatgaaaatgatatttcagttgattgcagaaactcttcttgttcttgaaaacattcaaatatttgactaaactaaactcgatctgtgtttatttttttgaatctataaatcatactaactttatgaatgaatattactaattcgtacatgtggagatatgcaagtaatttgcctaaccagaacaatcaaagaggaacatacattagtctgttttttcttcttcttattatttgacaagtaacaacaattattccatgtcaacatcagcacgtgagggttgaaaagattttagtgaaggaattaaacgggacaaggtcaagaagattgaagaatgtgagaaaaacgtagagatttggattttttaatcaacaaaagaaaaaggttcttcaaatttcgctactatgattaatcaatttgaattacattttgacatattgttaaacgttgatttagtctttccaaatctgttgacaatgtttactattaaacaaatattgaagcttttagcaaagagatataaggagagactttacttcactagtcgtcagtcattactaactaaaccggcatcatttggtggtatgtatttcccttaaaaaccttaccaaaatgcaaccaaaataaattaaaaaaaccataagcacatattctgcttctaaaagattccaaaaaagctagcagattgaaaaaactgaaacgagatgcttcaatctttggacattcaaggtgataacatccgcttgatccctgatttctgctcagtggttagcttcgaagggaacttgatgatgaatctgattctcaagtttccttttcttgacggatctttagggatcggcatgccttctcctttcaccacctcttcgtacgacggactgatcacattgtttaccggaactgttaaggttcttccgtcaagagtagtgacctgtgcggtgtaacctgtgagagcatccactagagaaatcttttgcattaccacaagatcattcccgtctcgtttgaaaacgggatgcggtttctcgtctacgatgaaaacgagatcggatggtatgactccacgatgctcattacctttttccaggaaggttatctttgttccttttttccaaccgggtttaatttctatcgtcaagatctcctcaaccggtgttggcctcctgcattaaaggataaacagaggttttgtcagtagaagaacgtagaaaataaaatttcagtaatgtctttatactcatggtagtggaaatcacaaaaagtaggaatgaatttcgatacttgagattgcgaaaaggaagatattcaagagagctttaagcagacattctaacaaggattagagatgaatcaaattgaagacaagagacaccattacaatttgtagagttgaagagatttccgttttcatgaaaaaacagatgaagctaaaatccataatgaaagtggttaagtaggtcaaggaatgtcctggttagctatagctatcggttcctacacttacatctatcatttatgtgccgatagagagatcaaatactgaataaaggtcacagagtacacaacttagatgctaacaaaaacctgttcaaaagaagaactttctaataagctgactctatagactattatagctttcatagactaaacatttggaaccaaactccacagaaagagagtttaaactgttctagaaagaaattggccaaaagcagcagatatatccctctactaaaagccaaatgtgtgatcatcaatggaaaaacaaacccggaagagtcaagaacatcacgagagatcttcatcttcttggagacacctttatacaaatcctccaagctacaaggcaattgtctctcaataggagcagatttcctagaaggaatggaggcttctcctccggtagtagcagccctgaaggaagcgaagatatcatcgccatacctaaagccagaaggtcctgcgcgtgagtcgcttcccgtaccaaaagaaggcctcgtgaaaccaaagaactcggagaagatatcatcagcgcttctgggattgaaccggaaagaagctccggcgtctgatcctccaggatagccaccaccggcgccgggaggtggggcttggtttaaaccttcttctccgtattgctcgtagattgctcgtttctgaggatcactcaaaacctgattcacaaggaaactgcatgaattttgaaaaaggaaaaagtgaaattgaaagaggggaatggtcaaggagggaaggaattacatcgtaagcttcagagatctgcttgaatttagcttcggcttcttttttgttgttagggttcttatcaggatgccatttcatggcgagtttgcgataagctttcttaagctcgtcgtcattagcacttcgatcaacttcaagaaccttatagaaatcaacccccatcttctctctctctctctctctcactcactcaatcttcttcttcactggattttattaggggtcgatgactactctcttcgacttgtttatttcattttcttccgggattctcattttaatccaacttaaccgatccaaccgttcgtgattttaaccggtaaactcctttttttcttttctttaatagtattcccgttttattatgatcagtttttaacttaatgggctgctttctacccaaaaagaaaccttaatgggctgattggttaaggctttgggtatgcaaacattcttttttttttttttttttcgcaagggtatgcaaacattcatgacatatattttttataaaaaaaacttttattaaagtcttaactcaaagaaaacaatgacaatacaaccgctaatgactcattaaaagaaatctctaactaaattctacaaaattcattttgaaaaaaattgctacaatacatggaatgaagatttcctgctctaatcgacgcttcattcactcttcttctccgacataagaggtagaaggcaacctgaatttaatttcaaagtatctcttcttctctctcaagttacataatgttacactcactcttcttcttcttcttcttcttcttcttcttcggaagattcttttgatttctcgatttctgtcacctcgttttctgaggttgctgtgtcgtctatcttctcatcatcatctcgtagtgtctggcttgacgcttgaggatctgatgtccgagtatggcttgttggttctggagcactcgagtccgacacttgaggggtttgactcatatcagactggccagtaccaataggactgctttgtgactgaccaataggactgctctgagattcactcatttcagatcttcccgtatctatgggactgttctgagactgactcatttcagaccggcccgtatctatgggactgttctgagactgactcatttcagaccggcccgtatctatgggactgttctgagactgactcatttcagaccggcccgtatctatgggactgttctgagactgactcattgctgactggacggtccctatgggactgctttgagactgactggcaactacctgactgggttcctggtgatctacttgggagtggctcaatggtacagaaacttgctgagactggctcgtttgctgtggctcgcttgcttgctgttgctgctgttcctgactcgtttgtgtctcattcgcttgcacttggcttgtttgtgttccttgagaatcagggacaagtccaagaacagccaatgtagacctaccaacaaacatgtttcatatctccgtgatcagcaaatggatttcaaatagctgaagttgtttgtttagaactggaattcatggaaatttgaaagaggaaaggttaccttggaagtgaagattgaatctctggctggctggcatgtgcggttagcggagctcttaaggccgggattttagtcaatgcgtttcccagttgaagtggaggaagctaaatgaaaggaatgtcagtgataaaaccgctttccgatagatgagaacaggtaatttaacaattgtggaagagattaaataatcgcacctgtagtaagaccttatatgattgaggctgtgttgtctgtgtgcatttcaaaaacccaacccacagtttcggatatttccatatctgaggcatacacatagagagagccaccgttttatttccaacacacagtcaattataagaatggacaatagagagaatataacgtttcaagaccaatactgacctgtttgctaacgagacgagaaagaatctccaggatgaagtccgactattagaatatcaagttaaagagattattcagagaatattaaattgggattgaaaaaagagatgtgataagtttgttaccagagctggaaaagcaccaatagcttgtaaaactgtacgcatgaataacattggcagtggaatttgctggacctgcagccaaaaactcgccaatgagaaaaaatgtccagaagaagaaaagaaatcaaaacatgaatagaagaaatactcagtacgatggagattgttatataccagttgattcagaacaccggctaaaacctgttgagtgaatgtctgcctctgcgcaaaacaggtattgcatgcatctgtgacctgataaaagcattaaaacataagatttagggaagcaacctcagtgttgattgtaaaacaggtggcggagatctcctaataattcatcaaagctgtattctttgtttgctgtatgttaacaaggaaattgtcgatatatacctgtttaagtggtattccatctcttgctgggtcaatgctatggatagcaattaaagcttcagatggagaaagcactgggccagattgagatgatccctaagaacaaaattccacagtgagcagatcaaacttaactcaaaagccagacataagaaatgaatacgatacctgcagcacacgagaaagtgcaacttggaatttctccataggaagattcaccatatggggaaaaatgcggagaacctgatcgagagacaagtttaggaaaataagaaaactataacccaatgagtcaataaaaggggaaaaggtagggaaagagatttacatcatctcttggcaggaatggcaaaattgggaaaagaatctctacatcctgtagtcccataaaatgttcaaaacccaagaaaacattagagaagaattagcttatagttttgctcttaacgagttttcaataaacattccatcgtcttcacctttattcttgtatcaaacaacttccgtatagtaagtatcaattctgaagaaggagtgggcccctcggtgagggtttgaagaacctgtcatcaaagaggaacaataaagaaatagtaaaagcacataccactatttacagtatagaagaaactgtgaaggatgataaaaacctgtataagaaggttgtcactcccacttggtgggtctgctataattttaagaagctcagaggatgagcccatagtacgaactagaatagggatttgaagatgaatagcctacacaaaataaaccgtgtgataaatagcagagaagaaaatatattataaaacttcttaactctgggctccagtacctgcttaacgggatctgatgcattcttgtatatgctgaatacatgaacaaaaagggagtgcttctgcaaataatagacacatagaaactaagagtattagcaaaattttgccacaaacttaaagactagattagtcattagtcgaagaatggtaaaaattcgcaagaccttggtacagagagcaaaatagagtgacaagcagcgttgagcttcagtaactgaagttgatgatgatgttgcttcggagggcgtctccatactcataccactaatactgtgttgcggtttgtttggtggacttttcagatcaagatccatctaaaagagaaatgaaaattctggtcacatattttttaagcagtgttcattagtaatcataaatcaaatataaatgcatacacaactacaaaaataaatttctttgcaataagcgctcaccttatcacaatcatcacttacgacagaaaatagcctatcctttgcaaattcctcaatctgttctgtaatgaatgataaagaatagagtttgtttgccacctgtaaaatgacccacaattattgaagtgataacacatcagtagaaggatacattaaatcgcaggttttacagaaacataccaggcggattgctttcatgcgaatctcttccaagtgatgaacagcactctttcacaagaaaaaaaaaggaaatttagtgagtgccccataaacaaaaaaaatgaatattacagccttgacaatatgaaactgtcaaatgctgataagagaaaatgaaaaaaaaggccagaaaaggaaggagaaagaaccacaagcacaatgctgggaaaaaaaaaaaatcctgaaatgttaatatgatgaaactaaagctgcaccaaagaaaagggaatcaggaaaggggtgagatagaaggaacctgcaaagcgatattcaggcagtcattccggattccaggtctcattaaaatcaggctccaaacagcactgagaccttgagtaacacggtctccatgttgtaaatccttttcaacttcaccacttccaggacagcaaaacgattccaacaacatcagaactgatttcggcagatgtggagaatctccaagcaatttacttaaagatttgtcagacggtggaaaagaatctcttagtgcttcagcctgaaagataataatgttttctgagattccctcgtgaaaaattgactcagatgcaaacaaaattgaatgcttaccacagttagcaagaaactttcatatgcagacgcagcagtagttgaagagaagaaatcttgttctgcttctgcctccccgtatagcctgtaaagaacccgcacagtcaactcatgtccctgaaaacataagaaaggataaatctttaaatgaccttttaatcaattagggatgtcatccaacattagagtaagatattctagagtcgagccagttcgaaacccatcaaaattagaaaatatactaagataggagaagattagaacctaaatcactatctctagcaaaaggatttcattaccaaaattgggccttttgatgctatcaaaaaagtaagcgtgtatcacaaatacataggaatcaccaatctaattgttcaaccttcaagtcaagaatacaaattctcacctcatgattcaaataatccgagagaacgtgctcctgtaatattttccaagggtctaactctgaaggaaactgcaaaaaagaagaaggcaaaagtataggtatatatattaggaaagtatggcactctgaaggcaaatgtgagacagaatgccatcgtacttcaaacaaacatcttgccatctagcatgcatttgatataaaacaggaaagtataaacagccacaaacataatacaatggtaacaagggcacctgataccacaaaccaggctcttagagtagaggcaagtgaggtaagaatcatgcagaggccgatatgttcatatttatcgaatttcacaaaaacttatgaagagtaataaatcacaagctgaaatgtcagaaaatataatttaaaaattcacctcaactcctaaatgagcaagaagagaaaagcggagttgtgagccaccagacattgatatttgcttatatgcttcaacaatgcgcaaaaaaaccagcttttgtaaactgtctttctcttcatcagaaaggtcgacaacaggtgctgatatcttaggtaagacaaactgactcgccgaagcaactgtgccaaccgcctttggactaaattcctccaacttatccacagacattgagggaattacatcgacaagaagttttccactgaaactcgcattttgatttttgcttgcagcctccacattcgtagaactcaatacattagtaacaagggctcctgacccatcatgttgagcagaagattccagtccaggtattccactttctctattccctatgtaatgcacattttgtggagacacagtattgctttcttcattttctggaaaagaagtatcacaggtagctaataagccaggtggagttcttgcatcttcagctggaaacatttgctggtccacatgaacagaatagacttcctcatcttcctgttattggtgagattttagtgtacaatacaactttaaagacgagaaggtaaaacaaggagcataaaatataacacagatagaaatactaaatcgagcaaagagcacccatacattgtgaggatttatcagggcagcaattggtgggaatgcggttgacaatgaaaggacacccgctacaaatgatggtggatatttaatttgtgcatcactgccaactatacacatgttcatcaccaactcatcggtgccatcagcataagaagaacaatttggtggaatattatgcatattagccatcacaacatcagtaagtaaatccgccgaaatacttgaaataagaatctccaaagatccaattgctttttcaccctgagaaaccaaggttccaaacaaaccaactagctgctgagcaggtccactatcactcactcctctgctatcacttggtccggtcgaggtagaagcaacccgaggtagagagaccccatcattaccatttaatccgtcagtggattcttctgacacagaaggtgttattcttgcacgttttccatcggaagcatctccatttagatcaatattgtattctgatccagatcttttcctacttaagttactttctgctacatcagaacttgcacagagaggattctcttccactgatacctgtaattaatagttggcttttaaatctgtattcaatatacataaaccaagaaaaccggagagacacatgcacacacatcgataaacaaacgaggaacaaattaccttggtatcttctacactgtctttgtcctgaatgcttccgttagtcttgtaaaagagatctttcgctttggctgcctgacctccaccttctatctctttaagagcactggtcaaccggtccttccactggagaaaattgacagcatacagaaaattgcaagttaactacgaaaatcaactccatggagaatacaccatcagaaaatttataagaattagttataccactattagttaattaccagctcagcataatgaaaaaaaatctataatataaaataacagtgaacctaatcattgtaggtaactaaaacaaaataataccggtgcagcagcgggatgtgtacatttcaagcaggagagaaatacagtcttcaaggcaagatttgttgctgcagcatacactcctttgagaaagcttaggggatccaagctcagtagaacaggtagaattcgtccacagtatgcaggacgtttctttgcaactgatgaaagactgtataagaaacagaatcaaaatgaaaaggatatcatgaaacataagacaagcttacatgacattctggatccccatctacacaattcacgatgaaagagtaccggcagattaccaaacacagttttcccttaaatattagtaactgtgtgtgaggaccaaaacatatttttatacttgccccgttctaatcacaggaacctcgtccttactagattggatgctcttcagtcaaaagtcaaatctaagtatttcatctatgttcagattataaagattttctagaccacaacgaaagtaatagaaaaaaaacatatagagctagatttttaggattcatagataatttgccggtattctttccaagctccaaagtccaaactgattgaacgataccaaattaaactacgcatatagatgcacttaaaaacaactcacctattgataagaacaataatcgtcgagctatttagagattttgctgcagggtgcctaagctgatcaagcagtaaacccaatttctggctggcctcaattgacaaatctccaattttcaaaacaggatgacccccacggagaatagatatattaaaatctgcttcaattccttcaggacaggtaactagattgtataagaacctagtatctaataagatactaataaaacaacaacttctagtttcacggaattgagcggatagatccataaagatttaccttcatgaggagtatacaagagaataagcgcttccacaaatttcatagcgcataattttacaccactatttccttgctaatatacaggtcacaagaaaaaatacaatcagataagaaagacgacccatggggggattagagaaagcattaattcccaccttgaaagccactgagcatatttcatccttgaacttaatcaaccatgtccatgaagattcaagaagatcattcaactcactagaatgcaaaccctggaagccaaatagcaataagcgcgtcaaataagaagggatttacatacgaaatgcaggaagaacaggtcacaaatacagaacctaaaaacaaaaacaagaaaacaacctgaactgccactctttcgagggtggaacggaataaatcagctccacaagcaatgacctgcctggccacagctggtgtctcatcttcaagagacttaattaaaaggggcactatttcaggtattaattccacatatttcaggccaatttcaccaagtatcctgcatttgaaatatcatcagaggttcagcgagttatgtagattccctagtcgcaaataattctttcagcaagctgataagagtaagacagacactgaaccatcacttatgatcactgcctgaagtgagatgagatgttgtccatgattaagagcaagtaaatatacaaaggcaagaaactatgcatcattagtgtggccatgtatataattatagagagagacggtgattacaaaaataaaggattcacaaagaccaagaatcaacaatttcatcatttaatgtataaaaactccggaaattcatttatatctgtgtagttacaaacaaatccgaaatatttcagaaactccagcatgaaatcaccacaagaagaataaaactaatcggggaaagagttacagattatacaataacggagcttactcggcgacaaacttgcggacagcaccgaattgatcggagagaagatcgaaaaggtgaggaagcaactccgtgggaaaaacggaatcgtctttttgcaaatcccggcgcatatagcgcaagcgttgcagcttgggaggcaattccgtcgctgatttggcggaattcgcgagatctttaagccttgctcttgaatacgaagccatgattccaaccataacaaataggtttcaaacaatcgataataatatatacactagtgcccagagctttgatggatatgcatctatcttcttcttcttcttcgactatggcatatagggtttagagacaaggacgacgatggagattcgttttatttctgatatgaacactaatgaactgatttccatttttgaggtctttcctaaaggagactgatcaatagttacactacgtcgtttggataaagaaagaaattgtgttatggtccctcatatttgatagtatattatataagtctcatatagttagtgaattgattaaataggccaatgtgcagtaataatgggccgatgtgggcctatttcgattgatatttaaattgtatccgtgtttctggtcttaccggagtctttttggacaaaatgcgagtgatgtgcaatcaaatcacatttacaatttggttaagttttgtttgattttggttgatctcggttaacaaaattaacctgttagtagtgagaaccttttgaactttgaagtaatgctctttggagaaattggatccggcagagccaagagcttagaggctgaagtcaagggatatatactcgtatccctaagtcatggtgtcgtgtaagaccttcaagaactcgattttgaacaaaagagctctatggattccgatgatcgtatgctactaccgcgcatgagatctgaaatcccatagctagaagagccccatggattttcaaagctagaagagtgagtcccatggattttcaaagctagaggactcttatggattttaaaagctagaagagtcccatgaactcttctcctttactaatcacacattaacatagcatttcataaaaaccaatttacaatgcaaacatagctgcaaagaaccccccataaaccataatccacacatcatgaaatcgatgattagtactcgttaacaacaaagaaaactcaactcatattatcttcctttgttaggttgacagctatgcctgaaatcacaaatttaaaataagaactagaggctatgtgaatctaatccaggacagttcttcaaaaccaaatccaatactcaaagtctcaaacatctacagagctcagtaccagtgtacgaattcccaaattaaacaagttcatcctttgtttatcaacctgatactactaagtactaataggcctgtctgaaatgtaattgaacaacaagctcaatggtcaataccaatggatcgaagaatatatcagattcaaaaccaactgatcgatcaagagagtagtacattattataactgacaaacttgttcttgcaaagggattacgagttacaataacaaaagactatcaaagattataaggaaaacacaaaggatacaaactaccaacaatatcatcatcttcttcttttcaaagagattactgcaaaatggtctgagaaaattctgaaaccatttcgtctgagatattttaccttttatttctttgatcactcggagcgattagcgaacctctcaaccttctcatcgttgagattgatcccaaccatggcttctccaagcccacagctcacctccacaagcatctcagggtcactgtaatgagtcacagcctgaacaatggcacgtgcacgacgagctgggtcaccgctcttgaagataccagaaccaacaaagacaccatcacatccaagctgcatcatgagagctgcatcagccggagtagccactccaccggcggcgaattggactacaggaagacgaccaagctgcttagtctgcatcacgagatcgtacggagcggctaatttcttagcgaaagtgaaaacctcatcatcatccatgtttcgcaaaaccctaatgtcaccattaacagacctcacatgcctcacagcttcaataatgttaccggttccagcttcacctttggtcctaatcatcgccgcaccttcacggatcctcctcagagcctcgccgagattccggcaaccgcaaacgaacgggatccggaaattatgcttgttgatgtgatgatcttcatcagcaagagtcaaaacctcgctctcatcgatgtaatcgattccaattgcttcaaggatctgagcttcaacgaaatgaccaatcctagccttagccatcaccggaatcgtaacggcttgtttgatttctttaatcatttgtggatcgctcatacgagcgacgcctccttgagcgcggatatcagcaggaacacgctccaaagccatgacggcgcaagcaccagcctcctcggcgatacgagcttgctcggcgttgacgacatccatgataacaccaccacggagcatctgagccaaaccgaccttcacggagaagggagatttcttcgcctccgttatcgcaccgttaccgtacaccgccacaacgccggttccttccattatcggagattgaagagaaatttgtgtggagaaaatggaagagagatttgggaatggtgaagcgatttctggccggtcctcgtttatctatggatcggctttatagtgagagtttgtggcggtgtgaataaaagctaaaataataaaatagatgtttttctctatttttattaattaaatagaaactccttaattattgaatttttaatttttatttgggaaagtgtgggattttgttgtgatcggacggtcaagattaaaacacaatttcgatttttcgattaacacatgtttagtggactgcattttaagattttagccaactaaactagaggttttgacaagaaaaaatgagtcgtccggaattggattataaaagtgttaaatgcattgttaatgatgttttaaaacgttttcacaatttattttttcttattttaaatagattttagggaaaaaattttggaaaaaaatcttctgacacaaagaaatgtaactggacctcatagaatccacgactgtcgctctagtccgcattaattgttgcataaaagacaaggagaaaaaatgttagcagaaaatgaattgcacgcttttggaaaaaatgttatggaaagcatcattttcttcataacaaacatctttatatttctttatcaaacaatttacaaccaatcgttttggaatgggatttttaagatactacatttgggagtaggagaaattcatttttatacaatagtacgttaagttttataatcctagaaaaaaaaatttgaaataaaggaaaaaatctcttaaaaagaaaatctaaaaatagcagtttgtgatgataaaagtaaatagagaaataggcggctgtggttgaaaaggaaggcccgcctctcctttgcaatcagtagatttgtccactcagccgaccctggcggcccaacttgctcttttgactacttcactgtaactataccattcagatatttaagtatttggcaattcatcgaattagtgaatacgttttgttaagtggttgatcgatgattaaatcaaataataagggtaaattctcaaataaatgtagtttatggatgacaatcttagtggatgttgcaaaaattttgctactaacaccggtatgttaatctttatacacatcatatataattataaacattaacaaatgctataaatttagtgcaattcgtgtcaataattcaaactcttttttaaggcaataataacttgagatttgtgtagaaacaaccatatgatataactgatgaccatatttattttctgtataaaaaaatcgttacaatactaagaaaaataataaacgaataatgtaatttgatatatatagaccaaacaaaaaaaatggtattaggagcaaccaacgcacacaattaacccattctcattacatatcaaacactgaattcttgatccatcaccagagataatccggcgactacctctgcatccatcacacatcaaaaacctaaaaccatcgcaccgccggcaacgttcatctccggtgattggaatgccctcaaagagaatcttaaacttcccttgctcgtgcagtcccaacactctctgagctccaccgatacaccttccttttacgaacagaaccggaggcaacacctctgtttccgccgctgagattcgtcggagctcttctctatactctctatgcatcgacacatctctctcgtagtacttaaccttaaaactatccagcagaaatcggatcatgttgcaatcgtcgaacgtttttctgattcctcgaagagtcgttgtgtagaaaacaacggattcctctcctcccggaggacaccgttcctcgaattccaacaacggatccataagggtatttccgtcttttccaatgtcttcttctccgatgacttcttccctgatcgcatttacaatctgaagggcatttccatcatctttgtgaagaacgacgacattttcgtctttccgtctatactctacgacgctaatcaccggaggaatgctattcccgtcttttctgatttcctcttcctcgggaaagacgatgtcgtcttcatcattgactctggcttctctggaaaaatccttaatcttcctaaagcataacgcagctaattcaaatgcttctaacagtttcggatcgaaaagtgtggtcgaattcaaatcaggtcttctaaatccagatccgaaactctttcttccgattcctgtatcagatccgcatgaaactgccagtttactctctttccgatcacacggaactctcggaatctgattcaccggaggccgtacgttctcctcgtcgccgacaaaatttccagaagcttcttcttctccttgtctcacgttttccaaaagttccgttacatttgcaatttgattttcagacttttgaggggttctccagatagaagcggcggatgtaatctgaggaatgtggttagatatctttggaagaaactcatctgcagcagaaagaacctggagaattcgatcctgattcagatattctccggctctaattgatttcaacttctttgcaaacttcattctcgatgacttcatctccctccagtgtattacttcaccggagatctataccaatcagatcaaaatcgagaaaacttcgctggggataagaagataaattagggtaaaagagaagaagacgatgagggtgatgatgatggttcaatttcagccccaacggctagaaaaagacggtagcttcttttttttcgggggaaaacaaatgagagagtgatgatctgctacgtttaagtgtactaaggattcggatagtaaccactcagcaagtgccacgtcttcagacgatttcactacacacacgctaaacgcaacggtcccttaaactcgcaaagttgcaacttccaagtggacctcaaaaatcagtcctcataaaccgaaccacatttgaattacacattaaaccggaaccgctaatcaatttttatatgtatgcaaaaagcaagcgacgacgtattgccaaaacaagatttggctaaccgatttgtcagagttaaacaaccaaaacgtttacaaactccatcaaagagcattaagtcactgagtttttctctcaagtacatagacacacagcttcaaattgtacgttcttttccttcctattttctttctcctatggttttagttttctacaggagtcaccaacttcttcttccaaaaactttaatcgcctgttcagctgcatctagctcagtgaatcgtctctctactcgggatggaagactagaccggcacacgcttgccccggtacttgtcaaagaactacacatcacataaataaaagtgtcaagtaatcgcattagccaacaattggcagactatgcaacagagttaatattaaagttaaggcaaactgagaaaagacctagcaactcaagatcatcagaaacaaagagagaattatcaactgtaatttgaaaaggcaaaactgggagtcattatgagttttgtatgtgttgtattcgaggtctaagaatttcatgcgaagtttgctatagttgtttgcaattggacacataccgatctaatatatggttgctgaataatccaaccgagaacgggtatcttctgagcaaagactgccaaggtaggccagaagccactgcaaaagcaaaacgtttttagtatcagtttacatttcctcaagcaataccagtaaggaagaagaaaatagccaaaagtacctgaagagtacgaaaaagccataggtctccaacatcattcccaagataggccacccgatgataacaaagaagaaaccgacgccaaaagagatggttccctaagtggataacatataaagccaaatgaacacacatagatgacattaaggagaaatatgtaaaaatccagcagagactggcccagagctattgataatgtaggcaaagacagaaacaaaccttataattttgacgcttcatgaagaactgcatggtagacttgaagccaatggttagactaacccccgagatgaaaagaatctgagaaaatatgaaaagaaacaagctctcatactagttctgtacgtgtatgcaataatagtggtcaaagtatgaaacaaagatacatgagatacttacatttcccatggcaagtaatcccttatcaaagacaaagactattcccaaaaacgagaagaatacgccaaatcctgtcaggcctaacccgatttctgtttcaaatcacataagaaacgtttaagtatatccaagtacagcaggagtaactttgtaacctggtaataagatatactgaaactaaacggggttcccacaacaacatgacattcaatgatctactcactcgagaacgtaataagtaaaagaagaattaagtacaactaagtaacaggtatctcttccaatagcacaaaatatttatagaaatcacaatgtgaacttacttttccggtcattcatttcaaaggacatcatggttcctgtaatgagctgcttctaccttttgctgccatggtaaaaacatgttgaagtcagcaattaggccattgaaagttgaaattgtgcccatggcttagccatgactctgatatatacatacatagcccatagagatttaatactctcgtatcagtttcggtaacaaatcaatatttggcaacattatatcgatttgacgtcgactagacagatgctacatacagaatcaaacgtataatcctaactatacttgtacaataaaaaagagtgcataaccaaacaaatggactgcgtacagagcgagaaaagagattcaacgacactagaatcgatctgagcagacgaatcgttgaaattgaacagaggcaagtgaaaacgaggatcataacaaatctagaattaaaccgaaaccgtaatgatgcagagtaacttacagatctaaaataagggaaggaagaaggcggagaaaccctagcacgcaggctcctcgaagacgatgatagacccagattgggtttaacaaagaagaacagaaaagagatgagaagtagaagaagaaattgaggaagaagatgattgttttgttaattgatctttcgaagaaacgtttacagagagaaatgaagaaataggcttttaaacgaataacgaggcccattaggcccattcattaacttaatactacttaaattttcaattgactgtctcaaattcgaaatatatcaatttctactctttttatggtagtcatatgattttttttttttaagttattcaaactgtcaaatgatttatattctataaaacgtgatttatatattttcattgcttttcaaaacaagcaacacttttaagtttatgatacagtagcaatcactatcagagtacaagccacattccaatgttcttagattaaaggtttgttctaaacataactaataaacaaatactagattttgtcaaaaaaactaaaaaaactgtttaagaatatgattcatttacttttatttgactttattagttttagcttacttcttacttggtaaaatttgaaatgtattaaagtgaaatgtatatgttttttttatcttctatcttaattagataaaccaattaatttggaaaattaaattatcaagtgactagtttgttaattttcttgaaaaataacattcataaaacagaaaaaggacatgagacaatttaatcagtttcagagaagaagaagaaaagaaaaatgtaaatgatattaatacacgcttatttgatgtatattcactaagttaccaacaactagctttgattattttcgtttgaaaatcttaacaagagatgcagattaattatcatatactgaagagacaaacaaacttatttgttatttatttcttaaaaattgctagttgttttttaacaaaaaaataattagtagtttagtttagacaaatctagtacaaacctcgaccaaatttgtaccacatcttcatctatgggttatatctatcaatacctgcaattaatctggtggaggtttggcacatgccaacttcaacatatatctgaatgataaaaatgagtttgtgaaaaatcatttaatggtcaaatgtttctaaatcttctagaagatgagctaagcgatatcatattccacgtgagtgcatcttaaccttgtgagagactttttgaatctttcagattgatattcaacaatgtgatagtatctttgtatgtagggaaattctgctggccttagtactctaatattattttgtgatacccatgactttcagcgtctgccaatatctccgatgagcttgagagaaagggaaatatttccttgtgccaaacgtaaaacagatgtaaaggtgaaaaataagttcgaatctaactctctagcaaaggtacgaacataaacttgtctactattggcctgttaaagatacaaatgaattatatgcttatgaaattcattgttatgtaggtatactttcgaatcaagtgtgaaaaagcccaagaagcaaggcaaactgcattgttaaatctctttgtctccattataagtgatagcgtctataataagctaaggtaaatgttgaaagcaaatagtttattttgttttagtctaatttgtacttatgctagcttgcaactgctgggcactgaaactcacagagtttcaaatctattttgctactaggatcgaagaaaagcttggttacttagttgaatgtgaaactcgcttgatacatggagttggtttctatgtatgcgttgtttcttcagattacaatccttgtcatttggtaaggcgaatctacaagttcatgaatggaattcgcttggtaagtttgtctataatttcatgaatgttgttggtaagtttctttagcttggttcatatttcacttatttggtcctatatttataggaaggtttgtttgacaaaatgtttaaagatttcaaaaatggtgtaagttcgaagttgccacatgatagtgggaagacaaaatggagtgagattgttcgagaaaggtaatgaattcatcgctcgagaatgatttgaatatttttcataaatttagagttaacttccctggattatattagtcaaactttgatactatagtttctatatgcgaaatcatgcaacatgacaatgtttgaagtcgctaacttatctatgtttgatttattttcagttgcatatttgatttctactccgaagaaaagaaggagctaagcttgatcacgaaaaatgatttaatagaatggtacaaacggtatgttagactatcttcgcctaagtgctgtagttttgttgtttcaatttggggatgcaacaccaaaaatggtctagagaaagtgaagattcttcggttaagaaggaagatgaaagtaaagaagaagcagttttggttaactcagaagattccgctataccttggcaagtgtttatctagaaagaggtagatcaatgcattacttgtaatcagaggttcagcgagtcaggtgaattccataggtcaagagatgaacacatcattacttatgctagttgcaaaaaaaatggaatccttttacaagctaatgagagtaagacagacactgaactatgccgaggcaagaaactatgtgtcattaaaaaggccatggattgccgagacggtggttacacaggtacggcatttataaataaaagctctggaaatccgaaatcttggattacagtagcagagcaacgaatcgatcgagagaagatcgaaaaggtgaagatcgaagcagcgagaccttcatggccaaccatataaggttctcgttaatctgaatcagacaatcaaaatgcagcaactccaagaccattttttaattcttcatccaagttcatcttgttgcacaagtaaggatacgacaaatcaactactttgcttgcaaaacgagacttgttttgatgggcccaataataacatcacctatctttgatttattttacatgacaaaaaatccgacgaaatcctcatggatacttgaatgcatgtaatggcatcattagtgtttcgtgtgtacaaatgcttcttgctcttaagcgtatatgtacatgatgataagtgagtctaagtgttgcaactacaaaacaaagaggtatagatgaaactggcagctgcacaagtaagcaaagctgaacggagatttggcaaggcagaggattttgtcttctttgtgattacaaactagctatctcatggaagcataacaaattatgcatgctattttattcatgtttctaagttgaatagcacaagtagatagatcaagttggagaatgctctttgagaaatgtcttagcaataatagagtgagacaaagataagaaataaaaggattgttaagtcatacttaagctaagcatagcaggtttaagttacatatcttgaagaacaaggggagacaaagatttctcaagggaaaatctcattacataaaaaaataaaataaaaggtttcaagtcttaataaagcattgcaagttttttttaggtgatggtggcttcacgagcatcttcttcttcttcttcattttaaaagctttgtgcttgtggaggaatcgcatctttgaacttgattgaaactgcttagctacgctgagtcaggtgaaaaacactaacacatatgagcaacaacctcgtcgctaattcaaagccgatcgagaggtaaaatgaattgaataccttgtcgaagagtcactaacatcaggtgacaacaacttttcctgtgactcagtaacatcaggcgacaacttttcctgttatgtataaacaacaatttgtaagaatcaatcaataagcctagacggaaatttcaattgcaaaggtacaatggaaaataacctcaaaatcatagcggcgggcgaaacgcggatttgtagtataacttcgcacttgaagtctggaaacgcagatatgaatttgagagcaaaaagaggctctgtatgcgtgatgggcataaattctacccattattgctctccgtgccgcctccttttcctaggtgttcatatatacaagtgcctgatgggttttccagctcctgatctggcccatactattgggcctatactagatagaacgaggttttttagataattgttttcaaatgttcttactctttagacctcctgcttgatctcgggtcgggaagaagcaagcaaaccctttcaagttgttgactttactattgccaatttcttgagagatttgccaattatcctttttaaaatcttacaccacgatggaaatatgccatgtccttagaagatttggtaaggcagaacatttgtacattttattcgtgttatcaaggagagaaatgtctaggctctagctatgttagaacgggacaaagatatgttgcaaatcaataacataaaaatgttttaagtcatagtaaagcatagcatgacatatcttgtagaacaaggggagaaagagaaagcgtcggacagatctctcttgagaaatctcattacatataaaaaaaaaaaaggtaaaaaaggttttaactcataattataaagcatcgcaagttttttttcttctaaaaaggagtaaagaacctaaggttatagtgggtggcttcacgagcatcttcttcttcttctttttaaaagctttgtgcttgtggagtaatcacatctttgaacttgattgaaactgcttagctacgctgagtcaggtgaaaaacactaacacatatgagcaacaacctcgtcgctaattcaaagtcgatcgagagataaaatgaattgaataccaccatgattgaatgaatattggaaaatttcagaaaatgattaaaaacgtgaaaattcgcaagttctatacatggtcagacatatttgttgttacacaaacaagaaattacgctgcaaaccagacgctaaacagttatcgaatcggaaaaataaaatttcaaccgggttcaatgaaatatggttacaagtacaacgaagcggaaactccggaatccatatcatttcatatacagacagcagtaacacagacgccagaaccttcttgcttttctccgtcccacacttgtcttttacatttatacaacggatatggtaatgcgaggaaacagaaacagcaagcaacgttgcattgtgtgttattcattctctctgttagacattgaagatcttcttgaccttcctgatcttcttacggcataccggacaaaaacccgaagtttcagctatcctgtgtattgtacatccaatttttgaagtcatcattaatgttcattcttgtgtcatgaaaagatcccattcaaaaatgacacaactaaaataatgaaaagatcgaacatgttattttcttaccgtgtcccgcactggaagcaagcaacgcagtgtccacaagagaggaagaaacagtctctaggcgcatcatagcaaattgcacatagatatcttgtactactgtggccttcaccatgtgcaccttccaattcctctgtactcgtcaaaatagaactgtaggacgagcaccagcttgagttatcatcgtcttttcccggaattagaggagctacatcatcattttcatcaacggtttcatcttcagtgactggttgtcgtttattgaagagactcgagacaattaacaagagtgctgtcactacacctgtgataataagcccaggggaagagcaaaagtttatgataaagtcttaaacggaaaaaattcggtttatatgcctcatgttatataataaaaagaacattacccatgcaaactatgtatgcaatccaccttggttcatatgagagttttgcgcagaactcattcttagaattgttctgaacaacaagaaaagagttggatccaaactggttcgtaagttttattctcgaatatacataacaatgtgaactattttgtattgctctatgaatagcttgttaagaagaataaaatggaaagacaagaaatagggtacataccagctttggacctggtgaggttagtacagcagcattagttccaaataatggaacacttagagtgcacttgtcgttagggaaagagcaattgtaataagcatttgtagtatcatacaataccccctcaacttgaatgtcaatcgtcgcctgaacatagatattgtgtgagaatggtgtataatcagacaaaaagagcgctacttgggattagaaaggggcaatatactgcagtaaaacttttcaaaaagttaccctaagagtttaagttttaacatatatcatcataagctgcttcagcatttaccttcacttcattcaggtatacgttgcctactgcaacataataactcgacgacttagttatgtcctgctcaatataaccactatctgtcacaaataaaataagtagggcgtgagtgaacacataaatattcagaataaaaatccatcatgttaaaaaccttggacacttgccagagattatatgccacgacagtgtagtgtctggacgcgtcggatcttgtacccactcagagagcccatccacaccttcaattataaacgcataaaaaagctgaattacaaaacaactattctttcttaacagcctgtgaataccagaatatgatgaaatctcaacatcaaatcaggggagggatcagactggcataatgaacattcttttgcaaaacatcttctcattcatatggttattaaagacagaaaacaacaatgaaggtgaccgttccagcaatttgtctcagtggatactaaaacatcaccaaactaaagatttggcgaataaactcttgtgatgaagatgataatttaagtggccactatgaagcatctatctaaattactaaactaattataattaaaaaaggattcttctctagcataccttgggctatcacaaggtataaggaagaacccacagattcaacgttgtatgaaacttttacgcgtgaccccttgttcaaatactgtatccaatactgcaaaatgtagcaaaacaaaaagtatcagtccccgtttcaatagccatttctagataacacaagtaaagagctaaccttgtaagaatcattaggcacagctagatagtgaacttcggaccatttagtcagaacatcaagctgtggggcttggttcaatccatacagtatcaaaccagatcccttgttccctaattcttccaccttgagaaaatcggcaaagatagaaactttgatatcagaaggttcaacaatggtggattctaaatgcatgagaggagagaacatacaatgacattttggacgaacactgaagttggcttaataagaaacgaagagtttggtcccaaccagacattcgttgttccataaagccccagaatcaaagtcatcgacactgatttaaaattcaacgacgacaagacatatatcaacaacaagaacaacaaaaataaagcatagattgaaaaatacgaacttaccaaagatacagaaggtagcaacgacgacaacgcaagaccaagggtcttcagaagtggaattgttcctgacgttctcagatgcaacaacgcttccatggcgataatcgtactcagaacgattccacggtggacgatcacgatgatcaaaaccggaatcgttgccgtgatgttcaaagcgatgaaagccggtttcttcacgggtcacaggcggagaagaagaagaagatgggagagaatccggtagagacatgttgtcgcgaatcgatgagaggaatgaagaaattgaagagataaaggtaaaaccctaaccttaggtttggggttaatgttgttgaggaacgaaggatgatttgaacgacgggtcggcttcttctctttcttcatcgtcacgttgaacggtggattcacaaaacttggagagagacgacgactttggaaaaagtaaaacatttattttcttatcttaatagaaatttaaagataaaaaacattttcgaagaatctctttttggtttggagttaggacaggctggtctggtctcgttttacgcaattactgtaacaccctcattcccatctgtcatcagctacggtatattcgtaaatatgacatttaagtgagggcttatccgtaaataaccgaagcgagtcacatacctggacgcagtcttcgtttctcattccagtctggttttcgacatacggaaaaaaaaaaccagatctacaaaaataaataatccccaaattgaatttcaaatttcgaagcttcaagaaaccctaatttttctcaatctaagctgaggtttgggatctcgtacattgcacgcgatgggagatttcaatctcgctctcgtgattgttgcgatcgtagtttgcgtcattgttttcatctccagtatctacctcctcgtcaactatcagcatccagatgatgcaaaccaggcttatttccccaaattcgttgttgtttttggtttatccattgctatgatctctattctcatgttaccggcggatgtggctaaccggcatgcttgtcgacattcgatttacaacggcgcttgtaatctcaccttacctatgaaggatctttggcttgccgtttacattgttgacgctgtgcttgtcttcttcatcatccccttcgctatgtttttctatgaaggcgaccaggacaagtttgtttctccacgatttttttttttttttttttgagttattattagttggtaatgtaaagttgttgatgttgtgggcttgtgttttttactgcagggctcttgggaagaggataaagagtgctttgatttgggtggttactacagctgttgtttgtgctctggttcttggaattttatacggttagttgttactgtttggtttcttttgtagattttgagcttcattttcttcctggtttgaggaaaattactgagattatgttggagtggtgattgaaccaatagtgggattgtgaaaagggtggtcttctgatgttcttcttatttgcattagtgatttataatgtaattctacaaatgtattaggagtcattgggaaggtggacttctctgtaaggcacttgtcttctgccacgactactttccctacttcatggcagttttcaaataatcaaccttgcattggtaacactgctcgtcaggtaatactttaaattttcttgcattcttgttatgagtttttctttcgttagtctctatgcaaaatatatttcagtatgtaaaatatcttctcttctccttggtatattgatcggcagtgctcagcatatacagctaatgctgcgtctgaaaagacatggtccatgcgtactacgtttccagaatatgttgttgctcttgctacaatcgttgggtcagtgctcttcacggtatgtacatctctctattaggtgttttgtgttaaaagtttcacctcattgtcttggaaggcatataatctttctcatattaaggcttggttgtgttctcttgcagttaaaagacttttggtagctgtgattttttgctttcctctaaagattctgagaaactcttttatctcaaatgttgtagatatttggtggtgttggtattgcttgcctacccttgggccttatcactgcattcatcaggcgaccaaaggctgttatcactcggtcacagtatataaaggttcatttgtgctggttattgttgtctacttgtcttcatgcaaagcttttctaaagaatacatgtacacttcgggtagttggcagtgttagtggcctgacaagtcatctaattgtttttcaggaagcaactgaactaggtaaaaaggcaagagatctaaagaaagcagctgatgcacttcaccaggaagaacgaagtggtgctaagggaaggaagtggaggaaaaatgtgaaagcagttgaaaaggtacaccatcatatctaagggtttggggtcttatttcaaatctgttccatgtctacaaaggtggctgatacctctgttgatattggttgctgatgtgtagtggcgcttttggccgtaggggcagttacttaggtgatcattcatagtaaaaagctcgccaaaaagtagaaaccagttctgctataggcccactaatattggcagcttgatgcatatctgattgtagatttgaagtcttaactactcttaattggatttcattgctttcatgtatcctgtaggagttgctccaattggaagaagatgtgaacctcttagaagagatgtatccgcaaggagagcaggtaaagatgactatacctcagtattttatctatctaaagaattctgtaatccaatatttgccttgcctcgtccattttccaggcagagactgcttgggccttcactgtcctgggatacttggccaagtttgttcttggaatcttagggtttgtattttacttaatcttcttagtactttgatgttttcactctattagtcctcggttaagctcttattaaataatttctttttttgcttgttgaagattaattgtttctgtggcttggattgctcacatcatcatatatctacttgttgaccctcccctctctccttttctgaatgaagttttcatcaaactggatgacgtctggggtaacttcattttctgatcttgttatgctactctataccttgttccttttgtgtctgacctggctctgtgttcatacatgtgacattttcttgttcactaggtcttcttggcacagctgcctttgctttcttctgtttctatctcctacttgctgttattgctggggcaatgatgcttggtttgaagctggtcttcattaccattcatccaatgaagtaattcatcttgtagttttgaaatgttttttgctatttcagagatctttctgttttcttctggtttctcataagcctaattaacttgtttcagatggggagccactcttatgaactcttttctctttaatgtcggtctcattctcctctgttctatcaggtaggcttcttagttctcatatttcccgtcagctgatagcatcaaaagtatgtattaacttttattcttacaatcgactattgtggctcactgaaattccagtgtgattcaattctgcgccactgcatttggatattatgctcaagccaccgccgctcaggagatatttggccacactttgcagtcccttcgcggtattaagtacctctacaagtaagtaatatcgggtttttgcaaataaaggtctcacttgtgtacataagactgatgataatcttccctttcttatcggtatctttcaggtacaatgtgttccagatcgggtttgttgtcctcgctggattgacctttttatattacattgcctttgtaagtcccttaaatcctctcggttttctgttccattatatagttctgtgtcattagtcagagatctttaaactcatgcttttggtgggtattttttggcagggatggagaagaaaaaagccgagcggcagattccagctctctacctaatgtaaatctcttcttttgattttatcgtttatgtttcctcgtctctgggatcgatcgcgtgccactgaggattgctgtgtccacaattataccgagattggtctcatgatctgtgcaagtggtcttatatcataagaacaagcacctgcccaaaaagcttctctttcttctgcttctctttgctgctgaggtttgttttcatttcacttgaatgtaaaattattcttctttttctcttatcttttctcctgtatctattgctttatttttgtttgattaattacaagaaagatctctttgtcgccgtcttctcatggcctattgaatgatttcgaatactttcttgtaaccattacttggttgagagtttagactgtcagaacaaattcaggttttggagttatttgtgtgtatagtgtgatgacaagagacttcataccattgttgcatttctattatgtgggaaaccaaaatttctccttgttatggaccaatctcaaattctcaatggtactttgactagagttttgattttagccgttcggttttttttttggttcggcaaaatcgttcgtttggttcgagaagtctcttcaaacttgaaaacctacagtacttttgtttgtgcggttagattggcaattgtttgattcggttcacgcttaatgcggccggtttagataaaaatacaaaacaaaatatagtttaattaacaatatgagagcgaaaagaaaggaaaacttacgaattttgttttaaaaaacagttaaataggaatcgatttggcacgatttggtatgtctttggttttggtaatttggtatggttagtaaaatctccggacactctgggagggtcagagggtctcagagatgggaacacattatataaaccgttggaggaacacagcctctcgcttagctaacaacaactcaacgagtgacatggacatcgccctcttctcaccggcgtcgctctttgctgcagacggtgactcctctggtcagtgaaatctctcttctttcaatttctaatttgatcgaagggagagagccataattagcgaagtaactgtaatttttattctcagatggagagacgacggagacgagccagaacttcgttgagagaaatcatcagtttcctggaattgtaatttcttcgctcccgaatttctcttctatcgtctgcttttagtaatatcaattccatatttagtttacgttctccgttgagagtgaaacctaagcttctgatttcagtgattttgagttcatatagtggattaggtcttagattgctctgctttggtgtttaactaaattatgttgccttgaagaaacgaattcatgaattcgctgtgatgtcttttgtgaaatagttttcttactgagattgagtttaaggttagtgttagtatttcaaacaagtttatgattacttgttgtttgaataggaactgcaaattcgggaatttggtttccaccagctgaatgcaaacttgctgtggccaggtacatttgcctttgctgattggttactgcagcatcgatatttgatcgaaaggcggcgctgtctcgagataggaaggtacttccttgtcttttgtctattctttatgcttattttgttcaaggaatcctgaaagatgattgatttgtgtcttggttacaagttgcttatatgccagtgtcagtccacttatcagtttttatttattttggttgtcttaaaatcaaatgggcagtggcacaggggcactagctatatttcttaagaaagagtttaatctcgacataactacttcagattacaatgatcaagagattgaagacaatattgttcataactgtattgcaaacaagattatcccttctctgcctcatatcaagcgtgagtttccttattactcacaaatggcgtcgtatgaatttgattgtttttgcttttcttacattctcttatctattatgacagatacatggggtgatgaatttccaatttcggaaccagattgggatttgatcatagccagtgatatccttctatgtaaatacccatttcccattcgatttatcggaaaactatacatatacatttttacattcggtttttcgcagatgtgaaacagtacccaaacttgattaagtctctgacttttcttctcaaaaaatacaaaccaaccaatgtcgttagtccagcagaaggtaagctaaatggtcagtatccctttcatcaccactcacacacatcaaaagaagtcttaacattactcttttacctgtaggagcagacacagaactgcctcgtcctgtgttcttaatgagctggagacgaagaattgggaaagacgatgagtctctattctttacgggctgcgaagaagctggcctggaggtgaagcatctcggaaaccgagtttattgtatcaag
